United States Patent Application Publication US 2011/0183924 A1 - sequence listing, part 237

SEQ ID NO: 643893 - DNA, 1113 bp, Homo sapiens
acactgcgccgcggactgcgcaagtacacgggaggcttttaattccattgtggagaggacggcgttattatcttattaacttggacggcgacggagagctgcaggctgatgcggcgggacccacccaggacctccatccgaggagtattgaacaatcgggacaggatgggattccatggagatgcgcggcgagatggatacacgggccagctacgcggagatgggtaagcacgggcttcacagtgaggagcagagagggttacccagggacaagtacggcacacttccattggcgggggcatacattggcacgtcaatatagggagtttaggcattcaaagacaagtgcagaacaatcacccggcggggaattccttgacggcagccaccacaagcatccccaagaaaagacaaaccaaagtcaacgcaaccaaacaaacctaatggggggggacgaccttggttcagccatagggcaggccttcgaacccagaagggttctccaacgagacagcttaagggaaggcgactggcttgacacgcgagagcggaaacagtccacaagtgctggtcaacatccaaagggaaccattcccaggtattttacttcacaacacaacggaattggtaacaaggcacggaagacacaagggacccaagaacaacaaccagggatgaaccggttaccttaaccattccaagacacgccaaaggtacgcccgcggaccctgacgctggaccccaacccaattgtgtcaacccgtggaaggtgaaagacccaaaagaggcaaagggaacacacctaaacgtgggttcacacacaacggggactaacaaacagggcgccaaaagggccacaggaaacattctcccaagggaacattcccaacaggcccaagggaaagggaaagccccaatgagtgcacattatttgcaaaaacacctttcccatcggcgacctggtgacccaatgtgcgaagcaaagggtttgccaaatcccattcttcccccaaagggtcaagaagaacccgtaacataaatccggtgtactcaccacttgcattagttgactggctatacacggaacagtacttaactcaccttgacagagaa

SEQ ID NO: 643894 - DNA, 350 bp, Homo sapiens
  misc_feature (62)..(62): n is a, c, g, or t
  misc_feature (120)..(120): n is a, c, g, or t
gtgtgggccttaaaccctggccaaactttaggggtttgtccttaacaaatgggaaatgcccntggggagctcccccctggggccccagccccagcccaattttttttccgaaaggattantgccttgggccccccctccgggggggccccatccccttttttgtttcccccctggggtaaacagggggaaaacggggtggggggaaccttgatttgggcccagtcccctttcccccttggggggaaaagcccctttaaaaaaaacccgccccccccgccccctttttttttttgggaattttttgggggtgggaccccaaaaaaaaaaaaaaaaatcctttttttttcca

SEQ ID NO: 643895 - DNA, 244 bp, Homo sapiens
aggaatcccccacaggcacgaggcctggacggcccggcccctcactcatccacgcagcgtcctccgctgctggcagggtggagccgttgatcacacaggcccgccctttttctggcagtcctttccccagtacccgggggcccaggaccattcatagagtccatcgtccatgctcacgcacgtcccgttgttccgcacagggggccgaggagcagcgccctaacatctctatcacggagctccc

SEQ ID NO: 643896 - DNA, 449 bp, Homo sapiens
acattacaatattacaaaaattcatattgcttatgaacattaacaaagatattagcttaagctaaaacccaacagcatgttgtgaaaaaatgtcataatcaagtaatgtttattgaaagtaatcgagttatgtttattgcaagttatctagttatgcttactgccttctacagaagcttcttcttattgcattgttttgcttcatttttaaatacatataaacattagttctttgttagttattttgctttataaatatttttcccattttctggtcatttatcttttttactcttgcgtgatttttcactgaaaagttgtctattttagtatagtggtatttttccatccttttcttttctttttttgagatgcagtttctctcttgtcgtccaggctggagtgcaatggtgcgatcttggctcactgccatgtccaccttccatgtt

SEQ ID NO: 643897 - DNA, 121 bp, Homo sapiens
agatagtatggatgggagggagaggtgtcttaagctgtaggctaaacttgatacgcatttatagagatatagctttaatattatattagagatgtaaaacattctgctttcttagtcttac

SEQ ID NO: 643898 - DNA, 384 bp, Homo sapiens
cggttagcaccccccaatcccagaggcaacaatagatgacacaggctgggttggtctgcccctcagtcaggccccctataccacaaccgaccgagcacccaaggccgccgagcgccatcaccccacaacagggggacaaacacccataacttgacagcgatactcagcttgacggagatggggggcaggtcatgcccaggggcaggcagacatcacgactactcgtggcagcgagcggcacgaagccaaaggcactaccaaagagcggctggtgcagccaaggctccgccaaacgcaaacagaagggcctaacccctaggcagccccaccccatcacaccaccccacagaccctagacggcgtcacccaaggccaagcccacca

SEQ ID NO: 643899 - DNA, 594 bp, Homo sapiens
acgatgacgcaagcgtaactacgctgcttgcggctataatctgcctattaccaccaactagttcaactgattggccattgcgatgaactttaaggtactcatacataactggagctagtgccactctaccagttaaccgacgagcatctgtagctttgaaatccgctctgtacgaccacagtctgctgcagataatgcgacaacataagtagacacgctgtatgagcgaaccagcttcctgtcaaacgctgatatcagactactgagtctttcacgtgacatgaatgagacagtggctgattgcacgtcgtacgacaacattctgctaacagatgaactggcccacgattggcagcatcttgctcgaatggtcatctgatgtaccagatactcatcctgacacgatgccttgtatccagtgagccgcattggatacgacttacaaggcatgcacgattgatgaaattgaagcacaaatggatcgccgattctgactacagttctcatcaggcacgtaagtattgaaatctgatgaactgacattgcgctacacttatcataaagcccatgctggcagagccaatttatactatc

SEQ ID NO: 643900 - DNA, 284 bp, Homo sapiens
acgacttgaatagtaaatatggttattatgaaggcaaactcaagttgttaccaggtttacagagatatagtacacgaagacatggtctaggaaagagatgtcctccattatttgaacgtcatatgctagaaagaaaaaagacatttactttcaaaactaggatgtatcatctttcttaaagatcgcctgcctagtttctcgaaaaaagatggtaatactgttaaatgctcatattttatcttcctactattccacatctacttttacaaatgtcgatgtgagaa

SEQ ID NO: 643901 - DNA, 442 bp, Homo sapiens
  misc_feature (7)..(7): n is a, c, g, or t
  misc_feature (23)..(23): n is a, c, g, or t
  misc_feature (40)..(40): n is a, c, g, or t
  misc_feature (50)..(50): n is a, c, g, or t
  misc_feature (299)..(299): n is a, c, g, or t
  misc_feature (440)..(441): n is a, c, g, or t
tgggacntctctaaccttttccnatgcaggatggccccgnaagcgggganagactgtgaagctcccagaaaacatgacaaggggggactttccctgcctcttgggagatcagaggggggaaatggcagcagaaagcgcagctctgcgggcctactttcaagtgacacagatgtttttcagatcctgaattcccagcaaaagagctattgccaaccagtttgaagaccgcccccccgcctctccccaagaggaactgaatcagcatgaaaatgcagtttcttcatctcaccatcctgtantcttcaaccagtgatcccccacctcggtcactccaactcccttaaaatacctagacctaaacggctcagacaggcagatttgaggtttccccctgtctccttattcggcagccttatgattaaacttccttctctgcttannt

SEQ ID NO: 643902 - DNA, 253 bp, Homo sapiens
catctttctaaaggaaacgaatatcccttcttccttcggagagctgtcactgtacctttttcatctcacttattttatttgttttatgattattttttttacgaaacggagtcttgctctgttgcccaggctgtagtgcagtggtttgaactcctgggctcaagcaatcctcccatcttgggctctcgaagtgctgggattacaggtgtgagccacaaggcctggcttgcctctcactaattttgatggtgat

SEQ ID NO: 643903 - DNA, 301 bp, Homo sapiens
ggcacgaggagaagcattttcagttcgagcgccaagatcgttaagcccaattgcgagaagcgcacgagttcgagtccgcattttccaggtttttttgagcggagagaactcgacctagggttagttaggagctattttacgcagcaaggaattagttggggggccgaaacttaaattttttcctcccatctaatttccaaaaccaggcctcaaccatttggaaaataagggagattgttttctcaaggattaccacaccgaaccgaaatagaacccccggctttttaaaaaatgacacccc

SEQ ID NO: 643904 - DNA, 130 bp, Homo sapiens
agaggtcaaggccgcagtgaggcataattacaccactgcattccagcctgggtgacagagcaagaccctgtctcagaaaaaaaaaaaattgtgacagagatgcgcggggttgggggaaccgagctcgaat

SEQ ID NO: 643905 - DNA, 221 bp, Homo sapiens
ctgaaccacaggcggtgtaagatttgccgagttccttttactttttttaacctttccttatgagcatgcctgtgttggggggagagttattataataatgacttgacgcttgattgaagatattgtactgttaattgtcagttcagtgatttaatctgacgcaggcttatgcggaggagaatgttttcatgttacttatactaacattagttcttctatag

SEQ ID NO: 643906 - DNA, 198 bp, Homo sapiens
  misc_feature (188)..(188): n is a, c, g, or t
ggtcgatctctagcacggatcccccacacttcgatcgcggagaatgggggatacgtgtataacattagggtgttttctcgtgtgacatagggttttatgttgttaatgtggtgtcgtgagtgagccccacttgtgttcgtggttaaatatgtacgagagagtatagcggctgtgactagatatgttgnagtctctgta

SEQ ID NO: 643907 - DNA, 955 bp, Homo sapiens
gggagactgcacggagcatatttcacctccgtcaccataatcagtcgctatccccaccggcgtcgatagactatttagcgtgactcgccgacacatccacggaagcaatatgaaatgatctgcgtggagtgctctgagccctaggattcatcttgcttttcaccgtatgatggccgtgactggcattagtattagccaaactcatcgctagacatcgaactacacgacaggtactacgtccgttaggctcacttccactaatgtccgtatctggttacggggctgtatttgccatcatacggcacggcttcattcactgatttcccctattcgtcgagagcgtactaccctagactcaaattcgtacagccagaatccagtttcgctatcatatgcatcgggcgtaaatctaacttgcttcccagccaacactttctcggactatccggaatgccccgacgttactcggagctaccccgatagcatacaccacatgaaatagtcctgatcgatctggtaggctcattcatttctctaacagcagtccaatattgaataatttggcatgattggagaacgtcttcgcattcgaagcgaaaagttctaatagtagaagaagcctccataaacctggagtgagtacatggatgccgcggcacctaacacagatgccgaagaacccgtataccgttacattctagacgaaaagatggcagggaattcgaagcccgccataggcctggtgtcaaggccaagcccatgggcggccatggacgttttctaagccgaagaacgacgcgttgggtggagaaaagggggggggccaagaacctcccggggggccaaatagggacactggtcgggaaggggccaggaggggataaaacaagggcgcggggaaaccccccccggaaacggcgcggctgggagccccccgggggacggaaccccgggg

SEQ ID NO: 643908 - DNA, 917 bp, Homo sapiens
  misc_feature (14)..(14): n is a, c, g, or t
  misc_feature (27)..(27): n is a, c, g, or t
  misc_feature (30)..(30): n is a, c, g, or t
  misc_feature (37)..(37): n is a, c, g, or t
  misc_feature (41)..(41): n is a, c, g, or t
  misc_feature (70)..(70): n is a, c, g, or t
  misc_feature (78)..(78): n is a, c, g, or t
  misc_feature (83)..(83): n is a, c, g, or t
  misc_feature (86)..(86): n is a, c, g, or t
  misc_feature (89)..(89): n is a, c, g, or t
  misc_feature (95)..(95): n is a, c, g, or t
  misc_feature (101)..(101): n is a, c, g, or t
  misc_feature (107)..(107): n is a, c, g, or t
  misc_feature (119)..(119): n is a, c, g, or t
  misc_feature (128)..(128): n is a, c, g, or t
  misc_feature (141)..(141): n is a, c, g, or t
  misc_feature (146)..(146): n is a, c, g, or t
  misc_feature (156)..(156): n is a, c, g, or t
  misc_feature (163)..(163): n is a, c, g, or t
  misc_feature (171)..(173): n is a, c, g, or t
  misc_feature (176)..(176): n is a, c, g, or t
  misc_feature (183)..(183): n is a, c, g, or t
  misc_feature (193)..(193): n is a, c, g, or t
  misc_feature (195)..(195): n is a, c, g, or t
  misc_feature (197)..(197): n is a, c, g, or t
  misc_feature (199)..(199): n is a, c, g, or t
  misc_feature (207)..(207): n is a, c, g, or t
  misc_feature (210)..(210): n is a, c, g, or t
  misc_feature (215)..(215): n is a, c, g, or t
  misc_feature (220)..(220): n is a, c, g, or t
  misc_feature (222)..(222): n is a, c, g, or t
  misc_feature (237)..(237): n is a, c, g, or t
  misc_feature (243)..(243): n is a, c, g, or t
  misc_feature (258)..(258): n is a, c, g, or t
  misc_feature (260)..(260): n is a, c, g, or t
  misc_feature (269)..(269): n is a, c, g, or t
  misc_feature (271)..(271): n is a, c, g, or t
  misc_feature (333)..(333): n is a, c, g, or t
  misc_feature (348)..(348): n is a, c, g, or t
  misc_feature (356)..(357): n is a, c, g, or t
  misc_feature (363)..(363): n is a, c, g, or t
  misc_feature (369)..(369): n is a, c, g, or t
  misc_feature (378)..(378): n is a, c, g, or t
  misc_feature (381)..(381): n is a, c, g, or t
  misc_feature (384)..(384): n is a, c, g, or t
  misc_feature (401)..(401): n is a, c, g, or t
  misc_feature (410)..(410): n is a, c, g, or t
  misc_feature (420)..(420): n is a, c, g, or t
  misc_feature (432)..(433): n is a, c, g, or t
  misc_feature (454)..(454): n is a, c, g, or t
  misc_feature (469)..(469): n is a, c, g, or t
  misc_feature (491)..(491): n is a, c, g, or t
  misc_feature (544)..(544): n is a, c, g, or t
  misc_feature (551)..(551): n is a, c, g, or t
  misc_feature (589)..(590): n is a, c, g, or t
  misc_feature (917)..(917): n is a, c, g, or t
tttgagagaaggcngtgacggcagggntcngggcgcnaggnggcgtccagggagtgatgggaagcctgtnaggcttancggtnctngcnactganagtgantgggcngacgtgcaagtncccccagcnttgggcgtcatancgccntctgtgcganagcagtncaagtgtnnnggntcctgtngctgggacancngngnccccaaangcngtgcngaaantngagccccagtggatnaacgtnctccaggaggactcngngactctganangccgggggactcacagccctgagagcgactcctattcagtggttccgacagactgggaagtntcatgtcccacccanacgcagcnnagcaanaggttnaaggcgaanaanaangacagcggggagtacangtgccacantgggcagagnagccttagcgannctgtgcatctgaatgtgcttnctgagtggctggtgntccagacccctcacctggagtnccaggagggagaaaccatcgtgcgtgaggtgccacagctggaaggacatagcntctggtnaaggtcacattcttccagaatggaaaatccaagaaatnntcccgttcggatcccaacttctccatcccacaagcaaaccacagtcacagtggtgattaccactgcacaggaaacataggctacacgctgtactcatccaagcctgtgaccatcactgtccaagctcccagctcttcaccgatggggatcattgtggctgtggtcactgggattgctgtagcggccattgttgctgctgtagtggccttgatctactgcaggaaaaagcggatttcagccaatcccactaatcctgatgaggctgacaaagttggggctgagaacacaatcacctattcacttctcatgcacccggatgctctggan

SEQ ID NO: 643909 - DNA, 215 bp, Homo sapiens
gataacagtctaggtttcctttgatctcactagttgttcctactcagtctcctggacttcttaaactaaagaggctcagggttcacatcttaaaacttttcactttttctttttttttttttttttattaaatggtggtctgggttgggaataaggggggtcaccgagctcgatttcgatactcagggctcattaggcgtgttcccgggggtgaa

SEQ ID NO: 643910 - DNA, 182 bp, Homo sapiens
tggaggccgtcatgcgccagttcgaagccagcctggtcaaggccagggccggatctgtagaaaagctggcaaatcaaaaaaggtccttcagtcgcaaggaggctgaggctccctttaggagtttggtgaggacgcatgaaaaatatggttggcacaccccccccgtgcccgccggccttaat

SEQ ID NO: 643911 - DNA, 258 bp, Homo sapiens
cgccctgacaggaggatctttttagcttgggaggcggtgggtctggtgacccgagatagcttcggttcactttagcctgggcaacaacagcaaaactctgtctcataaaaaaaaaaaaaagtaatgaaatagatactaaggccgggtgtggtggctcatgctgtaatcccagcactttgtgaggccaaggtaggcagatcacttgaggtccggagttcgagaccagcctggccaacatagtgaaacttgtctctacca

SEQ ID NO: 643912 - DNA, 95 bp, Homo sapiens
attcagatcaactactaatactgcatcgcgactactgtggcacaacccagcgatcaatcggataaggaaagagagagaagtcggaataataagaa

SEQ ID NO: 643913 - DNA, 749 bp, Homo sapiens
  misc_feature (351)..(351): n is a, c, g, or t
catggcgcttttggtgggctactactctttctcggcaatgtttttttcttcccctaatttggggcttctttctgttttttttttcctctctttggctttgtctgtgtccttttctccttcgttggattcctccccctttgcttctttctggtccactgtggtggtgcgtgtacatcgttgttgatgtgcatctgctctcccatcggctcaccattatgttgggcgctttcgcgcttttaaatttgggtgatctgtttcaacgctagtgttttgggcgtctattttttggtgtcctttatacagtggagtctctccacttatgtgggtctccctcctcggagacagcatgtngtcaaagtgttgaagatgtaaggaggttttctctcgttgcttatctacacgacaccctccggggagcacacactttcttgagatctgtttaagagatataaggtgagaagcgcgctcaggggttgttgtgtcacgcagagcaaggcttgtggggaggcaccaatgtttgatgtggcttctcatgtcgttgggacctgagataggctctcactaatggggcaatccagcctatggttggttttcacctggagagactgcctccctggtcatcgttctacccacatgtagttctcgtctatgttcccaaccatcagctgctttttaaataagatctctttgtaccatcctgttaattgtgtaaccatctagtaatggcatcagcacgtttacccaaacca

SEQ ID NO: 643914 - DNA, 726 bp, Homo sapiens
gggagatccgagaacgagaaggtgttgcccagcccaaggagcttccaagtctcggctctgatccgtggccgacgtagaggaaacctccacacacgcccctataagtgctaatggtgcagtttgtggtccccctctgcccatcactgtgctgtgcttgttcctgcctctgtgccttcgcactatactgctcggacaggtccccgtttcgtctcctctacccagctaagcccttatgatccagcggggcccaggctgtcccaaaccacccgagcccacagtcctcggttcctgctcacgaacaggtccggtgtgagcacctgcaccaagaactgcgtgctgtcccatggacgctccagtcatcttccgtgtgtgtcttgagtccctaactagacagttagcttcctgagggcaagggactgtcatttcctcttgagtcctaccagggtctagcacaggactgggctcctaactctcaggaaacacttagtcggctgactaggtgcctcaagcgcataggagcttcgtcggtgtgccggtaatgggcagtgcacgtagggagagggatatgtgagttaactaaagggtgccttttcttgggctgtgggctggctcacactgggtcaaaagtggatgtcggaggcctcaggatcttacctccttggggcagtgggagcatcatgggaccccgacccccacaccggctctgcaggagtgcacaggaagtgg

SEQ ID NO: 643915 - DNA, 162 bp, Homo sapiens
tgatctagaggatccttgcctccacttggttgccagacggatcatgtacagcttcagctcaaagggggccgacctcagtgagctcacgttgcggtggtctgtcttcttatacacatggtgccggaatgatatgtagtcgtcctggttttgggaagggtgatg

SEQ ID NO: 643916 - DNA, 727 bp, Homo sapiens
gagaacaaggagaggaaacagaaatagcagagtgagaatacaagttggtagcgatagtataatttttggctaacaggaaacaccttacaaagtttcttaattataatttcagtaaaatgagtaagtagagattccccagataggaagtacaaattctaatgttcttaaaagtcatagtaagagctgttgccttagagcaagggaattaaggaaattaaacgttttgtgatgcagggagttatataaagtccatctgtaaatcttcaaaaggtccctggagctgtggttcctgtccatgtcccacatttacagttcgtccaggattataaaatattgcaggtggaacataccctggggacatcatctgctactcaaataaaattccccaccagtgttggcccagaggagttttcaaggtttactgtgatggatcatagcctagaaatttttcatcaagctccaattcagactggagaggccaaacagcagtcttggtatctccattgcccatctgataggagggaacattgggtttcttccaatatcttattttactgtggtaaaatatacataacataaaatttactatattaaccatcttttaagtcatacagttcagaatacattgaaatacattcatatcggtactgcaggcaccaacaccatccatctccagaactctttacatcttgcaaactgaaactctgtccacactgaacatagctca

SEQ ID NO: 643917 - DNA, 366 bp, Homo sapiens
cgaggatgtagcgcgcgcatctcaggaggggcagattagctttaggtgcgaacatgcccgagtcaggaaactaaaataactcttagtctaaatagacacttgcactgaataaagtaaaggcctttcctacagggtgggagaaggcctccgcagtcatttcttcccttctgtcagacgtaattcctcagtgtagccttcccacctctataccgtctgataacagatgagcctttattagtcaaatcaccaagcagtttttcaggctcttagtattcagtgaaacctttatatcccttacggtcctccttcttcaagaaaggtagaatggactaaaggtcttttaaaaacacacctcaccaagctcag

SEQ ID NO: 643918 - DNA, 951 bp, Homo sapiens
gaattttacgggcggttggctttgtattggtgtgagctctgttaagtcgtccctgatgtgtggacgtggttggtgattggcatggcatcgctgggttatcacgctatacctagggtgcaatagaactgtctaagtactcttgcgttgagataaccacttaccggtcacagaccattgcgacccttgaggctgtgacgtcccagtgtacaccaatcgaaaatatgtcgaatcgtcgctgtgatccaggcactacagtgataggggcatttgctccccgatccatgccatgatgggttccgttctttttggcaaggggcaagcaagtgtggcgaagttgtggcgtgtatcttctttctcgtagatctcagcagaatatccaatcatgggaagtgcggagcacttgccagactgagttcgcttggagtcttgaagaatgttggtaatgccatgagtcgttcgatgagacatcgctcgtgaatcggggagacgatgcattgaagcccttgggagagctgtgaatgccctacgtgtgacatcactatcggccaaagattgtcgactgggcccacggattccacgggattccatagaaagggttttccgctgcacccgcatgccgataagaagggcttccatcgtttttgctgggctaactcagggatggatagaactggaccagatcctcttcttgttagacgtacaaaaaggtccgagtaaaagggaagtccgagcctcttgtccccttggatccgtggcggctctgaggacaggtagggtctggcactcatcttgactggttattggagccttttgcagcggagcgtctaaccgatgctacttcgtttaacagggctgggtaagttcaaaattcgtaggcacagtccgaaaaggacttgatacccgcgaccacagattccaagcgaatccatcggaaaaggcagattcccatgc

SEQ ID NO: 643919 - DNA, 679 bp, Homo sapiens
cgaatgtactgtaagaagactataaatagtagcagatgagataggaacagacacgattgggcggatttgttaaaagtcgagctccgagtcgggcgtattattcaggccgaagtctttgagcaggctacgtagcccgcttatattttacatgtcgactttggccatgaaattggcattaagaaatcgagtgcgcagattactgagcgttatcaacctgaactgttattgggtaaatcggtggtggcagtggttaactttccaaacaaacaaattggtcccatccagtctgagtgcttagtgactggctttcatgattcagacgcaggcgtggtactttgtgtgcctgatacagatgttccagtaggtaccaagctactataattgaaaaagaaaaacccaagctcagcttgggtttttctttggaacagtctgatccaacaatagcaactatcgacgagacttaaacgatacatcgactttacgtgacgatagatccagaccaagatcagtaaaaaaactgagaaacctaaaattggccagtcacttaaacgggtatatagcgtttgaccttgcatagcaggcagttcgccgcgaagacaggtagccacatcttgtgggggcagttttacgatatgcccttgatggtcaaataacgcagttccgctgtttggtggcacga

SEQ ID NO: 643920 - DNA, 164 bp, Homo sapiens
atgtatggagttgtaggagtgaagatagtcgcgtagtggtgtatgtaggttagtacatggtggcaattgattgatggtaagggaggggtcgttgactcgtctgtatatgtaaaggatgcgtacggatgggagggcgatgaggactaggatgatggcgggcagga

SEQ ID NO: 643921 - DNA, 215 bp, Homo sapiens
tgggggtgttctagaggatcccagatcacacccgagcacgagaccagagctggtgttagaagtcaggctgtgaatctagctcttctgctatgacctcagaaaacttgtttaatatctcacacctgatgttccttgtctgtaatatgtggtcgtgataccatgtacctcaccatgctatgaggattaaatattcttcaacgcagaacgcgcctaat

SEQ ID NO: 643922 - DNA, 183 bp, Homo sapiens
tgggttttccccgtctctagagtattccctgtctcacatgtatgctctgacgggatgcggagctcacacggtaactgctgtgacgggatgcggagttcacacggtaattgctctgacgtgatgcggagcttcacaccgtaatgctctggcgggatgcggagtctcacacggtaatgctgtgac

SEQ ID NO: 643923 - DNA, 145 bp, Homo sapiens
gagcctgaatcatctattggtgcaaccaagcatcgttgatgttctttaataggaacatctggtggaacccatgatggggtcttcatccgccttaagctggccacaaccatctgatatgcagctatctggagtgggctgatggtcc

SEQ ID NO: 643924 - DNA, 116 bp, Homo sapiens
tcactcaggcctcagcaatgaggctacttattggaagctattctgacatcactttccagactgtctcactgtcttggtaccaggcatggcgaggcaaagtgtggcgaatcttcttg

SEQ ID NO: 643925 - DNA, 515 bp, Homo sapiens
  misc_feature (217)..(217): n is a, c, g, or t
aaaagacctttaaaaaaaatttattaataattaagaaatctccatgaccttaagcccagtcaccggtttttttttatcaaaaagaaaaaaagtttgaataaaaaaaaagaatagggcctaaaaatcctgtggattaattccaacggttctaccatatgttttttttaaggtccagaaaaaagaaaagaacccgattgaagtagaaaaagtttttaanaaaatattgcctgaaaagccaggcccattggctcccccctataatttcagccctttgggaagccaaaatggaaggatttctttagcccaggagttcgggaccagcttgggcaaaaaaacaaaacccagttttttcaaaaaatttaaaaattttgcccggcttggtggtgtgtacttttagtcccccctcctcaggagattgaggcaggaggttccttttagcccagggggtcaaggttttattaacccgttattgtccccctcccccccaccctgggtaataagtaaaatccttttcc

SEQ ID NO: 643926 - DNA, 298 bp, Homo sapiens
  misc_feature (217)..(217): n is a, c, g, or t
  misc_feature (220)..(220): n is a, c, g, or t
tgagaccgtgtctcactccgtcgcccaggccggacagggattctcaactcactacaacctccacctcctgggctccagcaattctcctgcctcagcctccagggtagtggggactataggcacgcaccaccatgcccagctaattttgtatttttagtagagatgggttttcaccatgttggccaggctgggctcgaactcctgacctcaggtgganccncccgcctcggcctcccaaaatgctgggattacaggtataagccaccacggcccagccaaaataaattcattttttaaa

SEQ ID NO: 643927 - DNA, 139 bp, Homo sapiens
  misc_feature (126)..(126): n is a, c, g, or t
acgcgagatcgggcatactcatatatagcagttgttcatgtgcagttctgtatagtgtttcattttaagaatacacaattttgccaggcgcggtggctcatgcctgtaatcccagcactttggganggctgaggcaggt

SEQ ID NO: 643928 - DNA, 217 bp, Homo sapiens
  misc_feature (210)..(210): n is a, c, g, or t
ccgcgtggactgcccctctcacatcttccatggggtgctagccaaacgttcccacttctccttggctaggtctaccccctaacagctccccctcctataagcagtacactggctcatcatatctcaagcatcgcaacactttctctccaatgtgcatcctggtgtaggccaacttccaagacagactcccgttgaaggtattttttttcnttaaaaa

SEQ ID NO: 643929 - DNA, 259 bp, Homo sapiens
catttgcaatattttatccaacccagtgaagctctttcccagtcatggattaattatgttgagttctttgggcccaaacccttttgtttagagttgttcattgtttgggatggcatgtttccttccttcaactgtgttctccctggcattcagaaaggagggaaaggaggaaaaggaaggggagggaagcttcccaaaagtagcctcaacctgtgcttctgtgcattattttgagaataaatttctgtttccagctgta

SEQ ID NO: 643930 - DNA, 213 bp, Homo sapiens
taggtggtccggaaggaggttcgtcggttacttgctcaatgaggcgctggcagtactcgaaggcacctcccgaagccgctcccggggcggcagcaggcggcggcagaggaggtggcggagtatcattctgttgcccaggctggactgcagtggcacgatctcggctcactacaagctccgcctcgtaggttcacgccattctcctgcctgccg

SEQ ID NO: 643931 - DNA, 364 bp, Homo sapiens
tttttttgggatggagtttcgctcttgttgcccaggctggagtgcaacagtgcgatcttagctcaccacaatctccacctcccaggttcaagagattctcccgccccagcctcccgagtagctgggattacaggcatttgccaccacacccagctaattttgtattttttaatagagatggggtttctccatgttggtcaggctgatctcaaactcccaacctcaggtgatcagtccgccttggtctcccaaagtgctgggactacaggcgtgacgacatatgcccggcctacttttttatttttgtagataattttgtatgtcttgttatgttgcccaggctggtctcaaactcctgggttca

SEQ ID NO: 643932 - DNA, 807 bp, Homo sapiens
atcgcaaagtcagggaatcaaactaaatgtccatcagtggtagaaaggataaagaaaatgtggtggcagggagtggtggctcatgtctgtaatcccagcactttgggaggctgaggcgggtggttcacctgaggtcaggagtttgagaccagcctggccaacatggcgaaactccgtctccgctaaaaatacgaaaattagccaggcgtggtggcgagcacctgtcatcccagctacttgggaggcctaggcgtgagaatcgcttgaacctggaaggtggtggttgcagtggagccggagatccttgccattgaattccagcctggggcaaccaagcgagactctgccttaaaaaaacaaaaaaagaaaatgtgggcccttttaccccagggaatactatgcagccataaaaaagactggggaccatgtcctggtgcagcaacgtggatggagctggaagccattatcctaaatgaactcactcagaaacagaaaaccaaataccacatgtgttctcacttatacgtagaagctaaacatttggagtcacacgtggataccaaagaggggaacccgcagacactgggggcctactgaaggtcggagcattggaagcgagggtgaggatcaaacaattacctactctgggtacactaggacattaaattctggcatgattgacaataattctgtaacacaaaaccctgggttaacatgcagattaccctattatgcaagggcgtacattggtgccgcttgaacctaaacacaagggtaacacaacacgcgtcgagattaattccctta

SEQ ID NO: 643933 - DNA, 182 bp, Homo sapiens
ccacccactctgctttcttgctttggaggaaattaagccaggagccctcagttgttgccttatgggagataaaggagtaatcgttggtcctattttcgatcaggagagtgcgaggggattgggagaagcctgaggattgaaggggatggggaagtcactgagacaggagcattataaaaatt

SEQ ID NO: 643934 - DNA, 449 bp, Homo sapiens
gggtttaggtaaaagagggtaacagtatactacttgataacataatgggctaacatctctaataattatttttgctagtgactttaaactgctaataaagaatattgttcccataggttagatttttattctttttaaaatttaaacttatttctcttaatttttgtggatacatagtatgtgtatatctttatgccatgtatggcatattttgatacaggcatataattttatgtattaatcacatcagggcaaaagatgtatccatcaactccagcatttctcctttgtattacaaaccaattctgcacttttagatactttagaatgtacagtcgttactacagggtcattttatggttataataaaaattatatacaagtataaataaaccatgagaaaattctgagttctgaataaacatttaaaaaaatgttaaaaaaaaaaa

SEQ ID NO: 643935 - DNA, 166 bp, Homo sapiens
tgcgcatgcttccatcaagtctgcatgtttctcagctctgatgtcagtgcggccctgttcccccacgatgctgtcatgctgcctcctgagtgttgttgatgtacttgctcgtgtgtgatctctatgtgtctgaccgtgcatgtgcatgcaatgcttgtgcacgtgg

SEQ ID NO: 643936 - DNA, 249 bp, Homo sapiens
  misc_feature (4)..(4): n is a, c, g, or t
gtantgttgtctgtcggccggttagcgtatgatgggcagtgaggggcgcatatgctcctaggctatatatcgcggatatacgtagcggtacgttaaaacgtacctctagaactatagctagcatgcgcaaattaaagcgctgatatcgatcgcgcgcagatctgtcatgatgatcattgcaattggatccatatatagggcccgggtcatcataacctcaggtcgacgtcccagggccattcgaattcg

SEQ ID NO: 643937 - DNA, 108 bp, Homo sapiens
tggcagttcaggcctctctcataagcgtagctccaaatgctaggtgatattctcttagtgaccctagaatacacaactgttgtttttttggagacagtggtctttctc

SEQ ID NO: 643938 - DNA, 114 bp, Homo sapiens
cctggcttgctcaggtctggggtagggtataggaactggggatcaggcatgtagcgatggggctcatgagacgcagaccctgtccccagctgtcccagacctgagcaagccagg

SEQ ID NO: 643939 - DNA, 374 bp, Homo sapiens
agttaaactactttaaaacccattcatttttaaaaaaaatgtttgttttaacataaataaccaaatcgtatcagtgtttgtgaataaaatcaaaaatattgttaatgattggtgctctaaggaggggtgggaggagaggggctctctataaatttttatccaaaacgtatatcccaatttgtcctgtagtaatagattaatattcatagattgttggtgtttaaaaatttgaagtgtgagtaaaatgtattcacctgtttaacatgtagtttaaatattcaaaagtatgcatgtaaaatttaaaaaatatgttaaaaattattaattttaatattttgtttggaaaagcatgttataatataatgttttcccta

SEQ ID NO: 643940 - DNA, 339 bp, Homo sapiens
gccgggcgcgatggctcacgcctgtaatcccagcactttgggaggccgaggtgggcagatcacgaggtcaggagttcgagaccagcctgggcaacatggcgaaaccttgtctctactaaaaatacaaaaattagctgggtgtggtggcaggcgcctgtaatcccagctactcaggaggctgaggcaggagaatcgcttgaacccgggaggcagaggtggcaatgagccaagatcatgccacgtgcactccagccttgctcgacagagcaggaactccattctcaaaattaccctacactccaactaacaaccaaaaaacaaacaccaaacaacctaaaa

SEQ ID NO: 643941 - DNA, 289 bp, Homo sapiens
gtgtctgacctgctgacgttaccttggaggagaacatattagatgtccccattttagtttaacttattggacacactaatttcacccgaatgtccttatagaaatagttattggttaagaccgtatgagcgtgtgtaatgcatagcacgggtgcttgaacgtgactgccctaactaaatcctttgctctgcaccgagacaatctactagcactggttctgctggcacacaatcaggattctgctgttgctgtccatattcagcaccgcccatacataaatgtaatggga

SEQ ID NO: 643942 - DNA, 181 bp, Homo sapiens
ataatcttcgctattggaatttctgcagaagtttgagaggaacttccttgctcaggatccttacgaaaatcgcacgtgtctttgagactttggacattggcgtggcagctactccgagatcttccccagaagaaatgctagaagagaatccctcgagagcaccctcagacgaattttaccc

SEQ ID NO: 643943 - DNA, 605 bp, Homo sapiens
  misc_feature (223)..(223): n is a, c, g, or t
ccaacctttgcgtcgctcattgggccctttggaaggattcttcgcaagtggattcaaccgagcctttaaaatcaaaggctttgccaataccattcctggccatggaggcatcatggatcgctttgcccgccagtatttgatggccacctttgtcaatgtatacatcgccagttttatcaaaggccctaacccaagcaaactgattcagcagttcctgactttncggccagatcagcagctccacattttcaacacgctggggtttcatttgatcgacaaagggatgttgacatcccccccaaaggacgagtaggggccccccagggccaggagaacaggaacaaaattgagcaggggcaggtttccaaggcaagcccagctggtgtgacttagacaaagacgagggttcaaccccctgtctttttttttttttggaggggattttttatttgtgggttcaaaaaatccggaaaccacgtctatgggtttaaaatttgtgttgtaagtaaactacagctttgagttggaaaaaagtcccgggttgtaaaaccatttggatttttttaaaacaaaagtattaataatttggaagacagggttgccca

SEQ ID NO: 643944 - DNA, 895 bp, Homo sapiens
cggcatccgtttgctcgtccggttaattggtatggccctggtgtcgcgctgccatgtcctctcgactcgtgagacccgtcatccgccatggacaactacgcagatctttcggataccgagctgaccaccttgctgcgccggtacaatatcccgcacgggcctgtagtaggatcaatctgcgtagtgctttacgagaagaagatcttcggagatacgaggacaccagaagggcggcggacttctcgtgcaccgcccagactctgtccgccgtctccatcgttcatagtcattctctgaacgttgatgttcgatgtagaggggcatgctgatgtgtatgtatccttcccgagtgaaagacgacggcttttagtctgactcagaagtcaagggcttacaatgatcggacatactaatggatccaggagcttactgcttgccacacagagagcttatggggagcaccgaggatctagccgggccgtcccaggggcgagtgctcggccagctcagatgacgttcatttccgcaggatagtcgggagcgaatattactcatacaactcagggtgcatgattgaacgattctagagtcttctttctgaaagagagaggttgctggagatacttggagacgctccatgtacggcacggggacagtgcctatctagagcattcacgcactgaaccgcctgtatcacggtctccaggaagctccgcctggactctgtcctattatgctattcctcctgcacctctttttattgttgctcctcggttgatcttctgcttcatggtcacccagctgtgcgcttccggctgaaaagccgggttcctgggggctgggcttgggcccagaatcggcggtcccgctcttggggggccagcgtgttttcctg

SEQ ID NO: 643945 - DNA, 493 bp, Homo sapiens
acgcccgcggtgagtaggagcgttctctttctgatttagtattatctgctgggcgaacttctctaactacatatcttctggaagtcgattctgatgtttgcagtcgatggcctgggcgtcgttatacaactgctcctccgttatactttgaaaggcaaatttttaaagacatattccctttcggcctgaacaaatgagaaggcagaattaagaaaagtgaggtaaaaacacatgtagcaataacattagagtatgcaaagcctttgcagattttcccaaaatgctaagtagttcaaaatgaaaacaggggtaactgatatccatcttcagtttataagctcataagccagagcactgccctcaaagcagatgccaaaccactgttactggggaacacatactaatgatgcctttaaagagagaaaccgtgcaaactagctcctgaaaaaaaccttccttaaagagctatacacccagactgtctcataagtcc

SEQ ID NO: 643946 - DNA, 954 bp, Homo sapiens
  misc_feature (178)..(178): n is a, c, g, or t
gttgacggcaggtggctgcgccagagccgtagcggtgtcgtgcttctgtgtgaaggacgccgaagcattgtggtgagactgttagtccagggtgcgtgttgtgtgacaagaagtgacttgcttagggcacccccagtgcgtggaattactcgggaagagaacggtgttggaacatacnccccgcgatggtttacagagaattggtgctgatcgtcccgcgtgacaccccagttggttgccgccgcggtcatgacgtgtttgcacaaggggcgcccgtccgcgccccaattccggacgatatgttgtgcggcaccgtcatggtttgtgtggagaactatgctgctcccagccgtgcccagggtattggttttgggttttcgttgtagaaggggttcctccttggggtgccctaagtaaaaaggagttgtgcgccaccgcatcctatgaagaggccaataatgtgggtgttctcttcgctcaagagagcggttctccccggctgaagggggttgtgttgtatccgcgaaaccacaaaattatatgcctgtattactactggtgctgtatgaggcaatgttcttgagaagtgtccctagttgtcttggaggggcgccccccttaaggttgtagtctttctcaggtgctctactttcttgttgaacaagttgcgacgcagcgggttgctttccgcggtgcgcgcacacaagctttgggatgtggcacgattcggggagggtatgaattcgatggcgcccactccaccaccacacgcctcatcaatattgtcctgtttcgatgagtggtgccagaagtccagttttgtgtcaggtgacggaatactcgcggtggagcagagcgcccactttagtccgcgcacgacaaccagggggtatgttcatgagcatggtagacaagtctaaaatgtgaaatccctgtcccgcccacatagcagaa

SEQ ID NO: 643947 - DNA, 970 bp, Homo sapiens
  misc_feature (970)..(970): n is a, c, g, or t
atccaagatatgaaatctgcgcttttgaataaataaaatgctctctgtcttagcaggagaatggcccaaacctgacatggacaagcatgttgggaaagtacaagaagcaatacggggtaacatgtcacttgcgctgaaaaatgagtctgtatcaccattgattacagttataatttcggagtgatcttacaaatcatgtgcttgtgccagagttcttaggttaacactagggactgcgtccatgttcactagtataacagcttgggttggctagcaattgggcccatttgattataatgacaacttcattgtcacatgttactcagttccctaataggatggtgctctcttgtggacccctgtactagatatcgctctatctttgaaacctacatatttgatccgtgccactagaaccaggcataaatttggggcgttgcgtgaacttgaccgcactggataccttctgtcatctggtgaagtctggcaccggtaacccttgtggcacccattgtgcatcttattccttaggaggggacaacactcctcttgccaaaactaatacactgcttcataggaccaactgagttctagtttgttattcacacttagcaaaatactctaaaggagagatgcgaggaacctgcaattcccctttaagcaaaaatggaaacgcgggacaatactggtcgcatcagaccgacgacctttgatcgacggatggggtcatgcgagctaccatcaataaaccgtcacggacagctcccaggagaagcagactggcacccgggctggaattacagcgaacatacctattggcgcctagagcataatcaacggacataaaagaacttccacaagggtgagacgcatagggcagacacaccacaagtcgggaggaaacgagcggacacgcaaacgcacgcgaacaaatcaacactctcaactttctacatacatctcttcttgn

SEQ ID NO: 643948 - DNA, 480 bp, Homo sapiens
  misc_feature (433)..(434): n is a, c, g, or t
tgctaggattacgaggtgtgtgagccaccgggctgggcctaaactatttcttaagggaacagattagatacatacaaaagttgaatttagtatgctttgtgtaagtcaatataaggatggggacattttggttttcttagctatgctttataacaaaatagttctagttactttctttgaggagggtcactaaagtaatacctggcttttaaaaaacatagtataactatggagggtagactatgaagagtaggcggaggtttcattttaaattatctcctctttcggacagggaagagtttacttcccctgatgtgcttatggtattgaaagcccatggtggggtgttggtattgaaagaaagcttagtttggctgcgtaacctaaagggagagggaagaaagattttgaaaagtgaaaatccattgatttnntgttggctggagaaggattggatactatatcggaggtgagactaga

SEQ ID NO: 643949 - DNA, 1506 bp, Homo sapiens
gctccctggctgctgacttccgctcctgcgcggcttgttctctgcgagcagcgcttcttttatctccgtccgccttctctcctacctaagctgcgctgccgccaacccgactggaccgacttcgactggcaccctgcgcacactgagccccctgcaggccccagcaacctactcctcctcccggccgctgcaacctaacacggcccgaccaacacgcactcactcacctctcaacgcgctggcactcactgcactcgacccactgcaccccacccaagctcactcctccaacgcaacccgcgcccacgccccccacgcgcgccccctggcccgccccccacgccgcactgcaacgcctcgccaccacctccgcctccgcacacgccaccgacgccgccacacacgcccacctccacccgccacacgcgcccagcgccccccaaccctccacaagcgctcaaccacacctggcgccaacaaccatcttctggcacaccaccacctggccttcctctgcctcaaccacaggcccccacacccggcgcgctccccacccacgtgctgcgcgcgcccgcacaccctccgcaccacacctcaacaccccacccaagcctcaacgcgggcccctccctctcaaaccgcgcccctgcacacgcctcgctgccactcctccgaagcgcgcctcccacgcctgcccacttactttacgcctgcgcacccccgcccaccctctcacgctcacccccttgcctccgcatccccaccgccactgccacccaccctccccgcacacccacctgcacaccacgcgcacccgccccgcccccctgctcgccaccctccctccccccacaaccgcctaacccaacctcccctgcgccacacacgcgcccgcgcacccatcagccccacccctgccccacgcccgccgggccccaccccacccgcgcccctccacaccacgcacaacccaacacggctaccacacccccgccccagccctgacctcgcacccgcccgacccctcaccccgcagctcccctcgacctgcgaccacccccgcgacctcgactcgcatttccacccccctctcctccgacccgacctcccccccccacactctcccgactcgcacctccaccgcacacacctcttccacccacaacaacacgccgcgcccacctctccacacgcaacactccctcatcaccccacccatcaaccgccccacccccaccaacattcgtccccaccaatcgttcccaccttcaccacctcgtctccccacacacccttcccaccacacttcactcctaccccccaaggacgctcaaacgcccccacaacactcctctccccccgacaacccccgcgaacacacctctcccaaacacccccaacacacggccgccctcctcctcccaccacctctactccaccacactctccccctcttttacacagcgcccccaatacgcccgcccccacctgccttacccccccacg

SEQ ID NO: 643950 - DNA, 325 bp, Homo sapiens
taagttcgcggccgcgtcgacccgctcttccttggcgccggtgtattcggtctccagcaccgccaccagcttgtcgccctcgcgatagaccttttccagcatcatgtcgccggtcatgatcacttctttcgggtacatgctgcggtagtaggtcgggaacgacgtaccgccaatcgccacacccggcttgatgtcgtcggtgacgatctcaacctggctgcccttgtcagcgaggaagtcggcgaccgacatgccggtgaactcgcagatggtgtcgtagaccggcacgttcttgcccggtgcgaccttgccatcgagcacgtcc

SEQ ID NO: 643951 - DNA, 281 bp, Homo sapiens
attcaggatcttagaggacaaggagggattctttcgtagggcagatttgagagctgaagaccgggcatatttgagacaagttttctagatgagagtgacgattagcatggtccagggtcggggttatctccagaagctaggtctgaatagcacctgcgatgacagtatcctcgtcaagacagtgtgcggggtgctgtccaggaggcccgcacagctgtgcggcgcaggcatggcctgcggctgcggactcgatccgcgagaacagaggactggaccgtctg

SEQ ID NO: 643952 - DNA, 205 bp, Homo sapiens
cgccaacacacaaatggtgttataaatatttaaaataacaataaggcgggtgcagtggctcatgcctgtatacaatcccagcattttgggaggcaaggcgtgcagatcacttgaggccaggagttcaagaccagcctagccaacatggtgaacacccgtttctactaaaaataccgaaaaattagccgggtgttggggataacat

SEQ ID NO: 643953 - DNA, 328 bp, Homo sapiens
  misc_feature (186)..(186): n is a, c, g, or t
  misc_feature (287)..(287): n is a, c, g, or t
ggttccaagatggccgaataggaacagctccagtctacagctcccagtgtgagcaacacagaagatgggtgacttctgcatttccaactgaggtatcaggttcatctcactggggttcatcggacagtgggggtaggacagtgggtgcagaccactgagcatgagctaaagcagggcaaggcattnactcacccaggaagtgcaaggggtcagggaattcccttccctagccaagggaaggggtgacagatggcacctggaaaatcgggtcactcccaccgtactanttgcacttttccaatggtcttagcaaatggaacaccagggg

SEQ ID NO: 643954 - DNA, 755 bp, Homo sapiens
  misc_feature (670)..(670): n is a, c, g, or t
  misc_feature (721)..(721): n is a, c, g, or t
gggggctctgtaattttcagagcggaagggcgcgttgattctttataaccaggcgtcatataaacacggtctatcccctatgccttctgcataaggattcctctagcaagcccgttgcatggagagccaaaactaggaccacggacaccatacgagctacctcagagcagctcctagatcacacgcgagtgtgtatcatactttcaggcaatatctatagtgtcgagtgcctcgcacctacgccatccttggtgatagcttgtgtgtccaagcatccattattggcttactgacaaatctgcccactgcaccgtgtaaacaccctagtgcatcaaactgtcaggacacagaggagcacctctatgaacactagaaaaaaaccttgacaagacagcttcaagatctagccccaatctctgcccaaaactcagccacaattgatgatgctgaacattttagctaccatgtccgtccttgagactaatgaaaatcctataattgagagtttggcctggtcaactgcctattgacccagggacgttcaccgggtccacacttatgcactgctcaaagatctggaccccactcgtaaccttatacacatctggagacttttcgcactcttaggttccttttgcttacaggtgaccgacctggagaccaatggggngacccaagactagccctctcaaacccacggctttttttaaaaatagccaangcgaaacggccctcccctaaaccccttcccaccc

SEQ ID NO: 643955 - DNA, 124 bp, Homo sapiens
cgcgtatcatcggcaccttgttattcatcgagcatcagacttgccctccaatggatcctcgtttaaaggatttaaacgtgggatccattggagtggcaagtctgtgtgcctgataaattagcga

SEQ ID NO: 643956 - DNA, 339 bp, Homo sapiens
agcgggagtcaccaccgtccagttccctgagtctggactctctgaccctgcaggtgatctgccaagccttggcctccaaggggtcctcggaattgcaaggcgcgggagccaccgtatgtcaccgggcacaaggacgtgtatctatgactcgagcgcacaacaaggactcgctagcaattgtagacaaaccgtactttatcatctaccgaacatgggctggatgcgatgttatgcctctacattttcatttcctcgggatgaaaagtggggattattgccaagcggtatagtgcctgattgacgttgaatgatcgccatacgcatggcgttttgctccaa

SEQ ID NO: 643957 - DNA, 707 bp, Homo sapiens
cgtttacgcctctccgttttggtcaccccggccacttcttaacctgggggccacatgtactctgggaaaaagggtccgccactgattctctttctgggctcccctccacgtggtttaagaggcacccctggttcctcttggttgcactgcccccagagctattttccctccatccttagtttgtctgcacgcccaattctctccctctagcttcgatgagactcgtgtttatttccccctttgaaaccctacctatcctcgaatggtcatgtacattgtctcgcccttaagatacctctcctcctctttttcctccctctatttcttctaaataaatcgatggggctaacattataccccaagctccacctttaccaaataatttccctcccgtactttgcaggaaaccccccacctaaatgcccattttgtaaaaaggctgtatttttttttttagaatcgtaagctcctcacagagcacgggaccatgttttctcgtatgttctattgtgcctagtacactgtaaatgctccataaatattgcatgatgggaggccgtgagtcttgatgataagggtgagaaactggaatccccaaccctgttttgtttgcttgttttattatgacccccgatttaattggggaatattggcccttttggataattgtccccaatattacattccaatataaagtgccatggaga

SEQ ID NO: 643958 - DNA, 129 bp, Homo sapiens
ttcagcacatatagtgtctatacttctccggtttcccattggccagggcaacatggatccctctcccaacataattctaaacaccactcattaaaacataatctctccagtgcaaatttgtgggtccca

SEQ ID NO: 643959 - DNA, 378 bp, Homo sapiens
  misc_feature (1)..(1): n is a, c, g, or t
  misc_feature (72)..(72): n is a, c, g, or t
  misc_feature (92)..(92): n is a, c, g, or t
  misc_feature (360)..(361): n is a, c, g, or t
nccctaaactggcattaggcgtctcctcaaccctcaccctgacctttctcctgtccttttcttggctggaanaaagttggcctccctgggantgtagttttctgttttaaatcccccacccctggctgggctcagtggctcacccctgtaatcccagcactttgggaggccaaggcgggtcgattacttgaggtcaggagttcacgaccagcctggccaacattgtgaaaccccatctctgccaaaaatacaaaagttagccgggcgtagtgcacatgcctgtaatcccagctacccggggaggctgaggcaggagaattgcttgaactcagaaggcggaggctgcagtgagccgagaanngccactgcactccagcc

SEQ ID NO: 643960 - DNA, 555 bp, Homo sapiens
  misc_feature (32)..(32): n is a, c, g, or t
  misc_feature (537)..(537): n is a, c, g, or t
ctgatacgggggaagcatggtggggagcctcngaagctgacaatcacggcagaaggcgaaggggaagcaggcacgtttctggccatggtggagcaggagagacagagagagtgaagcaggaggtgctgcatgcttctaaacaaccagatcccatgagcgctcactcactatcacgagaccagcaagggggacgtcagccgccatgagccaatcatctcccaccaggtccctccctcaacactgggaattgcaattggacatgagatttggttggggatacagagctgaaccatatcaagggtagttcaaccactgagattgattgattgactgagatggggtcctgctctgttacctaggctggagtgcagtggcacaatctcggctcactgcaacctccgcctcccaggttcaagcaattctcctgcctcagcctccctagtagctgggactacagcacacgccaccacacctggccaatttccgcattttcagtagagacggggtttcaccatgtttgcccggctggtcttgaantcctgacctcgtgatcac

SEQ ID NO: 643961 - DNA, 562 bp, Homo sapiens
  misc_feature (95)..(95): n is a, c, g, or t
  misc_feature (102)..(102): n is a, c, g, or t
  misc_feature (115)..(116): n is a, c, g, or t
  misc_feature (124)..(124): n is a, c, g, or t
  misc_feature (161)..(161): n is a, c, g, or t
  misc_feature (172)..(174): n is a, c, g, or t
  misc_feature (196)..(196): n is a, c, g, or t
  misc_feature (203)..(203): n is a, c, g, or t
agagtcacgagtgcctgatgggcaggtgatcccatcgcgaatggaaagttcccgcggcccaaagaccctgttccaccaccccttcatcgggatgnagtttgntggcatccatganncccctccnccagcatcatgaagtgtgatattcacatcaggaaggncctctatgctnnnaatgtcctatcagggggccccnctatgtnccctggcattgccgaccgaatgcagaaggagatcccggccctagcccccagccccatgaagatcaagatcattgcccctccggagcgcaaatatctgtttggatcgggggccccatcctggcctcttcgtcccccttcccagcaattttggatcagcaaacaggaatacgatgaagccgggccttccattgtcccccgcaaatgcttttaaaaccctttcctgctcctttctgtttttagcccccaactgtgaatgtcctgtggaattatcccttcagtttttttccaaatcattcctagccaaagctttgactcgttccctatgtgttttttaataaatctgaaataggctactggta

SEQ ID NO: 643962 - DNA, 349 bp, Homo sapiens
cacgaggtgctgttccagcaggcgatgcagtgggtcacgctgggttccgacgccggtggcttcgtgcatgtcggttcgatcagcatcggtttcttcgccaccgcgatcgcggtacgcctgctggcgcggcgcgtcatcgccaacgagtcgctggcgcgcgagcgtggccgcgatctggccgagcaggtgcgggtgaacgagcgggtgatccgcgacatggacgacggcgtgctggtggtcgacacgctcggccacgtgcggcaggccaacccgcaggcgcgtcgtctgctcgacccgctgatgccgcgcccggtcatgctggccgactattcgccggcgcttgccgcgg

SEQ ID NO: 643963 - DNA, 779 bp, Homo sapiens
gtcttggctcattctcacataaccgtggatctaagattggaaagctgtggcaccctggtagggtgtcccatctaccctgtgtcctgttactgcagatggcttgtcaagcttcattttaagcctgctcggtgtacttatctgccttatatcctaatagacttctctcggtggttattacacagtggtctctttggctctaatatttcattcatttagccagtttgtcagtaccgttatcagagggacaaggaaggaataacacaccagttgaccattgtagtgtctcgtgagaaatctgagcaatacggagatccttgtgtattaggtaaaacatgatatcattactcatacgtacaagggcgtatacgacttttaataatgtaatccatcattgcttgccatatttggagtgaaaaccgaagttgaatgagtcttcgtgaattcacatggctatgtatagaccacaacatgcatgacttcaggctgagcatagagacatgtctgcatcctgagcctctatctttatagaggggcaaccacttgtataccctcatggtgggacaacatacctccttcatccgactccagaggcagtccggtggatactattccgtaaagtggccccttccatacatgatgcacttgaccaggcgattggagccgtgcttgctggtgacagacgccccgttacatagcttacagtaaactgtaggttctggcaagcagggatcccagacaacatactataggtggactagagtatcagatgactagtgtag

SEQ ID NO: 643964 - DNA, 771 bp, Homo sapiens
  misc_feature (15)..(15): n is a, c, g, or t
  misc_feature (67)..(67): n is a, c, g, or t
  misc_feature (72)..(72): n is a, c, g, or t
  misc_feature (85)..(85): n is a, c, g, or t
  misc_feature (111)..(111): n is a, c, g, or t
  misc_feature (114)..(114): n is a, c, g, or t
  misc_feature (118)..(118): n is a, c, g, or t
  misc_feature (216)..(216): n is a, c, g, or t
  misc_feature (218)..(218): n is a, c, g, or t
  misc_feature (265)..(265): n is a, c, g, or t
  misc_feature (280)..(280): n is a, c, g, or t
  misc_feature (282)..(282): n is a, c, g, or t
  misc_feature (297)..(297): n is a, c, g, or t
  misc_feature (305)..(305): n is a, c, g, or t
  misc_feature (327)..(327): n is a, c, g, or t
  misc_feature (336)..(336): n is a, c, g, or t
  misc_feature (338)..(338): n is a, c, g, or t
  misc_feature (346)..(346): n is a, c, g, or t
  misc_feature (356)..(356): n is a, c, g, or t
  misc_feature (362)..(362): n is a, c, g, or t
  misc_feature (379)..(379): n is a, c, g, or t
  misc_feature (381)..(381): n is a, c, g, or t
  misc_feature (418)..(418): n is a, c, g, or t
  misc_feature (426)..(426): n is a, c, g, or t
  misc_feature (430)..(430): n is a, c, g, or t
  misc_feature (458)..(458): n is a, c, g, or t
  misc_feature (466)..(466): n is a, c, g, or t
  misc_feature (468)..(468): n is a, c, g, or t
  misc_feature (475)..(475): n is a, c, g, or t
  misc_feature (479)..(479): n is a, c, g, or t
  misc_feature (501)..(501): n is a, c, g, or t
  misc_feature (531)..(531): n is a, c, g, or t
  misc_feature (539)..(539): n is a, c, g, or t
  misc_feature (550)..(550): n is a, c, g, or t
  misc_feature (554)..(554): n is a, c, g, or t
  misc_feature (558)..(558): n is a, c, g, or t
  misc_feature (560)..(560): n is a, c, g, or t
  misc_feature (580)..(580): n is a, c, g, or t
  misc_feature (584)..(584): n is a, c, g, or t
  misc_feature (601)..(601): n is a, c, g, or t
  misc_feature (603)..(603): n is a, c, g, or t
  misc_feature (618)..(618): n is a, c, g, or t
  misc_feature (620)..(620): n is a, c, g, or t
  misc_feature (632)..(632): n is a, c, g, or t
  misc_feature (639)..(639): n is a, c, g, or t
  misc_feature (646)..(646): n is a, c, g, or t
  misc_feature (770)..(770): n is a, c, g, or t
ccccgcttcccgggnaagaatcagacttcagtagaaattccccacaccctaaccagccttttctggnttctnctggaccagagtngggggaaaggtgtgggcttcagaganaancatngagtattctcacctccattccctacccaacccatgccatgagagaatggtgatgatatggcctaacacggggctgcagcagccatcatggcacattgngncccactgacgttgtcacctacccattatgatgttcatcaaagtaccnaatgggctaaaaaangngttacacagtattgnggccaacntggctacctactgttgccaagnattccaaanangaatttgncttatcaccngtatgnggggggccaatgaagantntcactgaaatgttttcaccatcacactcatatggccnatcgtagntggnggccatctaatactcatgcagtggtatntagctaanantatccancaangtagcagttctctcagtacccngtgggccttccaatatatgtgatccttggnggttatcnatagtaccccntggnttancnccattcccacttagacattngttntcactagtaagttatantnccacaccagatgttnancaatgggttatnttaagtnttactanttggttcaggccccaagagcttcgtggtgtgagctccagccatacccaccaccatgttcccaacccctgctaggatgcattaagcaaagagcgggaatagaggccctggtagtagactccaggng

SEQ ID NO: 643965 - DNA, 252 bp, Homo sapiens
  misc_feature (9)..(9): n is a, c, g, or t
  misc_feature (214)..(214): n is a, c, g, or t
  misc_feature (251)..(251): n is a, c, g, or t
ggatgtganggcgatctggctgcgacatctgtcaccccattgatcgccagggttgattcggctgatctggctggctaggcgggtgtccccttcctccctcaccgctccatgtgcgtccctcccgaagctgcgcgctcggtcgaagaggacgaccatccccgatagaggaggaccggtcttcggtcaaggtatacgagtagctgcgctcccctgntagaacctccaaacaagctctcaaggtcacaagaggng

SEQ ID NO: 643966 - DNA, 1142 bp, Homo sapiens
ccgaggttaacccacttttgacgcatggccccaggatggacacctaatgatccgttcgcaaatataggggaaagaattttgttgccccaaccgactgggtctgcctggcaccgacaaaagaggcccgatcaagttggcccagcggcatatccagaggggcaaaacgagcccgtgggccccccaaggagggaacaatgaagaaccaacacaagtggagtcaaaacaatcataaggtaactgaattggaccagtattgctgagtttcctagattagtttcggccatgaacaaagaaggaaggcgagaaaatagcgtgctttccaatgttgccacacaacatgaggccatacagataaaagagctagccaaagtctagttgttgctggatgctagtagttctctgtgctaagagcgaaggaaactgtctcgcataggagcctatatataatataaacatatatagcgtgcactcttacagatatggcctgtcataccatgagaacatttctgttcttggatggggatgcttacccttgcgttcataccaaaattgattcttggaactgtaaagattacaacccaaagtctcccaggaagctgtgtgggagaccagaggatcaagctgaagtgaagccagtgaagagcccacctgtggaaggacatgacggggcgaggcacagccagtgcattccggcctgcgaacaggccctcccagcagctttgccgcctctgccatcgtctcagggcccttgctcagaatagctagtgggactgaatttcacagacaaagaatactaatttccatagtgctctatgcttgcctcttcttggagttctttgctctatctgagtgtcttcggtggcgtagataacagtcagattacgggtccgtctagccattacagagtctgatgcttgaaaacttgagtcttcctgagtaatgaatatcaactatcagaatttgactgaactgaagaggaaatcgtattgtttgggggacaaaaaacatcagtttgatttctactaggcggttacttttatgatgatgttttagctaagtggtgtgccaggttttcagtgacataccaaatggaaataagaggatattgatcacgagtataactgctgagtacctttctgcaa

SEQ ID NO: 643967 - DNA, 150 bp, Homo sapiens
  misc_feature (46)..(46): n is a, c, g, or t
  misc_feature (144)..(144): n is a, c, g, or t
tctcgctccgacgcgctgtctccccgtcgcagacgccaccgtcgcngcctctctcgtcggagacgggagcaaaacacagagaatcgggctacaaagcaggtgggcaggtttggacggctcaaaccggcagtgccgcggtttagncgtctc

SEQ ID NO: 643968 - DNA, 211 bp, Homo sapiens
tagcatgactacggattcagctggcggttcttctatagcctctatgccatccaggagattgaagagatctcgcagaagatcgattccagagcggagaccatcctgaacgcgatagaggctaagaagagacggcttcaaagcttctgagcaagtccaggctgtgagggccccagctccacccaggctttgggaccaccttcggtagctgctc

SEQ ID NO: 643969 - DNA, 1007 bp, Homo sapiens
gctcagcgacttccactgccagtcctcataccagagccaacagtcatctccacgagagagaaagcgtgccggagtccggagagccggggtgtggtcatcgatgggctgtgattgtgttgcactccttggatccatggcagggtgctagggcgcgtaggtccctcgtatttcgctctataaagaagggcaagcatgccgtgcaggcgctcacgggaagcaggacgatcacggctgtccccttgttcttcgtacatgtagcgaaccttgttagctttgaacacggttaagctgcagcataagactcccgagaacgaagatggctgcctccttgcacggggccactacaggccgtgttgagcagcgaagggagcgtcccgcgggcaagaaacactatgcgggaagcaaggaaagattacctttcggaattcctggaagcgtccattttcacgcccactgctaaattacaaccttttccaggcgttcccaccttttctcctgtaggcccttgggtaacgcaagtttccgccctagacgttcaccacgttgtaccattcaatccttactttgtccgttcatccataggcccatatgaagtaccactttccaccataaacgcgggggaaccttaggcaacgcaaggcaaactggccccatttccccttggtcgttcaaccccgcgttcagagcccccttttgggccgagaccaaaccaccaccacacacgttctctgatcacaacggaaaggcggatgaggccaccaagcccattggacgagggttttcacaggggaacacccccctctgggcaagcggggcacaacgccagttgccaaaccgtttgatgggaggacacccccatgttgtgtccaaaaggggggccacaccaccggggagcagttgagatagcttaccaacggacgggtgaaaaccccacgaagtgtttagccacaaaactcctaacactaccacaaagtttgcgtgttacaccgaaagccaggatttcgcgg

SEQ ID NO: 643970 - DNA, 134 bp, Homo sapiens
aagtccctcgataggcaaatactgggaagatttataggtagaggcgacaaacctaccgagcctggtttcgggggtcttagctttggctctccttgcaaagttatttctagttaattcgtttggcccttatcgag

SEQ ID NO: 643971 - DNA, 842 bp, Homo sapiens
aaaggctgtacgcccgggtacgggatcccgagcctgttagacgcagctgcaccggtgagactgagagaggaataggatatgagtgaagctgcgtgcccatagtgactagcatgtagtcgaagcaagcgtgtatccttcccgccaggcaagtgcccttagaaacctgggccccgcccccttcctggcctgcattctccatcccactctcccggggcggaggtgaggacctcctatggttcctttggttctgtcatgtgagccccttccttggccatgaagctcgtgaggaagaacatcgagaaggacaatgcgggcaggtgaccctggtccccgaggagcctgaggacatgtggcacacttacaacctcgatagcaggtgggcagacagactgacgcgcactccaaccaatccagcaaggtacagacagaagtccatcccacgggcacgcgatgggacatgcaaaccggagatccgacacttacacctcactctctgacgtggagagacatcgaacatatcgatctctacaaagccatgaccagacatgacgggattaacatggagggaccaaacactcccaacgaggacatgagttcatgtcaagaatggggggcctaaccaacaaccagtcagagacatggacgacccaaaacgacagctatcaaacccatgaggccaacgaaagccaaggggagaataagacgaaagatacgacagacaacgccatcgaagccagggcccagatgaacccaagcatggaagacagcagaaagacgagaggcctgacagaccaatacagcgaaagagccatcgaacacaaatcagccaagaacaccacaca

SEQ ID NO: 643972 - DNA, 425 bp, Homo sapiens
  misc_feature (117)..(117): n is a, c, g, or t
  misc_feature (127)..(127): n is a, c, g, or t
  misc_feature (166)..(167): n is a, c, g, or t
  misc_feature (186)..(186): n is a, c, g, or t
ggaaacttataatcgtggcggaaggtgaggggaaaggaagcacgtcttagcacagcgaagcaagagagatagagccagaaagcgcaagtgcgcatgtgcgatgggggatgtgccacnacactttaanaacacccatgatcttggccatggcgctggtggctcacgnncctgtaatcccgagcactnttgggaacggctgaggaggtgtggatcagcgaggtcgaggagcttcgagaccagctctggccaaggatggtgaaacccctgactccatctaaagaatacaaaatattagccagtgcgtggtggcatggcgctctataatcccatgctactcggagaggcagagtgttgcatgtgagctgaagatcacgccacgtgcactccatgcctggtgcgacagatgtgagacccctgtctcccag

SEQ ID NO: 643973 - DNA, 473 bp, Homo sapiens
tatatcaagtactctctcagaccaccttggaataaaattggaaatcaactccaaaaggaatcttcaaaatcacatgaatacatggaaattaaataacctgttcctgaatgatcattggatcaacaatgaaatcaagatggaaatttaaaaatttctcacactgaaggacaatagtgacacaagctatcaaaacttctaggatacagcaaagatggtactaagaggaaagttcatagccttaaatgccttcatcaaaaagtctgaaagagcacaaatagacaatctaaggccacacctcaaggaactagacaaacaagaacaaatcaaacccaaacccagcataagaaaggaaataaccaagatcagagcagaactaaatgaaattgagataaaaaaatacaaaagataaacgaaacaaaatctggttctttgaaaagacaaataagattgatagaccattaggaaaattaacc

SEQ ID NO: 643974 - DNA, 678 bp, Homo sapiens
  misc_feature (248)..(248): n is a, c, g, or t
  misc_feature (256)..(256): n is a, c, g, or t
  misc_feature (363)..(363): n is a, c, g, or t
  misc_feature (383)..(383): n is a, c, g, or t
  misc_feature (661)..(661): n is a, c, g, or t
ttccccagcaacgtcatctgcaaaaccttccactccgatggcctacgggcacatagggcggaagtaccagctcaatagtagatggaagttgaatctcttcaagttaacacccttcatggtcaattccgtccgttgtctgtaagggaagggtggattcaattaaggagcctatacgcttgtgtgttaatgatctcatagaaaatacattcatttgcgcgtcggcctgatcgtagagagtcgtgactcanttggatcnatcgttgcacgtactttggctgtgatgaactaggtcctagaggtggatccagagtaggctcgaatcgtggtttggtagggcaaggtatgatgtatacatagagcttngacattgggtgctccattgntagaagactgacgccctgcgcattcgtggtggattaacagtagtccgggaacgcttcggaggtgaatggtgccgacagagaagaaggctgcagccatgtagttggatcgtgcagtgtaccgtgactttagcgtttgaaatagcgttcgtgagcagccctgaagtcgaatgtccggttctgggcttgggccattcatgtatttggaccgccaccattccctttctggttggggactggcaggtgtcccccagggaaacttgtcgatcctagccaatgcntgattgcagtgggacat

SEQ ID NO: 643975 - DNA, 319 bp, Homo sapiens
tgcagcctgctgagtagctgggactgtaggcacgcgcccccatgccagcttatttttgtatttttagcagggacggggttttgccgtgttggctaggctggtcttgaattcctgacctcaggtgatctgcccacctcagccttccaaagttctgggattacaggcgtgagccactgtgcctggcacacagtatctcttatagtacctagtgcagtgtgacaagttcatttttctaattctttaaacctttcttggttggttgaattgttaagaatggtagatctcagatgctgcagtctacctaggaattcatcccagg

SEQ ID NO: 643976 - DNA, 474 bp, Homo sapiens
  misc_feature (194)..(194): n is a, c, g, or t
  misc_feature (208)..(208): n is a, c, g, or t
  misc_feature (227)..(227): n is a, c, g, or t
ggaaaaactacatacatattgttatctttctttgttttgtttgctcttaaataatatcaaaacaaatatttctatattagcttaatgttgagttataaggttaggtgtgatggattccatcacattcaaaagtttatatctttaatataaagtttaaatcatattttaaaagttttataactttaatgcctcangcttttggcaagtngtaattcaggaaggcaganaaatcaattttaatatgaaaaaccaaagtatttgacagccaagataataagcatttatgcaaactgaaaattacttgcccgccaaaataaccatttatgaagatttaaggaaaatgtaggaaaatgttatgactgtttatagggttaaaattagttgcatctaccttggaatccatagtatatatttttgggcttattgttgctttttaaaaatctatgacatagcaactatatttaaaattagttt

SEQ ID NO: 643977 - DNA, 224 bp, Homo sapiens
ccaggaactaaccaggtagacctcccaggtagacctaacccaggtagacctaacctttttattctatttttctttatttttctctgtcttattttagagagccagtattcaagttctgagattctttccttagcttggttattctcatgttaatacttgtgattacactgtgaaattcttgtattgtgttattcagctctgtcagacccgttaggtctacctgg

SEQ ID NO: 643978 - DNA, 840 bp, Homo sapiens
gatcctttccctagacagtgctatatttccgtggacacatgagcaggaatcaagtgcacttgctgaatcctgatcataataccgccgtgttatcggaaccagggtcgcagcaccttctaggccctagccctttggatgctggtgcgtctgaaattgcaggaactttcctccttgggtcgggaaccgatgaactaggctacttagaacggacgcaagtgcacaacctatcagagcccagcttgtgccagctccctcctttgaatatggtcgatccactttcaggtcacgaggagctgacctgtgtagactgatgcgaaatgaagtggccaaggcccagcaggcaactcatgtggggagcagccccaaccatcttctcccggatcctggacacgagcctcccagctgacagttctctatgaggaccagcaggatggggtgctcttaggacctatccccttaggaatgttgtagataccatccaacctgttgaagtaacgtggcctctggcctgtcacttcccccagtgtcttgtgttccgtgatgtggcccctcaggctcctgtgcacttcctggtcattcctaagaagcccattcctcggattagccaggctgaagaagtaagaccagcagcttgctaggactacctacttccttgtggccaagcagacagcaaaggtctgagggcctgggtagatggataccgacttgtgatcaacgatgggaagctgggtgcacaatctgtgtatcatctgcacattcatgtacttgggggccggcagctccagtggcctccaggttgaacctgcctactgattaaagatacccgatggggatgcttgg

SEQ ID NO: 643979 - DNA, 885 bp, Homo sapiens
gcccctgacgtcatccaccagaagcgtcaaccctgagggtaggtagacagaaacctggggccaggcccacacgagtccctgcccgggagtagcccctcactgcacttgggaagctcctgtacctcttagatgggatgctgtatgggcaggtgaacagtgttatagctagccactccagcctgctgctgcagcagccaccctggatgtggctgttcggagtaggcctggtcccacggagcccagtaggctgctgtgcgtggccctgggtacagctggtaccggcctcctagaccgtcgccctatgtacgggtaggtagtctgtggctgatactatcaggggcttaggtaggcggctgccctatcctatgttcctatgtctcctacgccactgccagtgatgaccggtggtttcctgagctgcatcttgggcttggtgctgcccctggcctatggcttccagcctgacctggtgctggtggcgctggggcctggccatggcctgcagggcccccacgctgcactcctggctgcatatgcttcgggggctggcagggggccgtagtcctggcccctccctggtaggtagatactcctactacccctagctagcagggatcctggcccgggtgctgatatggtagtaggctacctcctagcctaggcccttcctctgtggcctccccagtaggtacgtccaggcctgtatgtacctgtagtagggcagctggagcctctagtggtatagtatgtgtgctagtgcctatcctctacctggtggcttgaatatcggccataggtgggagcatttacccgcagaaattacctgtacgctgcgaattctgcctgctctaggtatccctcgagggattagcctacgtactgctt

SEQ ID NO: 643980 - DNA, 154 bp, Homo sapiens
tagatcgagccggtacccgtcggtcgacctgtttctgtctctccctacctctatctcagctccactctgaagtcccttccatgtccggctcacgtctgtgagtctggtcctttcccacccactagccctctttctctctgtgtggcacacattt

SEQ ID NO: 643981 - DNA, 697 bp, Homo sapiens
atataggattgaagatctctcagttaagtctacatgaaaagggatggtttcttggagcttccagcgaaagcttaaaaccatgaaacatctattattgctacgtatcgtggtgttttgctagttaagtcccaaggtgtcaacgacaatgaggagggtgacttcagtgcccgtggtcatcgaccccgttgacaatgaagagagaagaggctccgcagcctgaggacctgtcaccatcgtgccatcagtggtaggtggctatcgggctcgtccagccaagagcagctgtcgactcaaatagaacagtacgaagagaagaagcccctgatgctggaggctggtcggttcacgctgtatcccagacctggagggctgtggtgtcctaacaggatgtcagttgcaacgaggcttgggtacggacatggaaaggccgatcagaacgtagtgttgactgagttacaataacaatgtggaagctgtatcccagacctcggtgttgttccgtttgagtacatgtattgtgctgaaagactgtggcgaaaagaggcagaagcaaggtaagacgataatgaagattgtagtcaagtgagtagtcctcagaattggaaaagcaccaatcatatatagaatgagactgtgaagtagcaatattcccaaataactttagtggtggttcgttcaatcctgggaaaactgagga

SEQ ID NO: 643982 - DNA, 317 bp, Homo sapiens
  misc_feature (11)..(11): n is a, c, g, or t
  misc_feature (259)..(259): n is a, c, g, or t
  misc_feature (283)..(283): n is a, c, g, or t
  misc_feature (306)..(306): n is a, c, g, or t
  misc_feature (312)..(312): n is a, c, g, or t
tgcgctaactntgactcatttgaggatcccctgagagaggtatagctgagctgaagagagctgaactgaagctgagactgagctgagctgaaactgagctaagggtgaggctgaactgagctgaggttgaggcagactggagctaaagttgaggctgaaccggactgaggttgaggctggaactggagttaaggttgcctggaagtggagctgaggttgaggctggaactgaagctgaggttgaaggtggaagtggagncgaactagaggtggaactgagctnaagactgtcttgctgatcctgtncctgtntcttg

SEQ ID NO: 643983 - DNA, 225 bp, Homo sapiens
actagagtcatctctagccatcaagtttactgcttcagcagagatatcttatagatgcatcctgtaatgaccagatcctgtagtcatacatagagcagggtcatgaccagtgctcagaacacaagtacctgctgatctatgtcactataaggatcactatgtcaatatgttacttaattcatatgctaaggtgtactcaatttctttaatcacattgacatctat

SEQ ID NO: 643984 - DNA, 225 bp, Homo sapiens
ataagtgaatcataaggattatgcatatgttatatgcggactgacccacctctcccccccagccttgcctctgggttgtgtgctgctttccccttacttggctacatttctatagttaagtgggttttactggaatgattcatgtttagggggaaaatgaaaatcgtcccttaaaattggtttcaactccgtccggcgaaataaaataaatgaagtggcagatgt

SEQ ID NO: 643985 - DNA, 100 bp, Homo sapiens
  misc_feature (71)..(71): n is a, c, g, or t
aggtacacgatccctttttgctgcagtcattttgattaccgcagttatggcaggataaagctgtgtcaggncacttaccacctgagaagtgactggattc

SEQ ID NO: 643986 - DNA, 918 bp, Homo sapiens
  misc_feature (8)..(8): n is a, c, g, or t
  misc_feature (69)..(69): n is a, c, g, or t
  misc_feature (89)..(89): n is a, c, g, or t
  misc_feature (95)..(95): n is a, c, g, or t
  misc_feature (185)..(185): n is a, c, g, or t
  misc_feature (199)..(199): n is a, c, g, or t
  misc_feature (213)..(213): n is a, c, g, or t
  misc_feature (224)..(224): n is a, c, g, or t
  misc_feature (288)..(288): n is a, c, g, or t
  misc_feature (329)..(329): n is a, c, g, or t
  misc_feature (338)..(338): n is a, c, g, or t
  misc_feature (340)..(340): n is a, c, g, or t
  misc_feature (379)..(379): n is a, c, g, or t
  misc_feature (403)..(405): n is a, c, g, or t
  misc_feature (416)..(416): n is a, c, g, or t
  misc_feature (432)..(432): n is a, c, g, or t
  misc_feature (442)..(442): n is a, c, g, or t
  misc_feature (444)..(444): n is a, c, g, or t
  misc_feature (450)..(450): n is a, c, g, or t
  misc_feature (453)..(453): n is a, c, g, or t
  misc_feature (456)..(456): n is a, c, g, or t
  misc_feature (459)..(459): n is a, c, g, or t
  misc_feature (462)..(462): n is a, c, g, or t
  misc_feature (465)..(465): n is a, c, g, or t
  misc_feature (467)..(467): n is a, c, g, or t
  misc_feature (470)..(470): n is a, c, g, or t
  misc_feature (475)..(475): n is a, c, g, or t
  misc_feature (479)..(479): n is a, c, g, or t
  misc_feature (488)..(488): n is a, c, g, or t
  misc_feature (490)..(490): n is a, c, g, or t
  misc_feature (498)..(498): n is a, c, g, or t
  misc_feature (506)..(506): n is a, c, g, or t
  misc_feature (518)..(518): n is a, c, g, or t
  misc_feature (520)..(520): n is a, c, g, or t
  misc_feature (524)..(524): n is a, c, g, or t
  misc_feature (527)..(527): n is a, c, g, or t
  misc_feature (549)..(549): n is a, c, g, or t
  misc_feature (551)..(551): n is a, c, g, or t
  misc_feature (559)..(560): n is a, c, g, or t
  misc_feature (571)..(571): n is a, c, g, or t
  misc_feature (579)..(579): n is a, c, g, or t
  misc_feature (587)..(587): n is a, c, g, or t
  misc_feature (594)..(595): n is a, c, g, or t
  misc_feature (607)..(607): n is a, c, g, or t
  misc_feature (610)..(610): n is a, c, g, or t
  misc_feature (613)..(613): n is a, c, g, or t
  misc_feature (620)..(620): n is a, c, g, or t
  misc_feature (629)..(630): n is a, c, g, or t
  misc_feature (637)..(637): n is a, c, g, or t
  misc_feature (639)..(639): n is a, c, g, or t
  misc_feature (643)..(643): n is a, c, g, or t
  misc_feature (658)..(658): n is a, c, g, or t
  misc_feature (660)..(660): n is a, c, g, or t
  misc_feature (664)..(665): n is a, c, g, or t
  misc_feature (669)..(669): n is a, c, g, or t
  misc_feature (676)..(677): n is a, c, g, or t
  misc_feature (702)..(702): n is a, c, g, or t
  misc_feature (742)..(742): n is a, c, g, or t
  misc_feature (790)..(790): n is a, c, g, or t
  misc_feature (917)..(917): n is a, c, g, or t
aatagcancatttctttaaagaaaaacaaagttcaatatgcccaataataattatgtttaacacttggnacacatataaatagacaaanggctgnggagaacactggatttaaataaaggtgttatgggtataattaactataatttattttatgaataaataggaaaaaagtccctggctatanaggatagtggaggnttatttcccaatantcttccatttnccctgaccccctgccaactaagcagacatcccactattacaccaaaacccctgctctccctgcnagccattacaatacatgacaccactaggcccaatggctcanagggaagantngcctgtggctcttcaatctttatccaaacctggttctancttcaggggcctttggtcacctgnnnctttttttttnttaatttttttggganggagtattgntntgtggnccnggntgnttntgngntcntgggntcangcggttctncngcctgggnctcccagnttgttgggtttncnggcntgngccaccacacgcagccacctgngnttttttanncagcaccagcncttctggntggtttgnaccttanntgccaccacccnccngtnaggaggntctcactannttctaantntttnatttaattacttttnanttgnnaaanaaaacanncagaagatacttattagaataaggncacctaggaatgttcttaacttttccattcagcttttggntgatatatgaaaatacaaataaatacatcctttccccaggtgcaaggntaaaccagcagctccaagggcttggtctacagtgctcagaaagacacactgccttaaaagtcaggctagtgccctagctccggtggcctctgcaaatgaggccttgacagtcgtcagtgggcagacnc

SEQ ID NO: 643987 - DNA, 258 bp, Homo sapiens
  misc_feature (11)..(11): n is a, c, g, or t
  misc_feature (45)..(45): n is a, c, g, or t
  misc_feature (63)..(63): n is a, c, g, or t
  misc_feature (75)..(75): n is a, c, g, or t
  misc_feature (77)..(78): n is a, c, g, or t
  misc_feature (85)..(85): n is a, c, g, or t
  misc_feature (87)..(87): n is a, c, g, or t
  misc_feature (98)..(98): n is a, c, g, or t
  misc_feature (111)..(111): n is a, c, g, or t
  misc_feature (130)..(130): n is a, c, g, or t
  misc_feature (139)..(139): n is a, c, g, or t
  misc_feature (141)..(141): n is a, c, g, or t
  misc_feature (184)..(184): n is a, c, g, or t
  misc_feature (192)..(192): n is a, c, g, or t
  misc_feature (204)..(204): n is a, c, g, or t
  misc_feature (227)..(227): n is a, c, g, or t
  misc_feature (231)..(231): n is a, c, g, or t
  misc_feature (247)..(247): n is a, c, g, or t
cctacaagccncagagtacttcgagtctcccttcaccatttccgncggcatctacggctcaanattttttttacngnnggcttcngnggacttcacgncattattggctcnactttcctcactatctgcntcatccgcngnctaatatttcactttacatccaaacatcactttggcttcgaanccgccgcnggatactggcgntttgtagatggtggtttttgacnattnctgtatgtcgcgggcnattgatgaggg

SEQ ID NO: 643988 - DNA, 425 bp, Homo sapiens
  misc_feature (50)..(50): n is a, c, g, or t
agtatttgagtagtgggggtaaaccaaaaggcgactggttatattttacntcctaaatgtgtgctgaagtgcctcttgttcaaaaaattcttgatatttagagcttcaaagttaccacatttaaaagtaaaagacttggcacggtggcacacacctataatcttagcactttgggaggccgaagtggatggatcatatgcagtcaggaatttgagaccagcctggccaacatggtgaaacctcatctttactaaaaatacaaaaattagccgggcgttgtgacgcacacccatagtcccagctaactccggaggctaagacaagagaatcacttgaacttgggagacagaggttgcagtaatctgagatcactccgctgcactccagcctgagtgagagtgagactgtgtctcaaacaaacaaac

SEQ ID NO: 643989 - DNA, 739 bp, Homo sapiens
tatgccagcttggacatcagtgtggtgggatccgttgaccaatttgcaccagttttatccataatgatggattaacagcatgacaaaaattattttttttttggtcctggagggagattaagatgccttgaattggtcatagggggtccgggtaccttagaaggtaacgagctctaagtacctttcctacattttccttttttctataaaccagatatctccagttatattcgcaagagaccatttaaactggtggtacaatcatgtccggggggttggatggttcacagggatttcccaacaataaagggactctgagaagatttccatggacggaataattggccataatatgatgcaacactggtgctctctctatgataattacaatacaaagtgttccatttcagtgcagcatatacaataatgtaattaagtcataacacagttgaccctatttttgggacacttaactttgttcaacaaataccactgtggaacaacacagaaagccctatatattgctatcatgtgtgccacctagagaagcttctctgtcataccaaagcgtcctatcaggacaggacagggataggaattcctcaacatatttataattccccaataagtggcccctctttaagccagaattccattcaacggggtccaattgtggaatcacctttacatttaagattttttcccatattttggggcttggctaaactcagattattgc

SEQ ID NO: 643990 - DNA, 266 bp, Homo sapiens
  misc_feature (26)..(26): n is a, c, g, or t
  misc_feature (101)..(101): n is a, c, g, or t
  misc_feature (120)..(120): n is a, c, g, or t
  misc_feature (144)..(144): n is a, c, g, or t
  misc_feature (208)..(208): n is a, c, g, or t
gcctcaaggcgctgcggctcaagagnaacctaagcaagctgccacaggtggtcacagatgtgggcgtgcacctgcagaagctgtccaccaatacgacccgntctacaccaagctcatcgncctcaacagtctcaagaagatggngaacctgactgagctggagctgatccgctgtgacctggagcgcatcccccactccatcttcagnctccacaacctgcaggagattgacctcaaggacaacaacctcaagaccatcgaggaga

SEQ ID NO: 643991 - DNA, 450 bp, Homo sapiens
agagaaaacaaagatcccatttcttcctctacctcaaaaaaaaagcacaccaaacaatccaatcctattgtagtgtcacatcgaacccaggcctgaaacaatatatcatgctagtttcctgctatatgccgcagacacactttagtacatttccattattgcgcaatctatttaacagcctagaatcatcctagtgcttccatcagcagaaggcttgcaacaaaaggcgtgagcagcggcgactgcgagtgggaccatcaaagactctcccccgactctcctcttcatcatcttcatctgattcatccatatctgctgactcatcatcctcgtcttcctcctcttcctcctcctcctcttcttccatctcttcatattcatcaggccccatatccaatcgggatatcgagaccctgaaggtgggacatgccaaacagagaatccaagagg

SEQ ID NO: 643992 - DNA, 253 bp, Homo sapiens
gcatcatagaacctccaacacacacatacacacactatttgctcacacacgtataccacgcacccacattcatactgactcttgacacacgcacacacaaactcacatacaatcaccatatacgctgctgctactctgtttatcacacatcctggtgcctagtcaccttacccctatacatatctaaccataccactccagtgtccctgcacatgtcgacgcggccgcgaatttagtagtagtaggcggccgc

SEQ ID NO: 643993 - DNA, 172 bp, Homo sapiens
tgtccagaaaggaggatgtgggcaggcacggggtacagaggatagtgtgggccattcaacgcctccgcgttgaatggcccggaagcgttgaatggcccctctccacccttatcacaacacaagaacacctctgattactcctgccatcatgacccttggccattcaacgcct

SEQ ID NO: 643994 - DNA, 376 bp, Homo sapiens
tcgactgaaactgaaccaaactctagcatgagagtcggcatcccaggccagcagccaaaacaagtggtgacacttggccaggcacggtggctcatgcctgtaatccctgcactttgggagtccgaggcgggtggatcacaaggtcaggagtttgaaaccagcctggccaacatagtgaaaccccatctctactaaaaatacaaaaaattagctgggcgtggtggcgggcacctgtaatcccagctactcgggaggctgaggcaagagaattgcttgaatccaggaggtggaggttgcagtgagctgagatcgcggcattgcattccagcctgggtgacacggcaagtctctttcttaaaaagtcgacgcggccgga

SEQ ID NO: 643995 - DNA, 419 bp, Homo sapiens
ctagtatctagagatcctttttgcggtgccttccatgctgtgtgctgttggaagtatgtagactggggtatgtgccaatgaatctcgtgcgactgaagagccgggagcggggcttgctggctgtgcactcatttacccgggacagggagaggctcttctgcgtgtagtggttgtgcagagcttaatgcatcacggagaatgagaagacgttcccctgctgccacctgctcttgtccacggtgagcttgcaatacgagggaagaaaggagccgtcggagtcccaagcacggaaggccgtggccttgtagttgtcctccggctgccccatttgctctcccactccatggcgatgtccctgggatagaatgcctttgaccaaggcaaggtcaagggctgacctggtcctgtggcatctcctc

SEQ ID NO: 643996 - DNA, 1773 bp, Homo sapiens
  misc_feature (314)..(314): n is a, c, g, or t
  misc_feature (339)..(339): n is a, c, g, or t
ggttgacggctgtcttcagagtttaccatgcgcttccggagtgctgtggcgccaacatagtgagggcctagtaacgaaaaatgaatcaggcgacatatgaccatcactgagaagcttgagccgaggagtcactgccaaggtacttactacagatagctggtgagatccatggacactgggtaggagtcgtgctcgggctgactctgtgcgtactagatgtttgggctataagagaacgtctaacgcaggcttcgtgcaaatgacaggacacgacggtgtctgcatgaatgatccgtgtcgcacgtgtatgcggnctatgtgatatctgtattaccacgngggtacctcatacaactcgagccgaggaaaacaaacgtgcgcaagtgtctcatgtccatcatccatttccgtgggggagtgaccatggacgagagacgcagtatggagcaccccatccacagccatgcgcgaggaaaaatgactctccccacgctttcgatgcttggctcgagaacggaaaggaacatagacgtaggaacctgggttgaatctagcgacgtgcatcaattacgtgtcgcaggacccgatttccgtggacgccaatgaggggaacgttcggtcggatcgtaggttaaattgagaccgccttccgaccctttcctcgctccaaagacacaacgcatacttgtgggaggacacttttcagcaataaaggcggctcgtgccgaggagggtaaataggaggggagacttgggaggctattgtcacctcacagccctgggcccatatgctaggtaattaccatgcaacaataagtggtaatttcatcggagttgacgcttttccacattctacaaaacattcacaaagtttccgttggatggaatcaaacgataacatatgttgacagggaaatttaaaatccaatgccatagttccgtttccccattgggccatacacccaacccccatggggtagcgttgagaagacgctatgaacgggtagagtggccccattgggtgacggaaggttggcccgcgataaggtgggcgcaagtcgcccctcatggatgggtcctcatggggcctggcacgtgtgtagcacagcaaagacgcattgtgagcggtcattcccaagggtttcgagcacaatttgcacatttatgggccctgagaacagacattgtgggcggcttatcccaactacggtgtgcgccccatgtgatcaatacaacaagtaatgtgcaccattatggtgggtctcatccacgcacccgttgcgtgacacaagtagggagggctttcaccgagaacatgaatggtatatctgcgattaaaacatttacactgtgcttcgcagctcacacctgttatccacgttacctgagtttccgcggcacattggtgagcacacataaagacgggaaatcagaaaacttcgtcttcatatacggacctcatgatacacccctagtcgcccccaaaaagtccatactgtccaccacaacacggggggccttggcacccgggatccacaaagggacgcgccaaaccggggcagacacttgactggagaaaccccattataggaaaggggggggcaccaagaggaaacggtgaataccgcgagaacaatcgcgacaagaacagagcacccagatacagacagcagacagcaaggagcactgcaaccgagcaacgcaaagacgaagaccacacacaaaacagcggaagaaaaagaagtagcatgaggaagcaagaaacaaaggagg

SEQ ID NO: 643997 - DNA, 382 bp, Homo sapiens
ctctctgagttcgacgtgtagattagcattagggaggacgtgtacccgaggatcgtgtggctcccggagaaagttcagaaggactcactgaggcccgaggctgcgcggtacctgtgtagcggctaatcaagctggtgccggagaaatgggcttcaacctcccccagagaggactcagtgaaaacatcaaacgcgatcatgaagaagcgtgagccttctgtgccatcgacttcaatcaagaacctgaacgaggacacgaccttcctgcccttcacgcgtccagtgagctatggacgggctccccgaggcacgtttctgaactccgctggtagaagatggaggcacggcaagttgaatggtcacccctcaagtacccccgattc

SEQ ID NO: 643998 - DNA, 1715 bp, Homo sapiens
tgtaagcgaggcacggcaagacatatgcttgctgagacaaaggtgctcatcctgcaacactactggatggtacacacgcaactctccacttgcacacttgcacagcagtacctcggcatactgcaggctacacgcaacaaaccaagctactacactctggcaaggaaatggccaccgcacacagctgcggcatgacaccgcgccacacgcaccatgcctctcttcacctcacgcgcaaccaacggcaccactcacgccctacctctacacacgcacaagccaacttcctacggactaccctattctcatctacacacgcgccacacgcacgctgccaccctcgccgcgcgcctcactctctctcctctcctcccctcttgcccgcgcacacaacgcccgcgctctgcagccactgcacccactgcgcccctcgcgcacccacccgggcgcgcaaaccacccagctggctaacgcctccggcctcgctgccgcacaactccacgcctgccacaccctctgcgcgcactcaccacaccacactatctcccaccacccccacaccccagcacactcctctctcctctcacctcccagcaacacgcagacccccacccttcccaccgcgcaccacaattctcccctgcgcaaacccccaccaacgctccttctctcacaacgcacgctctccctttccctgcagagcgccacaccaatatatcctcccactactggcttacccccttgcctctcgcccccgcctcacttcctcctccggcacctcctttttccccccacgcggcacccccaccacctactctgcggcgccccaccaccttgtctcggacccacctggcacccttcctccgcgcgcgccatctacccaccgcgcgccacgcccacccttctaccgcgcttgccgccccccaccctcccccacccttcccccacccggcgtgcacctcccggccccccccacgtgcgcgctcacccacacgtcacttggcgcaacctccatcacgcggcctgccggtctcctttcgccgccacacgcgctcctggccacgcgccttgcgtccgcccacgcgccagcccccgaccccgcttctcccagcacgtcctcgccgcgcgccacactcctcgcacccttcggcttcccctctccgccgtggcacacgcgcggcctccatctcgttctctccacgctgtctcacgcgccccacatcccgtcttacactctggaccgcaccctgtgcgcccttccccgctccctccgcgtccccaccgccttggccgccttcgctcccttctcggctgccgacctgtctgccgccccgtctccctgcccccacgcccggtcccgcgcgccaccgcgctccctcgcgcctcgccaatctcctcctccacgccgctctggatctgaccaatgaccgtccacgcacactcgacctggccattcctctcctcgcccaccacctcgcggctcatctcaacgccccacgcgtcccgcctcctctctcgcctctcataccaacagggctctcctaccactcgaacggcctgcttctgcttatgcgctctacaagcgcaacagcccctccgtcgacccacccggccatcgcatcgtgccagcgccgtcaccaccccgtacttccgcgcgacgcgccgccctcgctccgccccgcggtcctgtctccgcccagtcaaagtcaaccata

SEQ ID NO: 643999 - DNA, 986 bp, Homo sapiens
  misc_feature (984)..(984): n is a, c, g, or t
  misc_feature (986)..(986): n is a, c, g, or t
ggtgagacttcctgctcatctgccgctcgctttgccgcgccgttagcccgggactggaacccaggctctcccctagccgaatcaaccggccccggctccacgaggcccgggtccgccagcccgtctcgccgccgccatggggaccctaaatacgccgatcttcccgcgatgccaggaatgcagccacatgttgatgaatagtagtcgagctagcctgaggatgatcaagcggagttcgatgcggagctggaggagctgacaagcacaagtgtggaacaatcattgtcaatcctaatgctgcctatgacaagtgcaaggacaagagagtgtggacgaaagggacttgatttctcagatcgtatggaaaaaccaagaggacaggatatgaatctggagaatatgagatgttggagagggtctcgggagatgaacgggggaacggactacgtgaaagagtatgcatccgtcgtagctgaattgagggaccatcgagggggaccaggattggcgtctggaaagtcattgaggagtgatgtgcggtaatccagcgggatgagggaagaagctgactggtgtgtggggtgggctagaggagcagggacgccctgtaactacgcagtgggtgtgctcgcagctggcaaagagtgttgggagggaacggcaggatgaatttgagtgacccgagatggaagctgtgactaggggggtacgtaaatggagttggacgcatcaagactggtccgtcggagccgcaaaacgtggaggactaagaatgctgcgttataaacatgactgagaagaagaaatgtgccaaggcgatttcggatgcaagggggaacacagcaaggtctgtgccaggtcaaccatgggtaaggagagaagcaagaatgtaaatgacggataagcagaggctaacagggatccagtcaggtgcgagtagtaagcgtacagagtctcttgtttctgtcctctattcacttgtangn

SEQ ID NO: 644000 - DNA, 335 bp, Homo sapiens
gctgctgcggtgactctacaggatctccaaagtgctgggattacaggtgtagccaccgtgcctggctgcatttcagttatttttcagtaaaactggtcaaccatccacctcactgcactaccgtggaatgactttaaaatattgcgagagccatttgggccccacaggtcacccggcttgctagaaagcagtatggggattgccttgggtcccaaagggtccacgatttattaaaagtaagaacactgggcgaaggcctaaggacggggtaccggagcctcgaaattcggtaattcataggggtcattagcttgttttccttgtggttgaaattt

SEQ ID NO: 644001 - DNA, 152 bp, Homo sapiens
gtacctgccctagaacagcacttgaaggaggtcggctgtgcccaggaccgtgtggccgagctgcatcgcctgtcagccttcagggagagcaggccaggaggcgcctggatgcacagggggtttcttggggggcacacaggggggatccctct

SEQ ID NO: 644002 - DNA, 122 bp, Homo sapiens
caagcgaatatgcgggcagctgccctgtgtgacaatgcattccaatgctctttgaagagcctgagtgaccccagtaacctgctcattcttctcggaaatcatctcctccgtgtcctgacgtg

SEQ ID NO: 644003 - DNA, 365 bp, Homo sapiens
tcggccgggttatgctgcagtgcactccagcctgagcaagaaatattacatgcaaattaaaagaacaagacctttgtgccaggtgtggtggctcacgcctgtaatcccagcacttctggagtgccgaggtgagcagatcacgaggtgaggaggtcgagaccatcctggccaacatggtgaaaccctgtctctactgaaaattcaaaaattagctgggcatggtggtgcatgcttttaatcacagctactcgggaggctgaggcaggagaattacttgaacctgggaggcggaggttacagtgagccaagatcgcaccattgcactccagcttagatgacaagagtgaaactccatctcaaaaaaa

SEQ ID NO: 644004 - DNA, 327 bp, Homo sapiens
gtctgttacccccctaactgtcactgaataaatatacaggagcaggacatgatctacagaagaaggttcagctttcaacagaatttagagaaaatttaagaaattatttcttggtctcaaagggccaagttacaaaaaaagaaaagaaaagaaaacaaaaaaaattggaaaaaaagcctttgaatacccctattgaccctaagaaaaaggcagggaaagttggccaacgtgaacccaagcacccgaagcaaaaagaccctggagaatgaccaaagccccgagggaggagtaaaagggcccaaatcccattctcagggacccggactg

SEQ ID NO: 644005 - DNA, 362 bp, Homo sapiens
ggcacgcgaggggtgtttcgtgacaccaagcgtgccgggcacgcattgcacagctcgactgtgcacgaaacaccgctacacgagagttcgggtctagaatagggagacggagatgggacagggcatggactgtggtgggacagcctcgagtggcaatttggtaacgggagacttatggaagtgccagtagccactcttcaatggtccttgaggacgaactttttgggatcggactgtgagagctacttttttagcacaagtgttacgtctaagaagagtgcggatactatctagtttctgaacccagacatcagtctgtgtacaggcgcacttatgtgagggcttgccctgatctcttcccg

SEQ ID NO: 644006 - DNA, 639 bp, Homo sapiens
  misc_feature (23)..(23): n is a, c, g, or t
  misc_feature (28)..(28): n is a, c, g, or t
  misc_feature (32)..(32): n is a, c, g, or t
  misc_feature (36)..(36): n is a, c, g, or t
  misc_feature (41)..(42): n is a, c, g, or t
  misc_feature (53)..(53): n is a, c, g, or t
  misc_feature (69)..(69): n is a, c, g, or t
  misc_feature (76)..(76): n is a, c, g, or t
  misc_feature (96)..(96): n is a, c, g, or t
  misc_feature (137)..(137): n is a, c, g, or t
  misc_feature (148)..(148): n is a, c, g, or t
  misc_feature (152)..(152): n is a, c, g, or t
  misc_feature (154)..(154): n is a, c, g, or t
  misc_feature (157)..(157): n is a, c, g, or t
  misc_feature (178)..(178): n is a, c, g, or t
  misc_feature (180)..(180): n is a, c, g, or t
  misc_feature (195)..(195): n is a, c, g, or t
  misc_feature (202)..(202): n is a, c, g, or t
  misc_feature (204)..(204): n is a, c, g, or t
  misc_feature (208)..(208): n is a, c, g, or t
  misc_feature (212)..(212): n is a, c, g, or t
  misc_feature (218)..(218): n is a, c, g, or t
  misc_feature (220)..(220): n is a, c, g, or t
  misc_feature (222)..(222): n is a, c, g, or t
  misc_feature (224)..(224): n is a, c, g, or t
  misc_feature (226)..(226): n is a, c, g, or t
  misc_feature (232)..(232): n is a, c, g, or t
  misc_feature (236)..(236): n is a, c, g, or t
  misc_feature (244)..(244): n is a, c, g, or t
  misc_feature (246)..(246): n is a, c, g, or t
  misc_feature (250)..(250): n is a, c, g, or t
  misc_feature (254)..(254): n is a, c, g, or t
  misc_feature (263)..(264): n is a, c, g, or t
  misc_feature (266)..(266): n is a, c, g, or t
  misc_feature (270)..(271): n is a, c, g, or t
  misc_feature (286)..(286): n is a, c, g, or t
  misc_feature (302)..(302): n is a, c, g, or t
  misc_feature (304)..(304): n is a, c, g, or t
  misc_feature (311)..(311): n is a, c, g, or t
  misc_feature (317)..(317): n is a, c, g, or t
  misc_feature (337)..(337): n is a, c, g, or t
  misc_feature (341)..(341): n is a, c, g, or t
  misc_feature (346)..(346): n is a, c, g, or t
  misc_feature (349)..(349): n is a, c, g, or t
  misc_feature (363)..(363): n is a, c, g, or t
  misc_feature (365)..(365): n is a, c, g, or t
  misc_feature (371)..(371): n is a, c, g, or t
  misc_feature (376)..(376): n is a, c, g, or t
  misc_feature (404)..(405): n is a, c, g, or t
  misc_feature (409)..(410): n is a, c, g, or t
  misc_feature (413)..(414): n is a, c, g, or t
  misc_feature (431)..(431): n is a, c, g, or t
  misc_feature (440)..(440): n is a, c, g, or t
  misc_feature (450)..(450): n is a, c, g, or t
  misc_feature (465)..(465): n is a, c, g, or t
  misc_feature (482)..(482): n is a, c, g, or t
  misc_feature (491)..(491): n is a, c, g, or t
  misc_feature (510)..(510): n is a, c, g, or t
  misc_feature (577)..(577): n is a, c, g, or t
  misc_feature (636)..(636): n is a, c, g, or t
tcagtttctcccttttccaattnatttnaaantttnaaaannaaaaaaaaagnaaaattttcccggcanaagtaanacttgtttaaaaaagggggngggggggggacgcgcaagtgcgcgaatttttctattttatnaaaaaaaaaanaaananaantgtacaggttttttctcccancncccgggtgtgaaacnaagtacnancccnaaanatgtanananananaaaaanacanatgcacananatcnagcnctgtaaaannanttannaaatcccaaatcgantgcagtaagttttaananccacggnccgccnaatccccctccccctcccgnagcnaaaantanttaaaaaaaaggantnaaaaanagatngggaggttttaagtggccgcagccccannaaannaannaaaaaaacctcttgtanaggaggaanaaaaatccanaggaaaaaaaaagtnttcctaggaaaaaatcnatcgattgngtggaaaaacctaagtttnaaaagggcacactgaggcacttggctgactccccacccttcccctgaagttttcactccggtttaanaagagaatttgctgaagccaaaaagatcccccaatggctacatcctagctgactggganaaa

SEQ ID NO: 644007 - DNA, 360 bp, Homo sapiens
gcgtgagtgagtgtacgcaccgctggccttgcctgcataggggcgcgtggtacgtcttcctgggctttcatgccgccaatgggattgccagtttgtaagggcgcgcccattcagtggtcagccggtaccttgcaaataatgcaggtgatcgatatcgctgcggtgttgatcatcggcccgaacgtgtagcgcaccttctgcctgcacttggtcagctccaacatgcattactacggcgatgtgcaactgggcaatgtgatgcagcagaccccagtgctgaacccttggtggctgtggccgttgcaggcgtactgcttcaacttcggcagcacccacggcatacatcactttgtggtgaaa

SEQ ID NO: 644008 - DNA, 488 bp, Homo sapiens
attgagaacaaatacatatcatggacaaggaaattcgcatttagcattataggagaagacttaactaggcgtcaacagaaaggtagaatcacagctcctgtatgtatgttcacacacataatctccttaataacatgtaaagtgcttagaatcaaatcagcaatcccccctccccaaggattgccacaatttctctaaagcagtgagttcacaaatcagacctaaacatctgtatcaaccatgtaaggtcctcatggtgcagattccccagtgaccttcccgacaacaagctaagtccggatatctgagtctaggtttgggcgtctgtaatttaattgtattgtataacctctgagagatggttctgatgagtcagccaaccatagggaaacatcaactctacagaaactgtgagcacgtaaagacctgcgtcttaggctccgtctttccctggattctcctctagcagccgattctggggatcctct

SEQ ID NO: 644009 - DNA, 279 bp, Homo sapiens
  misc_feature (83)..(83): n is a, c, g, or t
  misc_feature (87)..(87): n is a, c, g, or t
  misc_feature (89)..(89): n is a, c, g, or t
  misc_feature (92)..(92): n is a, c, g, or t
  misc_feature (96)..(96): n is a, c, g, or t
  misc_feature (101)..(101): n is a, c, g, or t
  misc_feature (105)..(105): n is a, c, g, or t
  misc_feature (113)..(113): n is a, c, g, or t
  misc_feature (126)..(126): n is a, c, g, or t
  misc_feature (128)..(128): n is a, c, g, or t
  misc_feature (246)..(246): n is a, c, g, or t
  misc_feature (257)..(257): n is a, c, g, or t
  misc_feature (263)..(263): n is a, c, g, or t
caaaggagaaaaaaacccttgtaaaaaaagcaaaaatgcccccagaaaaccctttttattccgggcattccagtaactttttngggnanggnctanccggnccanaaaggagntggtttgtatgananggttaaaaaggccaaaaataaaaggtttctttttttttccttttttgtctaagaaggtgcggtttattttttttggcctgtttgaggtatgggtgaaacaatgttgtcccccaataancaggaattttnttttgntgggttgttttaccca

SEQ ID NO: 644010 - DNA, 229 bp, Homo sapiens
tcggtcactaaacatctgttgatttccacatgcgagtcacaggaacgggggacacaacactatgtacggggcagtccctgtactgtgcttagagtctagttgcgaccacaaacaaccccggcacttaaacactacccgtgtgggtacaactgcacggacgacgacgggacacgtactacacggggaaactggggcgcacgtgacacacacgggtcacgacagccacggc

SEQ ID NO: 644011 - DNA, 101 bp, Homo sapiens
ccccccccgcccaccaccacccacccgaggcagaactgtatacatatatggcccgatgcgcttaagcgaacggaccgagcgcaggagctaggagcgaggaa

SEQ ID NO: 644012 - DNA, 320 bp, Homo sapiens
cctacggtgtgttgcgtgcggcagtgggaggtggtgaagagcagtgactactgcgagtacctccgcccccccatcgacagctacagcaccctggactttggcaagttcaacgagatctccgaagtgggctaccagcacgggcgcacggtgtttgacatctggggccgcagcggcgtcttgtagaagatcttgccgcccagcagggcccgaccaagagcccccgagtcggtctctacatttccacggtcttttagggactttccgaatttgtttgtgattcccccccacgcccctatgtgatagattttactacagagtta

SEQ ID NO: 644013 - DNA, 386 bp, Homo sapiens
  misc_feature (140)..(140): n is a, c, g, or t
tcagaaatcccaaagctccccgcagtttcatcccctcctgggggggtttggtttaatttccccggcccagaattagtcattcagtttgctcaggggacagtccgcctctgcttgtccgggttccgggccttggaaattgntttgccccccggacctgtgtggatccccggcgacgtttttttggggggggatgtgaccgttttttcccccggggacattaaaaacggggccccagtggggttggggggggcttgcccttccggaaggggccttggaaggggcgagaccccgcaggggcagttccccgggggcccccccggttatgggcctgggccccggggagcaaagctagggcttctccgttaaaatcccattttttcctttta

SEQ ID NO: 644014 - DNA, 305 bp, Homo sapiens
atttcaaaacccccccccccctgtttgtgtcctgagggcctctttttttttttaaacaaccccccctgtccccaaacaggtgtgccccgggggacattttttttttcctcccttggcccagaggtgtttccccccccccaaccgcaaaaaagcctttcccttttccccgggtatttaatttgcccgccgcccacccccccccccccggggtttttccgttcccccaagaaaatttccccgtgccccttttttattttttcccggccccccccttgggatttaaacccccccccccccccttggca

SEQ ID NO: 644015 - DNA, 256 bp, Homo sapiens
  misc_feature (51)..(51): n is a, c, g, or t
gcgggtgatctagaggatccgaaaacgacatagaggcaaggtctggctctngtgcccaagctggagtggaagtggcatgatttcacctcactgcaacctccgcctcccaggttcaagtaattctcctgcctcaacctcctgagtagctgggactacaggcgtgtgtcaccagacccagctaatttttgtatttttacaaatggggtttcaccatgttggccaggctggtcttgaactcctgacctcaagtgttcct

SEQ ID NO: 644016 - DNA, 104 bp, Homo sapiens
atgcaacgagtaacagactaccacctacctccctcacctagaccctgcaaaccagtaccgcctcaccaagatcctgcaaaccagtaccgctgcaaaccaggaga

SEQ ID NO: 644017 - DNA, 250 bp, Homo sapiens
ggagcgcgggtacagctttttcgctgactacattcagcccgtctggttaacttgtccagattgaatatgcttggctgctgtagctggcaggcagcacagtccgtggcaattaaagctgcaaatggctgtgctattagcaactgagcaaaaaacagcaaattcattctgtatgatgcagcgcagctgttacacaaagctagcaaccaatttaccaagccatatagccttttgctgttacagctgccatggg

SEQ ID NO: 644018 - DNA, 282 bp, Homo sapiens
cgatctagaggatctgaagaagacgacagaagggtatagctctgagtaatgttgactaaagagggagatctgaactgtataagttactttaagtaaaattcctttaaatggactagatattaatagattcctcttaccaagtttttcttaaatttcaaaggttagtttaggctgaataccttatacattatgggaggcattagaatgtttacgtgatcggcaatatacttcgtaattatacatagtgagtatcggaaatacaatgagaaacaattgcattga

SEQ ID NO: 644019 - DNA, 113 bp, Homo sapiens
gacatatagtgagagcgtgcttttggagctcttctcaaccattctggggagctgggaccaagactgcccagaatgtgggcttccgaagtctggaaaacatccgcagcaggctc

SEQ ID NO: 644020 - DNA, 327 bp, Homo sapiens
ggatgtctgcccctcctacccctgtctgcctgctggaatgagagaaagcaacagcccagatttggctcaatcccatgaaatgcaaatgtctaacacaggctttctactatcatcttcacgtttacattatgcaccttaaagaagtgaaaactagctgggtgcagtggaatgaccatggagccccaggttacttgggaggctgagcgaggcggattatttgagcccaggagtttgcatttagccagtgcaccacagtcaagaccgtatttctaaaaaccacaacgcagtaaacactcatatattggaaggtgtcgccactctcctttg

SEQ ID NO: 644021 - DNA, 231 bp, Homo sapiens
ctctggactgtgtgtcttctgttgtcctctttttttctctgtctgctctcgctctcttggtcatgtaacctgtctgctgagaactctcaaatgtccatctagacctttctccagatcctccagactctgcatccctctgccttctcaacatcaccacttggatatctaataaatcaccatacccatagttgagctcctgggctcaagggatccccctgcctccgtctcctg

SEQ ID NO: 644022 - DNA, 301 bp, Homo sapiens
  misc_feature (136)..(136): n is a, c, g, or t
ttgtgaggctacttgaggatcccattggatagcggataggggcactacacagaaggcgcgagctggtgactcggtgctgatgttgtgagacaggaggctgagagctgtgactgctgcaggtttccagctgaccacntcctgggtgggggactgtgtctgcgatgggtacctcctcatcagcaagatccgggaggagtacccagacaggatcatgaacacgtttaggttgtggtgccttcgcccaaagtgtcagacacagtggtggaggcctacaaagccggcctcattcggttaatcaaat

SEQ ID NO: 644023 - DNA, 946 bp, Homo sapiens
  misc_feature (314)..(314): n is a, c, g, or t
tgttttctggaggaggcgggagagagagaccagcggtgacatggccccttttcgtttaagcggggcgatattatccctcacctgggttctccgtagatttccttgtgcagccagaaccattccgggtttgcgacacctggccctttccatagagggttccatttagaccgggagggcctgacaccggtatcaagcccctcgtttccacccgggctgtgaacgggcctggcacgtgttttctgtaactctggacaacttgggagagaaagctttttcgcggagttttaaactaccttggcgcgcaaaggtttttncctctccatccgggattaaacttaactggaatgttgacaaaattgcaagcagacaaatttggtaataagcagggagccccccaaatcttcccctccaatggaggaatcttttttttaaacctggggacgtttgttaaaacaattcttttttaaatggggaaggagctttctttgaaagcacccctcctctgcccgaatcctgtgctgagacctgtggagaccgcgctctctgccttgggctaaccccgaaacgtggggaatgggggcccccaagacaacatcaggaacatttgagtccagctgccaaacaatggtgtcccactcggaggcagcgccttttggtcccccaattctgtataacagcgtgtgtgtgtgttcgaagatttttatatttttgctaatccaacgcccattccccgaaagcacatccaatactctggctctgagggcagctccctcctttcaaaccgggcagcctggcctttcctgccacagacacttgcggtgcccagcattccccagaccagggacaggcccaacgggagggggttttaatttttttcaaaccaggaaaacaaccttattttttcttcaaaaccaaaaaggaacccaaaaagaacagcctttgatga

SEQ ID NO: 644024 - DNA, 93 bp, Homo sapiens
  misc_feature (11)..(11): n is a, c, g, or t
  misc_feature (30)..(30): n is a, c, g, or t
aaaacccttanaaccagtaagaggaactcngtgcaggcaacaactgccctcttgggttagggggtgttccttcacggaatccatgcctgaatc

SEQ ID NO: 644025 - DNA, 1709 bp, Homo sapiens
  misc_feature (1096)..(1096): n is a, c, g, or t
  misc_feature (1115)..(1115): n is a, c, g, or t
  misc_feature (1385)..(1385): n is a, c, g, or t
cggcgagctgtgggttgggggtacgaggtgctgtgggagcgaggtgtgggtgggcgggagggggtgtgtgggcgtgctgggtggggtgtgcggcggctgggtctctcgtcggcgggtgtgtatgtctgctcggcgtggtgggtgggaagaaggtgtgtggcggcgcgctgaggccgagtaatccggggactgggaggaggcgactggtggtggtgggcgcgccgcgcgtgatggggcgctggaggtgcgcagggtggggggcggccgctgtgtgtgtctgctgcggcgggcgtttcgcgggggaaggcgggtgtgtgctggcgcgcgcggggaggtgtagaggccccgccgaaggggggcggttggcagaagggtggggtgcggagaggaaaaccgagaggaggggagcaccaggtagggcagggtgacacacagggggagagaagaaaggggaggggccctttgtaagaaggggattgggccgccgctgcccgcgggggcacaggaagtaaagccttgcgtgagcggggggccgcagaaaaagggggggtgcggaagtggtgagaagaacccgcgcgtgtaagggaggaacgcacgggggggaaagagaagtgttagttggaacgaccaccgaaggagggtgttgaatcgtcgtcttaagaggcgccgtggtgcctccgtagatagaacggaggggagttttcttgttggggcgggcccgccagcggagaaggcttcgcacggcggagattggggggtggtgttgttttagtcaacgctgggtgcgtgggccccacgaggttgtgagccgccgcccccatagttggggggagggggcctcgttgtgtggagcaagagcttaagaagtgtgttgttggtggggttttcggacgtggggggtataataacgccacggagcccaccggcgtgtgttttattggggagactcggggtatagattcccccacaccacgcgggaggactctttatgacccacgcagaaattgggggtttatatagagatatgcccacccgtcacgcccacagatattgcgcgagaggggtataaatgtgtgtgccccgcacagatagatgngcacgccacagaatggggntattatggagacgccccccacaccacgcggcacatatatgcgacatatatgcgcctcgcggtatgactgggcacaggctggcgacacgcctatatgtagatgtggtggtatgaatcgcacacagtggcgcacacacacagggagatattttcctcgcgcacatataagagactgtttatagagagaggatatatatggtagagagatgtttgtgtgttttctcatatagatatgcgtctttttatatatatgtggtggtttttatatctngcacacacagagatatagatttatattttaagagaacacacataggggaatatcgctcagaaaaataggcctcgctcagatgccacgccacgatgtaatattataggtggccacatattttctcgctgatattaagattggagtaatattctcttaccatatccctggacaccaatatttttaggtgtttttttgtgacttaggaaatagccaggccacgtggttttccaccacaaagtgaaatagtgcaccacgtggatttgaaatacaccacataaatgaaggccaagcatggccttcccataaaaaatatttgaagactga

SEQ ID NO: 644026 - DNA, 531 bp, Homo sapiens
tgagagaccgtgtcgcaatgtgtcaaacttgtcctttcttttaatggccgatgcatataccattgtatgtatgtgtaacagtgtagtggagtaatttacccgttgatggaaacttgggttagttccacttttgggctgttgtgaataatgctgctgtgaacatggatttgcaaatatctattccagaccttgcttctggtcctcttgggtaggtatccagaagtgaaattgctggatctcatggtattttgctgctttccacagcagctacaccatttggtagcccaccagtaacttgcagagtcccagttccttcgtgtccttaccaaggttgttatttcctgttttggtttgggctttgctaattttattgagacagagtctcattcctgtcacccaggctggggtgcagtggtgcgctctcggctcactgcaacctccgcctcccggattcaatccattcccctgcctcagtctcccaagtagctgggactacaggcttgttccagcatgcccgactcttatctttat

SEQ ID NO: 644027 - DNA, 448 bp, Homo sapiens
  misc_feature (57)..(57): n is a, c, g, or t
  misc_feature (60)..(60): n is a, c, g, or t
  misc_feature (322)..(322): n is a, c, g, or t
  misc_feature (408)..(408): n is a, c, g, or t
  misc_feature (422)..(422): n is a, c, g, or t
agataaacccctctaaaacaggtctccctctggtgcccaggttggagtgcagtggcngantagtagctctctataaccttgaactcttgggctcaagcgatcctcccacttcagtctcctgagtagctgggaatacaggcacatgccatcacatctgctaatttatttttgccatggggtctcactttgttgcctaggacggtcttgaactcctgggcctcaaacaatcctcttgtcttggcctcccaatgtattgggatcataggcatgagctactgaggccgtcccaagctatttaaaatactttcagaattactttatnaccaaaggcaaggcaatcttaggagattcttacaagtctacaaatttaaaagatcttggaagagtttccacagttttccagccttngagttcttgttctnagttccagattgtggggttcatgacc

SEQ ID NO: 644028 - DNA, 124 bp, Homo sapiens
aggagcagcttcctgagaggctgggactacaggtgcatgccacgatgtccagctatttttacaacatggtgattggtggtagagacaaggtcttactatgttgcccagactggtcttgaacttc

SEQ ID NO: 644029 - DNA, 251 bp, Homo sapiens
agtctgtgacattttaccaatgtaaacgatagcttatcttcacaggcatgggacagaaagtcatccctccgctcacctgagacaaatacttatctgattgttttctgatatgattgggctctgtgtccccacccaaatctcatcttgaattataatccccacgtgatgaaggaggggcctggagggagatgactggagcatggggcagatttctcccttgctgttctcatgatagtgagtgagttctcacg

SEQ ID NO: 644030 - DNA, 141 bp, Homo sapiens
ttcatgattccatcagtcgaggatggacctgtcatcttcatccttaccaagctgcccgtggtgagtgtgggcagagccaggatgggaaccactactctagacacgcagtgtcaaggcctggcctcctcaggaaggccctgg

SEQ ID NO: 644031 - DNA, 927 bp, Homo sapiens
agcggggggcagtgcccgccactcccactgagattgagagacgcggcgaaggaggccagcctgtgtgaggaactgtgaaaggataagagaactctccagatgtgcttccagtaatgtcgacacgttttggtatccccaggtgtctaccaagggaaactaaccaactggcttgccccgcgactagcgttccgaatgacctggaaggcgatcttactggaaggcagctgtgcttgaaagatatacataaccatctgctatcgaagcttaaacacgtgcacaggagtggctcttctacccttgtcgcatcacatcccatgctcttgacgacacagagaagtattactcagaaatatccaatgggcgatcactagaaaccgttgagtcgtccaacgccatcctagtggacgccgacatggttgggaaggcaaatcttcggttcattgacgattgtcttatctcgccacaggaaaaagatcccagcgtcggatgtatcgtaggaggagtgtttcgtgactaagatcgggacgcatctctgcggaaccgtgtgcaatttttccataatattgtagattccaggggaatagcgagtcgggaccataggactagactagtttggtcgacttgagggcaacctccgtgacccggtagaagacagacaaagctttaacaagattcgctcatgtctacggcttcttttgccgagacttgtgcgacatcaataccttattagaactcgagatcctctgttgaaagagtatacatcggaaaacctgcgcatttcagacccagggggataccatttccgaacgaagtttccagggtcactcgcgcatacaaaagctcgagccaagaacttccggaagggtttcgcgagacttccaagtttaattccccgtaaggtcgtgtcttgcaagggaagaaaacccc

SEQ ID NO: 644032 - DNA, 913 bp, Homo sapiens
  misc_feature (544)..(544): n is a, c, g, or t
  misc_feature (559)..(559): n is a, c, g, or t
  misc_feature (913)..(913): n is a, c, g, or t
ggtagttcggcggtcacgcggctgtgtcttattgcttcatgagtgtttgggtggaaaagatcagtggactctctttcagccttggagcgacctccgatgtatcctcatccgatatgtgtccatcgcgggaacctatcttcatcgggcagtctattgcttctgagacctgcatcagcgatttggtggttagcatccttcattgatgagcgaaccatgagctcactagattcttcagaattattccaccgtggtgctaggcgtccggtccatgagaccggggtcattattggtacctgtcatggtcctgcctacatcgtaccatcatacttcatggagttgtctacttataagtagactggtgactcgatgtgtgctcatggcaacggcgttgagccctcgttggcttgcgacagatgctcggccggaaggaagagatgctggcgaccgggctcaaagagacgctcgtcgctgcacagagtgacgaaaagaggtcaagagtatgcgcggtgtgctgtcgtcttctctcttgtcacaggggaaccanttcatacgatggggnccaaggctgacacgatgtgacccctgtgggagtacacatacacctcaagaagctgctcacctgtatatacagctttgaccatgtggacgccatggaaagacaaaacagccttgaaaccaaaggaccactatatatgagatcgttcagtgcccctgtggtttcttgccacgacaacggtacccccaacaatctcttgtgaactgtcctggagaactcacattccctagatgaaggacagtgacagcttattcacacgcaagatgaggtgaaccaaccatgaaacaaggcttccaagcagtgctgggtgggccaggaagagccttggcggctggggcagacgatatcgtccttcgn

SEQ ID NO: 644033 - DNA, 146 bp, Homo sapiens
tactggtttgcaggatactggttgcagcggtttgcagcggggtttgcagcggaatcgggggtatgctgttcgaattcataagaacaggtgaggttagaagcaggttcttggtgaggagggtcttggtgaggggggtcttggtgagg

SEQ ID NO: 644034 - DNA, 365 bp, Homo sapiens
ggtggagacgggggtctcatcggtggcccaggctgtagtggcaggggcgcgatctcggctcacggcaagctccgccccccggattcaagtgattcttctggcctcagtctcctgagtagctaggactacaggcacgtgccactacaccgggctaattttggtatctttagatacaaaatttagagacgggatttcaccatatgggccaggcgggtctcgaagtaccgacctcgggttctgcccgcctgggcctcccaattggctgggattacaggcatgagctacggcaccgggcgggttgtcttaatacacctcaaactgggtatatctgagatagagctccggagacccggtctccacagggt

SEQ ID NO: 644035 - DNA, 298 bp, Homo sapiens
tctaagattccccgtgtgtcatcctagtcagctatcacttggctcgctcactacacttacttgtcatggaagaatcagttcacctcatcccgccctgttccatcatgtctatggatcgcaagtcgatcagaactaacacgttcgcacggcgattctctcaaatcgacccgattgcctgcgcgtctgacacttgttcctattatttacatatcgtctctgtgcttgtaaaacccctgtgcggtacaggactaggaagcagataaggaaaatgattatgatggcgtgatcatgaaaggtg

SEQ ID NO: 644036 - DNA, 284 bp, Homo sapiens
cctcccggagccttaccctgtgaggcagaggttgagtgagctgagatcatgccactacactccagcctggcagcctgggcgacaagagcaaaactctgactcaaaaaaaaaaaaaaaccttctttaaacgaagttttgcccctttttttataacttggccccaaatttttttttccataaagggttttaaatgacccttggctctgatttaaaacccctttccggggggggggggcccatctctcttaaagggccaccaaaatgttgctctcgcttagaattac

SEQ ID NO: 644037 - DNA, 455 bp, Homo sapiens
gtatcagttttccagttaatgctacattgaatatcttagtacaacatatctcatgcatagtgctaatatttctgcaaggcagagtagccagaagtgaaatttctagatcagaactatgtgtattttaaatttgaatacgcactactaaactattctcctcctgaaaaggatgtccgcatatggattaccgtgtaccttctccaacactgggaatggatcagtcttttaattttaccagcgtggtagtgtcaatgttagtttagtcaacaataggtctgatttaattcaaaaaatctttttgaaatacaaatgctggctctacaccctatctctgcggccatgtgcattccacctgcgagaagctatgtgtcctcatgtttcgtgtctggtgctcagtagcactgcagaaccagcttgttctcttcctgtgtccttcacctactgtgggtcctgtg

SEQ ID NO: 644038 - DNA, 453 bp, Homo sapiens
ctccctcagccactttctccttagtgtgaataaaaaccaatgtgccatctctcccagggaattttgcacattaagccttttgctaattattcatcacagaatgagcatctccccgcacctcaccatcaagaaagttcaggttcaggtaatcaatgggtggggcatctttaacctttgcacttataattgccccacctgtctacttcctgagtgaattatgccaatggattatcactccatttggcatgtcatctgccaacttgccccacttaatttctagtaacacagaaatttttaggaagactagttaaggtctatattttttggaaatgttactactatatatgcttcttagaaatattagagtaattctgagcaatcttttagcttcaaggagattacggtatcttccacactatgttcagagctgtttgtcttacaagagttagtaaa

SEQ ID NO: 644039 - DNA, 102 bp, Homo sapiens
tctagagttatccccgtctctccactcgtccccgtgcgctgaggctacgtgggggaacaagatcggctatgccccacacttgtcccttgacagaggtgcact

SEQ ID NO: 644040 - DNA, 604 bp, Homo sapiens
  misc_feature (12)..(12): n is a, c, g, or t
  misc_feature (167)..(168): n is a, c, g, or t
  misc_feature (177)..(177): n is a, c, g, or t
  misc_feature (188)..(188): n is a, c, g, or t
  misc_feature (194)..(194): n is a, c, g, or t
  misc_feature (196)..(196): n is a, c, g, or t
  misc_feature (201)..(201): n is a, c, g, or t
  misc_feature (206)..(206): n is a, c, g, or t
  misc_feature (210)..(210): n is a, c, g, or t
  misc_feature (220)..(220): n is a, c, g, or t
  misc_feature (228)..(228): n is a, c, g, or t
  misc_feature (235)..(235): n is a, c, g, or t
  misc_feature (237)..(237): n is a, c, g, or t
  misc_feature (258)..(258): n is a, c, g, or t
  misc_feature (263)..(263): n is a, c, g, or t
  misc_feature (265)..(265): n is a, c, g, or t
  misc_feature (288)..(288): n is a, c, g, or t
  misc_feature (294)..(294): n is a, c, g, or t
  misc_feature (296)..(297): n is a, c, g, or t
  misc_feature (300)..(300): n is a, c, g, or t
  misc_feature (305)..(306): n is a, c, g, or t
  misc_feature (309)..(309): n is a, c, g, or t
  misc_feature (323)..(324): n is a, c, g, or t
  misc_feature (330)..(330): n is a, c, g, or t
  misc_feature (345)..(345): n is a, c, g, or t
  misc_feature (364)..(364): n is a, c, g, or t
  misc_feature (384)..(384): n is a, c, g, or t
  misc_feature (388)..(388): n is a, c, g, or t
  misc_feature (390)..(390): n is a, c, g, or t
  misc_feature (398)..(398): n is a, c, g, or t
  misc_feature (418)..(419): n is a, c, g, or t
  misc_feature (431)..(431): n is a, c, g, or t
  misc_feature (456)..(456): n is a, c, g, or t
  misc_feature (461)..(461): n is a, c, g, or t
  misc_feature (463)..(463): n is a, c, g, or t
  misc_feature (465)..(465): n is a, c, g, or t
  misc_feature (473)..(474): n is a, c, g, or t
  misc_feature (485)..(485): n is a, c, g, or t
  misc_feature (490)..(490): n is a, c, g, or t
  misc_feature (496)..(496): n is a, c, g, or t
  misc_feature (603)..(603): n is a, c, g, or t
tatatgcctcgngttacacagctgttgagtacataaagcaaagattcataaaaatttattagcaaaaacaattgtactaacaaagtttcacataaccttattggtttttaatgaatataattggccaaaattagataacacatgaatctgaacaatataattgaccnnactgagttnactacccggcncatcangntttcngttcncccnccagagacgntatcttcntcttaantnttcgtgacaccccccccaacnctggncntgctctaggccacactaaaagcnttttananngtnttggnngcngatgtgttatgggnnacattntgtgttcttggtggngtaaaacaagaaaacaaanctatttttaaacatagggtnggtngnttcgctgngtttcgaagcgctcttttgnnggggtgggatgntgtattgtggagcggggtggggtgnggtgngntnagacaagnntaaacaaaganggaanaatcanatgttgaggatgtggccaacgctatatccagaagtacatttgcgttaataagtatgctattatagaaaatataaagagaatataaatcaagtattcagtataaaaant

SEQ ID NO: 644041 - DNA, 315 bp, Homo sapiens
  misc_feature (66)..(66): n is a, c, g, or t
  misc_feature (94)..(94): n is a, c, g, or t
  misc_feature (105)..(105): n is a, c, g, or t
  misc_feature (124)..(124): n is a, c, g, or t
  misc_feature (209)..(209): n is a, c, g, or t
  misc_feature (233)..(233): n is a, c, g, or t
  misc_feature (311)..(311): n is a, c, g, or t
gtgttggcccgagttgattttctaaggcctctctccttggcttgcagaaggccattttctccctgnatcttcacacagtctttcctctctaggngtcatctgggnctaatctcctcttaatatnagggatctagtcaaatcagattgggcccatcctaatgggcttcattttaaggtaattatttctttaaaggtgctatgtccaaatngtcacattcttcagagagtagganttagaagtcacccatgaatttgggaaggaccaagattaagcccataccagaaatcatggtatactttattttcaatancaga

SEQ ID NO: 644042 - DNA, 124 bp, Homo sapiens
tcgtctctagaggtatccccgctcacgcccactacgcactcccagactgaggcatcgcgccttgctgatccccacagctcacaggtaagaggctgctccttcctctcctagcactggaatcagc

SEQ ID NO: 644043 - DNA, 434 bp, Homo sapiens
cctggctgctcatgtctggctgtgattgcaatatattagctggtattacaggtatgtgccaccacgcccggctgatttttgtatttttagtagagacggggtttcatcgtgttggccgggatggtcttgcaactcttgacctcaggcaatccgcctgccttggcctcccaaagtgctcagattacaggcaccatgcctggcctaaaagattagttttttcaagaaatggtacaagaagagttagacatcctttcctttttttcagttatttgagacagagctctggctctgtggcctgggctgtagtatattgccgtgatcatggctcgctgcggccttaacttcttgggctcaggtaatcctccctgcctcagcctccaaagtacttgggatggctggcttttgccatcttgccctggtaataggcttccatt

SEQ ID NO: 644044 - DNA, 1025 bp, Homo sapiens
  misc_feature (159)..(159): n is a, c, g, or t
agcggactccggagtgttggacgcgcctatgggactcacgtgatgaacctgctgccacgtgtcgtcaggcaagtgcgtgagggctgaagagcgagcgcagggtatcctcccgccggctgcgcggccctcgcggtcatggagctccagcccggtgactcnagtgtccccccgcggttcctaccgctcgtgcggctcgtgccagccaccgctgggcgcgctcacaggcatgagctgcgtcattggggcacagatgttgccgtccggcaaagcgggcccgagtggacgctgcagcgcgcccaggggatggacgcgggcgtccccaggaggcataccctgcttgaccgcctcgcgggggccgatcttcgcccgggaaacaccagccacgcgacaggctctcggctcggcaggttcaccccttaaaatgtgcagggcgtagggatcgcttgtgggccgtctatcgaggccgcgggtaagccgaccttggggcagcaaccgctattcgaggagaataaaacctttgtagagggtccctttccagacgttgaccggaagggggcggccccggctcaaaggggttccaatgcccatgagaacaaaccgcgtgtcggaaggggtaccgcccaggggtccttcgggctgccattcaagcgacccggggggggacgttggcgccatcgttgccggagcgctagaggtcgcggcctttcttgctgagttcgataggggcctccccttgcacgattctttgacaccttggtgacgcttcggccatttttgccattgccttcgcctcggttgcctttggttggacgaattggaaaaggaaaaagcaaagggtttaacgcaagaccggacattataccccatcaggttcccaccaagagggcccccttcctgccaggccttttccaacatggcatttgcccttccgcgaacgtgggtgcaaggcggagcaaataaggacaactatctgttccaacccgtaaattcgggggctccccgagatatcaaccagacgaaccccg

SEQ ID NO: 644045 - DNA, 198 bp, Homo sapiens
caatgcttatctggttatttaacttttcttttctctgcttgtcatgatgagagttacattttatttttacatttgctaagctgctcctgagtctgcttcttgaaatccttctatggggaaagctgtggggcagattccttaatgccgaccctttgggtacaactctttatcagggatggagctgaactgcttcatttc

SEQ ID NO: 644046 - DNA, 220 bp, Homo sapiens
accccctagtttagaagtttcaatagcatgacactgtcaatgtcggtgatgtggcaataatcatgtcaccctgtgagtcgtcgtatgttaatttagacatattttcctaatacctgctgtctaattgagttgcatcttcctgcgcatattggcaggaagccatctatggacagcatcgggatcatgaatgctttctatccagtatggtgtctacaggatg

SEQ ID NO: 644047 - DNA, 227 bp, Homo sapiens
cccccatggggattccaaagggcgggggtgtttaaccattttccctgcctttccaggatttccctttccctttatttcctcctccaggattggagtccacttcctccccaaagaaagtgctgttgctgccagtggggaaagcgagttgggatttccagggcactgacgtttcctccaacccttgtggcatgggggttcatccaggcagcttgagggagttaggcgca

SEQ ID NO: 644048 - DNA, 210 bp, Homo sapiens
tttttcttttttaaaaaaatgagaattgaagccttaccccggcagataagttttttcatgaacccgggggggaaatttttggaattaattgagccaaagggattaggcctttttcatctattttagttagccctttggttcgttaaaaccagtttccaaaacagggaaaactgggagctataaaccttttgggcccttaaagctctccca

SEQ ID NO: 644049 - DNA, 188 bp, Homo sapiens
tgtgtgcggtaagagggtgttcaggtgataggggcttccctatctgagacgggatagtgtcttcactgcccgtttctggggttctgggggcacgcagagcctcatgcatcacggagcatgaggctctgcccaaacactacacacaggattctgggggcacacaggtgtacccgaagtctcgaaattcg

SEQ ID NO: 644050 - DNA, 402 bp, Homo sapiens
tgcatagctgactcctgagggtaaaacgccggccagggagtcggagcaatgatcaaacctttttcctgagttaaaaataccgtcaaggaagtcctagcagtctactcacccgggggccggggcatgacaagaagatggagtccttgtcgcagctggagccttgcctagctggggatcacacagcctggcctgtacctgcaccccattggatgggggtacatgggggcagaaacaggaccacacccagttaaggccagaccaggctgagtgtgacccctgaggtaaacactccactaagctgtgtcttgttcatgccccctgctcagcgaaaggtgagtcccgagaccagttgggtacctttttatgcgaaccagagacatttctggatccaggccaggtgaa

SEQ ID NO: 644051 - DNA, 294 bp, Homo sapiens
ttaaaaggactaatttaattttcctcttcggggagagtatccaaaatgaaattagaaaacaagtatttttccttttggggggttttctgttccagaggttcgcaaaaggggttttacctattttttttttcaagcccccagcccaatttttttttttattttgggttcatggcttccaagttgtattttttgtttcagtcaaagggtaatattttaccagttattttcaaagcaagagaaaatatttggaactaaacatgaaaacataaatgttttgagcaaggctccttttca

SEQ ID NO: 644052 - DNA, 234 bp, Homo sapiens
ggcgtcctcaaggataagatgtgccgtcacttattccagctactcagcatagagcgagtaaagctttatgctgcttccctgcgagtatgcgtcctacggtaagagaggatgagagagcacctcacgttccaaagggagatgtacatcaaaaagctcatggatatcatcagtgtggagaaccccaagatgccttatgagatgaaggagatggcactggaggccattgtgcagctc

SEQ ID NO: 644053 - DNA, 216 bp, Homo sapiens
ttggggctccattcaggcaacaagagcaaaactccatctcaaaaaaaaaaaaacgaaaagaacctttattgggaaaattggggctccctatttctggaataaccccattggtagacaaacacggggataattgaccagcacccttcatatctcattaagggaaaaaaaggcggggtttatctccctcataaatacacataaacccctcaattacat

SEQ ID NO: 644054 - DNA, 576 bp, Homo sapiens
ggggtggggcggatgggctctggcaggaggccccacgtgcattcccgcgaggggctcgggggccgcagtggaaaagaatgggtagaaggagctgggacctggaatcccagcacctgaggacatcctgcggaccaggggcactgtgacaccatgctgagatgagtgcccaggatggtggatggctgatggaactggcacatgctgcagtgctgctacaatctggagctcctgaggcagctgtagggtaggggcaggatgctgtgcgtgcggtcagtggccagggcagcctcggagtcaaagcctggaatccagcagcagctacaactcagagactccatcgaccccagatgacgtcctcaacttccttgagcacctcctgcccacggggccggtcctccgtgtggggcccacagatgcctgtcgagggggacctccgtgatgtggccagatcgggggtggcctctctacccactgccagattgccagaaccaggagtcctgggccgaccgaggacccagtcaggaccctcgctgggcacctcaagcctgaaggaaccagagccctcaaggaggttgg

SEQ ID NO: 644055 - DNA, 167 bp, Homo sapiens
cctagagcgcaacgtggctagacgaaaaataactggcatctgctatttgaacaaggaaagtcaagcaagcagaaacactgtacactgagatctcactcgtgcacatgaaagggagtttggttctgtagattgatgaaaataaacccatctgatgcatgctgaagaaa

SEQ ID NO: 644056 - DNA, 108 bp, Homo sapiens
ttggacatccggaaggacctttacgccaacacggtattttcgggcgggtcaccaccatatacccagggaattgccacacagattgcagaggtgagatcaccgccttgg

SEQ ID NO: 644057 - DNA, 198 bp, Homo sapiens
ctcgatcagtgtgcatcagtgaaataacagaaaattcattcattcatggccttagcacagctttattattaagctatgagcatcctgtttgaggctagtttatactagcggtctatgtgcacatttgtgccgcaaataaaagaagtttactcacttccctctgtccccatgttctaactagaaggtgagcgttttttt

SEQ ID NO: 644058 - DNA, 845 bp, Homo sapiens
  misc_feature (1)..(1): n is a, c, g, or t
  misc_feature (260)..(260): n is a, c, g, or t
  misc_feature (275)..(275): n is a, c, g, or t
  misc_feature (324)..(324): n is a, c, g, or t
  misc_feature (341)..(341): n is a, c, g, or t
  misc_feature (355)..(355): n is a, c, g, or t
  misc_feature (362)..(362): n is a, c, g, or t
  misc_feature (377)..(377): n is a, c, g, or t
  misc_feature (380)..(381): n is a, c, g, or t
  misc_feature (383)..(383): n is a, c, g, or t
  misc_feature (388)..(388): n is a, c, g, or t
  misc_feature (391)..(392): n is a, c, g, or t
  misc_feature (399)..(399): n is a, c, g, or t
  misc_feature (401)..(402): n is a, c, g, or t
  misc_feature (409)..(409): n is a, c, g, or t
  misc_feature (416)..(416): n is a, c, g, or t
  misc_feature (424)..(424): n is a, c, g, or t
  misc_feature (429)..(429): n is a, c, g, or t
  misc_feature (433)..(433): n is a, c, g, or t
  misc_feature (436)..(436): n is a, c, g, or t
  misc_feature (491)..(492): n is a, c, g, or t
  misc_feature (519)..(519): n is a, c, g, or t
  misc_feature (542)..(542): n is a, c, g, or t
  misc_feature (551)..(551): n is a, c, g, or t
  misc_feature (575)..(575): n is a, c, g, or t
  misc_feature (578)..(578): n is a, c, g, or t
  misc_feature (584)..(584): n is a, c, g, or t
  misc_feature (592)..(592): n is a, c, g, or t
  misc_feature (604)..(604): n is a, c, g, or t
  misc_feature (628)..(628): n is a, c, g, or t
  misc_feature (655)..(655): n is a, c, g, or t
  misc_feature (663)..(664): n is a, c, g, or t
  misc_feature (670)..(670): n is a, c, g, or t
  misc_feature (676)..(676): n is a, c, g, or t
  misc_feature (679)..(679): n is a, c, g, or t
  misc_feature (690)..(690): n is a, c, g, or t
  misc_feature (733)..(733): n is a, c, g, or t
  misc_feature (757)..(757): n is a, c, g, or t
  misc_feature (762)..(762): n is a, c, g, or t
  misc_feature (773)..(773): n is a, c, g, or t
  misc_feature (782)..(783): n is a, c, g, or t
  misc_feature (833)..(833): n is a, c, g, or t
ngcataatccttgctcactctggacacacacacctaaaacagttaaaagtgattcctcaatttgcaataacaaagtaggaaaaaaagaatacgttctcaagctgtagttcaatttttctgtcctcttttccaaaaaatgttactttgctaccaagcctcccaccaatgataaggaaagacaatttttcaaaaagccaacaaaacccagaaaaaggaacaggtatcaattcaaaattatcacccagaacactgctgttgcnaagaaagagtatgangccaaattcccatagcttgttagagaagatctttaaaaataattcaganagttaggcctggccctnctgtcgtatagccnggttatnctgtcactatatgcntanncngtggnaanngcagatntnnttcaggngcattcngcttgggnatatnttangcnttctcctattccagcagaggaaataaaaacatgtgttcctggaattaatattaanntcatccttacaaacagaaggtagggcnaaggtaaagagagagaatgtggnacaaaagtngcaagacaagccattttgaatctnggntctaanacccaggnaagctgaatagnacttaaattcttctgagccagtancactaaattctagatttggcctgaaancagtggannaaaaanaccacnaanaaatatcaagngccccacagtgtttgtggtattaaaacatatatttatattatnaatttccattctgaaaagcagatnaaaangacactggacnaccagtcanntatggagtaatgggcttcctccaaagagaactgacttggcagaaatttanggttggtaggaa

SEQ ID NO: 644059 - DNA, 1243 bp, Homo sapiens
  misc_feature (1)..(1): n is a, c, g, or t
  misc_feature (789)..(789): n is a, c, g, or t
ntgatcaatagtacgttgcttagttgttgttgtgcttcttttatgattttggttttttttctctgcatttttttttctcacacatctttgacagccacgtgcttatgtcttggtttttttagcgttttgatgctggtgtcgctttcaactaattattaatttttcctccgtgttgtatctccgctccagcaccaccaaccacccttttggagacacctgtggaataaacatattgggggtactctcctctagtgaactgtctcttatccccccatggggcgtcctttattttgtcgcgcgtgtttgctcccccccacaggggaattttgtccgacaagcatacagtggtgacaaccggtcgctcaaactttatcttgctgcgcgcccattggtataaaaaagggtaaccattcttgatctggagataatcctggattgttggttaggaaaacccacgactttgttatattacccggcctttgtgtcttaccaggtttgccccagagtcagtattaaaggtggctcaccaagcttctgagaaccaccggattttcactcttgaatctatcgtgcacccctttattaccccagtgtgcttaacacaggaatcacttgatgtaaacgttatcgcccttatagttcgataataactttgttgggaaatggagcaccagtaagctcgccccacttttgctttagaggacgccaggctcttgagaacttatagcaccatttaaaggaggatagccccaatatagaccaccaagaccctgcccaaagaatggaacntccaaagaggccagccgaatcgtgtatctttccaccccaaggggagaagaatgcaccacttattaatggcgtcacaagagaaagatgaagatccacatgccttttgctgtctttgggatccaagaccccgaaaagaaaattatttgagataccacagtggaggcctggagagaatgcacatttgtttggaaggttttcttgtcttcacacctggtcttcttgacacagccctcttgagctgagaatgtaatccctgcttggccacctatgcacgcacagcatcataattatgacggactggctgcaccctttcctgagaagccacgagcttccacctgatggaagagctgaaaacacccagcccacggaggtgcagagcacctgccctaaattgcttcctgagaattcccatattaataaagaagaaaattatctgcccttttttcctactata

SEQ ID NO: 644060 - DNA, 659 bp, Homo sapiens
ggaaggccgacgtgcagaagggttccagtgtgagtagctataatgaacagcgatagtatcatcctgtctagaatactagtatatcgctcaacctcgatatccaccctactatgcctagcaggaataagtatatcgcgtgtatcagttggataggctacgtcgtctataaccctcgaagcgagcgcccactccctcgttagccgaagtgattgtgccttattgccattacttgggtcgttggccgccctgcgaaggcgagcggggggcctagtccctactagtctcaaggctccgaacacatatggcctagacctacgtacataagcgtaaacctacctccaatgcataaaaactagtcggtcccaaccaataatattactacccactgacattgacttgccggggaacagcatcaatttgaatcaggcacaaccacccacagcctaattattatgcatcggtccccctactattgatattaaccaaatcaacaatctaacctatgacagcggtagcccccaaaccttttcctccgaagcccctaacaaaccccctcgtaatatctaactaccgtgagtgcctaccctcacaatcagtgggccgccaaccgccacttggtcctgtgaaccactatcggcgaaaaaaacctggctttctag

SEQ ID NO: 644061 - DNA, 697 bp, Homo sapiens
  misc_feature (48)..(51): n is a, c, g, or t
  misc_feature (54)..(54): n is a, c, g, or t
  misc_feature (58)..(58): n is a, c, g, or t
  misc_feature (64)..(64): n is a, c, g, or t
  misc_feature (70)..(70): n is a, c, g, or t
  misc_feature (84)..(84): n is a, c, g, or t
  misc_feature (127)..(127): n is a, c, g, or t
  misc_feature (129)..(129): n is a, c, g, or t
  misc_feature (131)..(131): n is a, c, g, or t
  misc_feature (134)..(136): n is a, c, g, or t
  misc_feature (149)..(149): n is a, c, g, or t
  misc_feature (158)..(158): n is a, c, g, or t
  misc_feature (178)..(178): n is a, c, g, or t
  misc_feature (272)..(272): n is a, c, g, or t
  misc_feature (282)..(288): n is a, c, g, or t
  misc_feature (452)..(452): n is a, c, g, or t
  misc_feature (480)..(480): n is a, c, g, or t
  misc_feature (490)..(490): n is a, c, g, or t
  misc_feature (511)..(511): n is a, c, g, or t
  misc_feature (514)..(514): n is a, c, g, or t
  misc_feature (535)..(535): n is a, c, g, or t
  misc_feature (537)..(539): n is a, c, g, or t
  misc_feature (545)..(545): n is a, c, g, or t
  misc_feature (549)..(549): n is a, c, g, or t
  misc_feature (560)..(560): n is a, c, g, or t
  misc_feature (566)..(567): n is a, c, g, or t
  misc_feature (572)..(572): n is a, c, g, or t
  misc_feature (575)..(575): n is a, c, g, or t
  misc_feature (578)..(578): n is a, c, g, or t
  misc_feature (583)..(583): n is a, c, g, or t
  misc_feature (585)..(585): n is a, c, g, or t
  misc_feature (587)..(587): n is a, c, g, or t
  misc_feature (596)..(596): n is a, c, g, or t
  misc_feature (608)..(608): n is a, c, g, or t
  misc_feature (625)..(625): n is a, c, g, or t
  misc_feature (632)..(633): n is a, c, g, or t
  misc_feature (640)..(640): n is a, c, g, or t
  misc_feature (650)..(650): n is a, c, g, or t
  misc_feature (658)..(658): n is a, c, g, or t
  misc_feature (670)..(670): n is a, c, g, or t
atgagagagagacatagcggtgggggagaggagagcagggagggactnnnngcnagcnattggntgtatnttttgaatatgacnaaaaataatgagcaaaactactctggataaatctcttctagananantannngaccctgatgcangaactccanaagataaaatgaggttgttncttatctattatataagcacacagcaagcaccttctgaggctgatttggagcaatataaaaaagctttaactgatgcaggatgcaaccttaatncttacaatannnnnnncagtggaaggcttttaccaagatggcctcagctccggccagctatggcagcactaccactaaaccaatgggtcttttatcacgagtcatgaatacaggatcacagtttgtgatggaaggagtgaagaacctggttttgaaacagcaaaatctacctgttactcntattttggacaatcttatggagatgaanccaaaccccnaaactgatgactatagatatnttngatcccaaaatgctgcggggnannngacagntcanttcccaaaatnaaaatnncattncangangccantngnttttgtggngggaggaggcanctacattgaatatcagnatcttgnngactacntaaggggganaaaggganacacattttatntgggtgcagggagctttttatgctacc

SEQ ID NO: 644062 - DNA, 1569 bp, Homo sapiens
atgaaagcaacaacacctttgcagacagtcgaccggcccaaggactggtacaagacgatgtttaagcaaattcacatggtgcacaagccggatgatgacacagacatgtataatactcctacacctcacatgaaatatacatacaatgcaggtctgtacaacccaccctacagtgctcagtcacaccctgctgcaaagacccaaacctacagacctctttccaaaagccactccgacaacagccccaatgcctttaaggatgcgtcctccccagtgcctcccccacatgttccacctccagtcccgccgcttcgaccaagagatcggtcttcaacagaaaagcatgactgggatcctccagacagaaaagtggacacaagaaatttcgggtctgagccaaggagtatttttgaatacgaggacagaaaagtggacacgagaaaatttcgatcggagccacggtctatttttgaatacgagcctgggaagtcatccatcctgcagcacgaacgacccgtctaccagtcttccatagacagaagcttggaaagacccagcagctctgcaagcatggcgggtgactttagaaaacggaggaagagtgaacctgcagtgggcccgcccaggggcttgggggatcacagttcaagcaggaccagccccggccgggcagacctcccaggatcaagttccacctttaccacgtctttcattagttcttctccttcctctccctcgagagcacaaggtggggatgatagcaaaatgtgtccgcccctttgcagttactcggggctcaatggctcgccctctagtgagttagagtgctgcggcgcttatagaaggcacttggacgtcccccaggactctcaaagggccatcactttcaagaacggctggcaaatggcccggcaaaatgcagagatctggagtagcactgaagaggcggtttcccccaaaatcaaatcacgaagctgtgacgatctcctgaatgatgactgcggcagcttcccagaccctaaaaccaagtcagaaagcatgggttctctgttatgtgacgaaggctccaaagagagcgaccccatgacgtggacttccccctacatcccggaagtgtgcgggaacagcagagaattcatgttaagcaaatggatattcgtggaatctctggatggaggaccattttggaaagtgctaaaggaatatctagagcgagtgaggaatctatgagaaagatgtaaagtgcaagacgtaaattttttggttgaggagatgatcactgatttaaatgtataacagagtagatgccccccccctcaaaaacgcataaccccccccttaccctgacatttagctttgaatatgcacaaaatagtttgtggggagaatagaaccctatgtctgaaagtatatgtgttgggatttcatcccatatatggtggtagccgccaactcagagataggtcgttctgtaagattctcacaacaaaatgtataacacaaacattcctgagtcaaaatgtacaacacaaggtcacgaaaccgcaagcagggcgccgtgataagtcc

SEQ ID NO: 644063 - DNA, 192 bp, Homo sapiens
tgaaaacagtatcatcccattcattttgtaaattaacttctattattgattttttatgccttaaaacaagtttatttatattaatgtctttgcaagccacaacttgtcgttaacgcacttttttcgctgttaataatcattttcttttgtgcaactgtcgcgtgtcatggaatgaaaagtaattaaattttt

SEQ ID NO: 644064 - DNA, 339 bp, Homo sapiens
  misc_feature (23)..(23): n is a, c, g, or t
  misc_feature (76)..(76): n is a, c, g, or t
  misc_feature (110)..(110): n is a, c, g, or t
  misc_feature (339)..(339): n is a, c, g, or t
gtatgttacgcatagcttttctnttcccagaaaccctaggactccaggcaaatcactcgtactccataagcttctncctttctgcctttctgctctctccaaaggatatnaagtactaaagccttaccaggaggttacaagcctctctgggatcaatacatatccaagtgtcttgaaagcacacctcttgggtattgtcttggtggtcgtagtggcttctgttgctggggctatctgagagaggtctgagaaggtcagactgctttgagcacagaaacccacagaagcaggatccaggagcaatgcctccggctctctgtcatctcccatgcaaatcan

SEQ ID NO: 644065 - DNA, 232 bp, Homo sapiens
tgatacaatcgagctcggtacctcgataggcaaggcaggaggattgtgaggctaggagtttgagaccagcctgggcaacatagcaagatccccatctctatatttaaaaaaaaaggacaaaatatagctatcctaagtgggtgtaaagtggtagctcattgtggttttgctttgcattacccacatggcttatgttgagcatcttttcatgtgcttattggcccttatcgag

SEQ ID NO: 644066 - DNA, 489 bp, Homo sapiens
ttcatctcacatgtgctgtgtgtaaagttgggggagctaaggtatatgcctacctatggctcttccaatgctagtttctacatttcccatgtatgtgatcccacatgggtagatactgtgcttgacaattttttgaagtaaattgaagaaataaggtgttcagatacattcaagtctggtcatgatgctttacctttccaagatgtcgccatgctccatacgtctaatgaaaccataatcgagactgagttaaaacataaacagaaggagctttcaaagcagcaagatgctatgaaaatgataataatgataaataacatggttcataaagtgtgatacttcgttaattgtagggaaaacccattcctaatgtaagtattaggtaactgtcaaaaaacagcattgccatatcagggcattagatacgctgtcattttaggttttgatactgctttacaagaaaaagtgaactaaagccagtacacaaga

SEQ ID NO: 644067 - DNA, 647 bp, Homo sapiens
  misc_feature (233)..(233): n is a, c, g, or t
  misc_feature (647)..(647): n is a, c, g, or t
tatgaaaccactgttgcgttcacagtaaaatcggggtgcctaattgctactggaatgtgcgatagctttgatataggggctcctatagttctgttatatcaagtagttatgcgcatatcatctgtctgagcttatagctaacgctctaaagtgagagctctccagtaggtgcaggtatctgaaaatgcgcagagtgggttagcctacgtgcctctcaagtctatcagcgacgnagctcatttcgggccaacgcgatcgatgcttaatgtctggaggggctttcaccaagtatcctcacaacccctaaaatctgtcgcgcactgaaacactttctggggggccaaaaaaacaaaaaaccgggaaacttcttcccttctttgagccccctatatagggttcccacaggacaccaaatattataactttataacaacaaaccaaaaacttaggatgctcgggcgacttttacttgggccgtctcaccacaacacttaatctctgtcttttgggaccatttcaaaaattctcaccaaaacaaacttatagttatggacaacaaaccggccccatatatctttaaataaaccgcccaaccaacgcaaagcaaagcaaaagtttaaccacaacatctttgggcaacccccaan

SEQ ID NO: 644068 - DNA, 706 bp, Homo sapiens
acccagtggatcctgcaccagagctgcaggtggagctacctgccagtcccacgccctgtgcccacactcctcagcccttggctggttgatgggactgggcgctgtggagcagggggcggcgctcggggaggctcaggccgcacaggagcccacggagttcggggaggctcaggcatggcgggctgcaggtcctgagccctgccctgtgggaaggcagctaaggccctgtgagaaattgagcacagcagctgctggcccgggtgctaaaagcccctcactgctccggcggtggggccagctggctgctccgagcgcagggtccgctgagcccacgcccacccggaactcgcactggcctgcaagcactgtgcgcagccccggttcccgcccatgcctctccctccacacctctccacacctccccgcaagctgagggagccggctccgccttggccagccgagaaaggggctcccacagtgcagcggcgggctgaagggctcctcaagtgccgccaaagtggaagcccaggcacgaggaggtgctgagagtgagtgaggggtgtgagggctgccagtgcgctgtcacctctcactaatttccccttagtttatttttcgtttaccatggagttcgctcttgttgcccagctggagtgccagggcgaaatcttggctcactgaactccactctaggtcaccatctctc

SEQ ID NO: 644069 - DNA, 639 bp, Homo sapiens
  misc_feature (30)..(30): n is a, c, g, or t
  misc_feature (69)..(69): n is a, c, g, or t
  misc_feature (71)..(71): n is a, c, g, or t
  misc_feature (91)..(91): n is a, c, g, or t
  misc_feature (104)..(104): n is a, c, g, or t
  misc_feature (108)..(108): n is a, c, g, or t
  misc_feature (121)..(121): n is a, c, g, or t
  misc_feature (182)..(182): n is a, c, g, or t
  misc_feature (234)..(234): n is a, c, g, or t
  misc_feature (259)..(259): n is a, c, g, or t
  misc_feature (262)..(262): n is a, c, g, or t
  misc_feature (268)..(268): n is a, c, g, or t
  misc_feature (277)..(277): n is a, c, g, or t
  misc_feature (280)..(280): n is a, c, g, or t
  misc_feature (285)..(285): n is a, c, g, or t
  misc_feature (304)..(304): n is a, c, g, or t
  misc_feature (332)..(332): n is a, c, g, or t
  misc_feature (378)..(378): n is a, c, g, or t
  misc_feature (389)..(389): n is a, c, g, or t
  misc_feature (399)..(399): n is a, c, g, or t
  misc_feature (401)..(401): n is a, c, g, or t
  misc_feature (512)..(512): n is a, c, g, or t
  misc_feature (550)..(550): n is a, c, g, or t
  misc_feature (555)..(555): n is a, c, g, or t
  misc_feature (562)..(562): n is a, c, g, or t
  misc_feature (577)..(577): n is a, c, g, or t
  misc_feature (579)..(579): n is a, c, g, or t
  misc_feature (614)..(614): n is a, c, g, or t
cgggccgcgcggcgcatttccgcctctggnaatggctcgtctgtagtgcacgccgcgggcccaactgcnancccggccccgcccccgggancccggccaaggangaantgttccccctcancttcccggcaaaaccaacccaagcctctggccctatgtggaaaaaattgaacaacccaaanaacggggcatgcgcttccgctaaaaatgcgaagggcgctccgcgggcaacancccaagcgaaaagagcaaaaaaaanaanaaaaancaacccaanaanaaaanaaataggctaaaaaagaanaaggaaaatgcgcatctccctggtcaanaaagaacctcctcaacggcctcaaccccaagaacttgtaggaaaanaatgccggganggcttctaanangctgaactctgcccggaacgctgcatccaaaattcctaaaaaaaaaaagcgtggggactaaaaactgaatagctgtgcggctctgcttccaagtgaaaatgcgggacccancaagcaagcccctccgcctgccgcctgtcctttctcancccanctttganaaacgtgcccccaanantgccgagctcaaaatctgccgagtgaaacgaaaanctggcaactgcctcggtggggatga

SEQ ID NO: 644070 - DNA, 158 bp, Homo sapiens
  misc_feature (84)..(84): n is a, c, g, or t
ccaggtagccttaatgccccaggaacacttactattctcagagtgatgttgtatcaaaaacagtctgcatttttacggttctgnggagtaaagtttgaataccgtgtattcaggttcacgttctaactacagtttcaaagagctgcatccaaatctac

SEQ ID NO: 644071 - DNA, 501 bp, Homo sapiens
gtcgaagggatccttggtcttcagtccttggcaggcagcgtggagcagaactttggtgcaacgcctcctgaagcagaagcaaagctggccaactcatcatcatggtcactttgctcagcactggcattctggctgtcacgttgcttcagcaggtgatatggtggtcggtggaagggcaggctcttgtgcttttcctgaaggccattcctggggctttctgccagggtgctgcaggtctcacgagtaatgtcaggtgctgtgggccaaacctgactgtcaggagtcgaggcctccctgggtcaaggctgcctccaggagggagggggtattatgccgatctccatccccagggcctccatcaagcccgagctgggggccgagctcgggccctggccggggccgtggggacagcaggtgcagtgccgaggcggctgaagccatactgtctggctcaaggccctctggtgcagaggagccaaaaccacgggacagggcctcaga

SEQ ID NO: 644072 - DNA, 169 bp, Homo sapiens
gcgtgagcggggaggggaggctagggagaggttaattaccagataccaatattacacgcaatatacggaggcatcaacttcttgcttctactgtttgtatagctgctatgtgcttgtatacacgcttaacagataatttatgtgtatattctttctcaaaagcttataa

SEQ ID NO: 644073 - DNA, 471 bp, Homo sapiens
gccccgtgtctcccgttgccaccgttcagcccatgtggattcagcgagggtttttagtgtttgtgcctgtgtccccgtgcgccttttcctggtgaggctgggcgcctggcatgtctgaacactcacattccccaggcatgcatgtccagccgtcgacgccacccatgtactgtggcgctggcccctcctgtaacagctgtggtcttgggctctcgtgttggtggcagatgtcccatttcccagttactttctgttgtccaaaagtttaactgtcctgccagccaaagctgctgagcattactctgatagaccatcagtccttggtaagtgtcctgtgcatctgggataagcatccgtttgttttcagctgcgctttctgtgacttgctctgcggtgagtcctccggtccacgtggggccgttgcgctggttcccagcctgtccgagacactcattgcgacacggtctctca

SEQ ID NO: 644074 - DNA, 248 bp, Homo sapiens
ctgctgtgaacgtaggaggaagagtacaggtggaaaaggagggaggctatctaaggctacgtgcagcgacagttcccaaggactctgatattgtctctcacagcttgtgaagcctgagacagcagtcttgtgaggggacagagattgaggatttattcacgcctccccttatgtgacttcaagaagccgctaggcatactctaatctggcaaaaggccccttgaatagtgactagcgatccctatata

SEQ ID NO: 644075 - DNA, 1364 bp, Homo sapiens
gatgactcacgtgtatctatgggaatacggctacgttgcatctcttatgggtcccaagcagcgccctagcctccctggctatgacccttgatgaagcagtgctggtggaaagcatatctgagggtcctggacttccccaagtgcctccacggggtaacccttctcagccagtctcaggactcttggacttgggacctagatactcacggatgctgcttcaaggaaggactgtagcatagccgtcgcttctagctgtgaccctacaccaacaatgacagccacacgcaggagccctctgcccagcacgggttgaggaggtcctccggcagctgcagatgcctggcaccaaaagggcgtgaagcgtccgcatcgctgtgatgcaacgcccagctgggccccagaccacatggcggacctgcaggctctgctgcagacgcggtgcccaggtccgcgtggtggacatgcagaagctgacccatggcgtcctgcatagccaagttctgggtggatggaccagacccacttctacctgggcagtgccaaccatggactggcgttcactgacccagtgtcaacggagctgggcgtggtcatgtacaactgcgagctgcctggctcgagacctgagcaagatctttgaggctacggttctgggccaggaggagtccatcccatcaacttggccccggttctatgacacccgctacaaccaagagacaccaatggagatctgcctcaatggaacccctgctctggcctacctggcgagtgcgcccccacccctgtgtccaagtggccgcactccagacctgaaggctctactcaacgtggtggacagttgcccggagtttcatctactgtcgctgtcatgaactacctgcccactctggagttctcccaccctcacaggttctggccggccattgacgatgggctgcggcgggccacctactatgcgtggcgtccaggtgcgcctgttcatctagctgctggggactactcggagccagtccatgcgggccgttcctgctctctctggtctgtccctgcgtgacaaccatagcccagctcgtgacatccaggtgacatagtctttgtggtccccgccggagtgacggcccaggctcggactcccatatgcccgtgtctaaccacgaacaacgtacatggtgactgaacgcgccagctacatcggagtcctccaaggtggtctggcaactatcgttcacggagacggcgggcacctcgctgctggtggcgctgaatgggagggggggcctgcgggagcccgctggaggccattttgctgagggactggggctccccctttgggcctggcctttcacctcgtgtccgctgggcag

SEQ ID NO: 644076 - DNA, 106 bp, Homo sapiens
aggctccagttaacgatatatggaggtcacgcacggtgctcacgtagtcgacggaacttgtaccagggaggcatagcaccgcattagtaaatacacgtacgaccag

SEQ ID NO: 644077 - DNA, 260 bp, Homo sapiens
tacattcctgcattggccttagctgatcaccactttcttcgaggtctgcaccttgaccgagagaggagcagcgaattccctgtcctccctcaccctgcgtcctgagccatctcccaactcctcaaagcccctggagaccatgcttcaaccagacgcaggccattctcccccatttccattctgaaaccactcactccaggcctttcttcaccttggagtcttggcccaataaaaacttttctcttctttaaatctttaaa

SEQ ID NO: 644078 - DNA, 501 bp, Homo sapiens
  misc_feature (144)..(144): n is a, c, g, or t
tctggaagcaggacctgtttccctgggaaaccacacccatgacacctgcaagactttggggaagatcgctgggcacagttctgcactaaagctggaccagaaagtgtttcctcagctgtatacttttgggatgaattaatgagntcaacagctcttgacatctgttttttagctgactctgctaggcattttcacatttgctttctcactcaatccttaccacaatcctttgaagcaggcattattatacccattttgcagactgggaaactgagtgtcacaatgcttaagtgacttccccaggtcacctggcttatacatggtaactcagcatttgaatccaaaattatatgatttcacatcccttcctttccctacagtgcttcatttggagaagtgttggttttctgttctggaatatggatttgcctgggtggcgttgcgagtggaaggtagggaaaggcctcctggatttctattaagagaaggtggctaggctca

SEQ ID NO: 644079 - DNA, 116 bp, Homo sapiens
gctgcggtcgcctctagacggactccccaaatctcattgcgtcagtaagcggagcatcagtaagcgggcagatctatgccacctcctcgcctccctactgacgcaatgagagattt

SEQ ID NO: 644080 - DNA, 402 bp, Homo sapiens
  misc_feature (12)..(13): n is a, c, g, or t
  misc_feature (25)..(25): n is a, c, g, or t
  misc_feature (148)..(148): n is a, c, g, or t
  misc_feature (186)..(186): n is a, c, g, or t
  misc_feature (209)..(209): n is a, c, g, or t
  misc_feature (264)..(264): n is a, c, g, or t
  misc_feature (277)..(277): n is a, c, g, or t
acagcccgccgnnaaacggcttctngcccacggacatcaatgactcaccctttgggactctgcctggctctgctgagcccccgctcactgcagtgcggcccgagggctccgagccaccagggttccccacctcgggccctcgccggancagggctgttcacgcaagaaccgcacccgcagccactnccgtctgggccaggcaggcagcnggggtggcgggactggtgactcagaaggctcaggtgccctacccagcctcacctncagcctcaccccnctgggcctggcgctggtgctgtggacagtgcttgggccctgcttgacccccagcggacacaagagcgtgcttcagcagccaggtgtgtgtaacatacggggtctgttttcacgccgttcaagcca

SEQ ID NO: 644081 - DNA, 477 bp, Homo sapiens
ctacctcttctccttacgtcccatcctggggccctttcagtgactcctgatggcagtggctgtactcattgtcctggcttccccttgagactggggatgaggaaaatcaaacagcaaagaccatatcctgggtgtcctgagtgtttacagcaggccatgtactagggattaacataaaaacaacaataacaaatctcatgaaaatttcacaaatggaagtgaaacaatatcacctctattatacagatgtgaaaagagagggccgatgaggtctagcaacttgccctaaatcatatacctagccagagcagatggagaggcaggattcaaacccagaattccttttttctttttttttcatcagaaaggcaagtcatccagaattagattttattttaggaaccaagtaagggttcctgggagaaaaaaacaaagccttggtgtagagaaggttggttcattttctatagcattact

SEQ ID NO: 644082 - DNA, 224 bp, Homo sapiens
tttccggggggatttaggggtaaacaattttttgaagccccaggcttccccggacttcacgtcattattggctcaactttcctccctatttgtttcatcccccaaaaaatatttccctttacatccaaacatccctttggttttaaaacccccccctgaaacgggcattttgtaaatggggtttgactatttttgtatgttcccctttattgatgagggtttta

SEQ ID NO: 644083 - DNA, 252 bp, Homo sapiens
gcttggttaaggattctattgtgcgacgaggccgtatcagagaggcatctcacccttaagtaccccatcgagcacggcatcgatcagcaacatgggacgacatggagtcaatctggcaacagaccttctacaatgcagctgcgtgatggctcccgaggagccgcccgtgatgctaaccgaggcccgcgctgaaccgatgaggccaagcgcaagacgatgagccaggtaagtgggccagctaggcacttctgg

SEQ ID NO: 644084 - DNA, 304 bp, Homo sapiens
tccccagaaaagggtgcaggaggagccatcatagctcactgcagccttgaactcttgcgctcaagagattctcttgcctcctgaatggctaggactacaagtgtgcgtcaccactcatggctaatttttaattttttttttccaagatggagtcttgctatgttgcccaggctgatctcaaactcctggcctgaagtgatcctccctcctcagcctttcaatgctttgggatttacagccatgagactcagaccctcctgcctcacagctttatctttgtatttgccccttactttatcttgcg

SEQ ID NO: 644085 - DNA, 1102 bp, Homo sapiens
ctcgtagtcagtgcggctggctgcaggcggcaggcggcggcatagcgcacagcgcgccttagcagcagcagcagcagcagcagcatcggaggtacccccgtccgtcgcatgcccccgcgctggtgcagccacccttcgcgtccctctgctcttcctccacttcgcgtcgcaccagtggctcgatcagccttgaccgagagaaccagatttgcatgaagttcaacggaatgcctttctccctactttgactaccggcatggcgactggcaccgatcaccaatccaaacggacacttgcgaacctgtcactgatgtgtcagctggggttcagaaagccgcaaccaacgacagcgtgaacgttctcgcacgcggactcattgacgtcgagactgacaaccgtcgcgatgtgctgttgacttgggttaaattagcgcaaactcgactctcggacttgtcccccgcgggaaaatttgctcgcgcgaaccggttactggaagtggggccttacgggaagataccgcgtcgcacagaggcagttaccacgggaattagggttgcaccacgcactggcaacacgcttcccgttggcagtggcattttccctggaaaggtctcgcttcctgggacccatcactggggcatctgagccaacagtggggcttttaattcactccaccggttgtcaacggtcaccgtaaaagcgtaaccggtatcaaacaggttcgacttggaacccaacggaagccttttatagcgggtatggacgctccacgcagccgttacgccgagtgaacccttgcacagctgccacgcgctgtttgcagcacctttgcgcgcagcatgtcgggaacctccccaagtgatgtgcagccctgcgcccacgggacttttacactttcggggcagtttgacgccaacggaacctggtgaaccgccgaaaggctgctccctcctgctgtatcacccttggccctgcccgcgtgaacacgtttgtccctgcatctagacctagtcgtgcattttcgcaactcggctgcaccgttgggcccctcactgaaccatcttgggacacactgcgaacacccccttgagacgcctgctcg

SEQ ID NO: 644086 - DNA, 707 bp, Homo sapiens
  misc_feature (536)..(538): n is a, c, g, or t
cgagcgcaactttcagcgtcttttctgcggcttccttctatcccgctccgaggctgcagggccctggcagagtggcgcactggaaggtggccagagccggattttgttgcactccgggcaggaagatggccgaggcggcggctgacggagatagtagtgccttgctgaagtcacggcggccggcggcgccctcctggaggctgacgggacggaggcagggaacttcccggtgagccagccgggcctagcaggagccttcggcggctgcccaaagccgtggggacggctggctgactcagccgctctctggacggagttgctgggtccccacaagcctgcccgtgcagctgaagtggcaggttagagttgtggtactcaaacttaagtccaagcaaacaggaggagcaccggcgcgggttcagtctttccaaacccagttcagccgtaatctctggagtcagacttcgccgcccaattcatggatttgtgcttttgactccgctctgatgtttttgaatgaataaagttgcctaggnnncttaagtatagttgcagagcgtcttttcggccctgaaaagagggaaagtttccattgaaaaagttctttatcacatattggcaaacccaaagtatgccaatttgcaacgtgttgacattttcattgaaatatctacaataaaggcaaagattccttgtttcagtgaaaa

SEQ ID NO: 644087 - DNA, 123 bp, Homo sapiens
aagatgtcggagagggagaggatgttagagggaggggatgtcggagagggagacggatgtcggagagggagaggatgtcggagggggagaggcatgtcggagacgggcgcggatgtcggacga

SEQ ID NO: 644088 - DNA, 291 bp, Homo sapiens
cgtgattcttttgccaatagtgaataggactacaatgcatttccgtcagagatcactgggtggaatgagattggatgagagatccttgggaagccaaacggagcggacgtctggatcatgtcccatccagtccagtgaatccacgatccgcagacctgcccctcgcgcgcaacagcttataccatggaatgaggaccaggtgatactctgagcggtggactgaactggcagacacaacctgtacagattgaaatttcaccttgtcaaggaggaagtgattgttaccccgct

SEQ ID NO: 644089 - DNA, 150 bp, Homo sapiens
cggaaggaaggaatggaatggaatggaatggaatggaatggaatcacccgactgcaggagaatggaatggaagggaatgcaaaggaatggattcaactcgaatggaatggaaagaatggtatcaacacgatgtggaatggcatggattgg

SEQ ID NO: 644090 - DNA, 151 bp, Homo sapiens
tccagctggccccaaggttgccaatgagtatggttatgtggcattccatacatccctaaaaagggtggacatggccaaatttatgaaatttatgaaattgggcatgctgtgtggcctcttccgggagggaggcctggggggccagctggag

SEQ ID NO: 644091 - DNA, 1266 bp, Homo sapiens
cccacgcgtctgggagggtgccctggcagatgtggtgggagagagatggctcatgagtgcttggacctgcctgtggagtggtgcccagcagactgtggtatgagagggatggctcacgaggcttggacctggtggagtgtgtgccctggcagacgtgtgagagggactggttcacaaaggcttggacctgccatggatgggtgcccagcagactgtggtgtgacgagggacatgctcacgaggcttggacctgctgtggagggtgcccagcagggggctgatgctctgaggggtgggtgctcatgttgcactggtgtgcccccagtgtcctctgatcctgtcctggtgccatcccccaaaccccatacccatgcagaactcccaggtcacatgcacgtatgtccatgggcatggtgggtggcgtgaagaggcctggtcagggcctttaggggctgcaggacggaatggccgctggggagcctgtgtggctgtgccgggcagccatcctgcattccacccagtgcgcagtctccactcgtgcccagaaagcgctaagcagccggaggagacagcagggggcttcctgaaggatgtgcgatggtggactccgggtcgacggaataccgcaggttcttgtcctccgggagactagaggaaggtgacaccaaggagcttcatgacctgggacttatgactgggggtcaagtagctgaattgcggctagaagggtggggttagccaccctgaggagtaatccgcggatgtgacacggtagcgaaaggaagacatgaaggaggcattaagctacaggagtagagagaatagtcaggggccacagtacttcttcacagatcaacactatataataacatcagcatcttactccacgtttcgacgcgccagcaacgatacaagaagacacgagacacagcacgaagtgaggaagaagtagacggagcatcagagcagataagagcatcccaaactaagcacaataagataagctacataaagagatagacagagggggaggcggatggcgcgaggcgagagcgccacgacccgcgcaggggcagggcgcggcgccgggggagaaccggcggcggcacagtgagtagggacaggtcggggcgagcggcagagggagggacggaggcagccgcggcaggaggagagagtcgggacgtcagagagggagagcgcgcaggcgcacgggagggaaggaaccgggggggcgcgggcagccggacgagggggggggcacgg

SEQ ID NO: 644092 - DNA, 1202 bp, Homo sapiens
agaaaaagttgatgccacagccaaagttgaggcactaggaggaaggcaactattcatttccctgcctcggagcctcccaggaaatcacggggccaactgcagattgtttcaaattcttcatctcactgcaacctctgcctcctgggttcaagtgattctcctgcctcagcctcccaagcagctgagattacaggcgctcaccactacacctggctaatttttgtatttttagtagagatggagtttcaccatgttagccaggctggtctcgaactcctgacctcaagtgatccgcccacctcggctcccaaagtgctgggatgacaggcgtgagccactcactgtactcggccaagacacaaatactttgaaagaagctgatttttggtcatggattatataaaaatttgtggctactactagacatatagttgtgctgatttaagaaagcatagtgcacagaaaactcatggtcttgaatgcaagaaatacaggaaagggtgaatttgtctttcttgaaaagatgagaggatttattgcatgattcttttaaagtattagtacctttggaattgtgatactgggtttattataatgcacatatgtgtgttcacatgaatggagttgacttagaatattgagtttctactaaattgtatgcttgtactgtatatattcatctaggaagtgtttcttgtttctgatttcagttgaaatgactttattgcattttaattaaaaatgtattggttctgtctttgcacctgtttttctttctggaggtgagaatcggaaggtatctagtatgtatatcctgtaacttaagatttttacaaatcgagaattataatattccagtatatctttaatttgggtttattactttcaaaattctataataaatcaggccattgaaaagtgctttattcagaggggacatcagtagcaacattacagaaatacaaaggattattaaggaatactatgaacaattacatgccaatgaaaacttagaggaattcgacaatcctagatgcacaagctacctaaaagtgactcaataagagacttaaacttcggacaaaaacctatattaacccgaaggagacttcatcatcacgtgaaaagccctgccttcgaactcagaaacgctccacaaaccagaaacattcaccgggaattctgccaactgctaagagcat

SEQ ID NO: 644093 - DNA, 206 bp, Homo sapiens
taagagctgctggagctggtaaggctcaccaatgttctgcccagaaagctcataaccgctaaatgaatattatccctaatacctgccaccccactcttattcagtgttggaagaacggtctcagaactgtttgtttcatttggccatttaacgttttgtactaaaatactggtttattgactaccatgcatcgtataactttcagt

SEQ ID NO: 644094 - DNA, 587 bp, Homo sapiens
ccgtctggtctatggccgctgttgctaggagcgcctcgtctgctttttcggcggtggataacacttgtcttcgcgcgggacacacacagtgcgcggcgccccttggtccttataggagccccctgcccgccttctcctgtgtgtagtacatcgcgcgtgggcgagaaaacgcgcgtatcgagaactagtttgttctgcacacaacgagccttgttcgggcttcccccccaggatgtaggtgtgcagtaacatgcgctccgcctcacgctctcccccgtcgcgcgctcgggtgcgacaggctgccagtttcttttatctcgcttctaggtcgcgctgagcgcgggcggcgttttgtcgccctcgcgcccctctctcgcgcgcgtttgcgcactcacgctagccccggtgcgcctccctctctctcgcgcggtatcgcgtgtctcacactcggtgccgggtagtgggagtggagcgcgcgcgttattatggactgcactatcttagatggcgccctcctgtacagcgctatcaaacaaacacgtgtctatgtatctctcttcttatcagacacaacaatagacagagaa

SEQ ID NO: 644095 - DNA, 1010 bp, Homo sapiens
tcttatccagtgtccagcgcccgtgagtgccaactgcctagaattgcctccttgcgagctccagggccaacagcttaatcaagctgtaccttttccccttcagcacctgtcccacgtgatctctgcacacagggtgcttctaaaccagtgtttattgaaccaaaggaggaaaactcgatttcactgtcaccttggttcattatccacttccaaatttcttatgctgaaacatggcactaacgccatttgcggtgtacccttcaccctctaaaattaaaatgcctcaagttctaccctttcgacatggtatccacccttcttcttgatgcttctccgttgcgctgacgaaaccctcttattctatttgtcactacctgtgtcatatctcgtcatatcaacttctcccctaaaacgtgttgtcctttcacagtctctcgattctatctcaacaaactacacagccatcttcctgtttcacgacgatctctaagacccatggcgcttattctgtgctacgcttaattaaccttctcctcgcttcaacattagttaataactcttatatatctgcgtcacaaggctgtggtgaggacagaatgacttctgtcaccaatctaggagccacttcagggcttcattccctggtaggacatgcctgcttgcctttcttggggacaactagccctcattgtcccttcatgtggtaccagtcggggcacaattatattgtaattaagctaaacatcttatgggaaacaacccgctccacgaaacacggagcgccccaagtaaagcacacaccctgcaaagattatgaactatgaattgtctctagtagagataaatttctgcaaacatatctcagtcttccctctgtttctctggtgattaagaagttccttttggtaaggaaaaggatttttaaccatagagttaggcatcctggaaattcaaaccagatttcttaatacctggtcttcctcaaagagaaataataacagtaatagtat

SEQ ID NO: 644096 - DNA, 106 bp, Homo sapiens
ctggtcttcacgccagcagaagcctggactttctggtaatagtgaaccgaggacatcgtctcctggtgtcagccagtttgagttgagttctgtaactgcaagtcta

SEQ ID NO: 644097 - DNA, 326 bp, Homo sapiens
ttgcggtgagctgagatcgtgccattgcactccagcctgggcaacaagaacaaaactccatttcgaaaaaaaaaaaaaaaaaggaaaagttcaaaagttagtgcttattaccaaagcttcaggcagtcatgtaatcagtgtaaggaagattttttttaaacaacttattttacctatgggtacagatttagtattctacaatctgaacctatttaccatctttaatagcaacagatatttgaagctctcatgaattataatctcttatcaatgatccagtggtaggtaagtaataattgaaatgctacccagtttccacttttttc

SEQ ID NO: 644098 - DNA, 128 bp, Homo sapiens
tcaacggcgtgctgaactggaagtaggaagagcgtgaagtcttacaggactacactggatagactttattctgactccgtcaatgtacttatgaactaccgtgcctcattccagacactacgagaagt

SEQ ID NO: 644099 - DNA, 270 bp, Homo sapiens
ctcagtatgttgtcagtttttctcaatattgatatatagattctgtgagagcccctaaaatcccagcaaattatttcatgaatatcaacaaacaaaatctaaagcttacatgtggaggcaaaaaaaccagactagccatcacgatattgaagaagaaaaatgttggaggaccgaggctacctgacttcaagaattactatgaaactgtaataatcaaaacagagtggtatcggcaaaagacgaaagtaggtcaatggaacagtggagaga

SEQ ID NO: 644100 - DNA, 140 bp, Homo sapiens
cggtcggcacacaacatactgtacatgaagctgccagtcgtgacaccattccactgcgggtacaacgtggagaggtgacttacaaaaatgtcaagtcaacgtatgggatgtgggcggccaggacaagatccggccgctct

SEQ ID NO: 644101 - DNA, 386 bp, Homo sapiens
  misc_feature (241)..(241): n is a, c, g, or t
  misc_feature (249)..(249): n is a, c, g, or t
  misc_feature (286)..(286): n is a, c, g, or t
  misc_feature (318)..(318): n is a, c, g, or t
  misc_feature (325)..(325): n is a, c, g, or t
  misc_feature (350)..(350): n is a, c, g, or t
  misc_feature (386)..(386): n is a, c, g, or t
gagagcttgaccattgaggttctaatttcaaaaagcccttcacagctaatatctcatcttcattctactaagatgtattcattttacctaattcagcactaatttttttcacttttcaacatggaaatacacccaatgattccaaatataccacagcaacctatgttcctagtctttattgagatcaacacacatgttatatattccagaaatgaacattacaagtttacccttctgatgnacaactgnttcattcttttattcacatcacacacacacacacacncacacacacacacacacacatatattagactnatggctnagtttagaactttctctcttgccanctactttgctatatatagacatagaacctgacctcn

SEQ ID NO: 644102 - DNA, 1204 bp, Homo sapiens
  misc_feature (328)..(328): n is a, c, g, or t
  misc_feature (394)..(394): n is a, c, g, or t
  misc_feature (492)..(492): n is a, c, g, or t
  misc_feature (602)..(602): n is a, c, g, or t
  misc_feature (646)..(646): n is a, c, g, or t
  misc_feature (741)..(741): n is a, c, g, or t
  misc_feature (817)..(817): n is a, c, g, or t
  misc_feature (820)..(820): n is a, c, g, or t
  misc_feature (912)..(912): n is a, c, g, or t
  misc_feature (959)..(959): n is a, c, g, or t
ggccttttcctgggccgtccctgtccccgggttggagaattttccttgccgccccctacttccggaggggctctacctctgctgcgctctcctggtgtcgctctccacaggtttgggggggcctgcaaggcgcttctttctggggaagttctttccccaggaggaccccctcccttagggcgccccctggcgggagccccaggggtgggctttgctcaagcttttagggcctcccggggggggcgcgttccctcgggacttcgttactcgggaatgcccgggggttttcccggggtttccccgcgttgcacccacagcctcagagacncctgttagagggacacctgtgggcgccccgccccctgtgtgtcccgcgcgccccggcgcgccctcncccaagagcgcccccttgtcccgagaattctggagaaatattgccgcggtctctcttcagaaagattgtgggggaagaaaaaacgcacacgaaggccncccaaggggcccgcccccggaattttgtgataatttgtgggagagagaaatcgcgacgcacagcccatactcttttttgcgcgctctcttctgtggaagatttagagganaatatccccagagacactgtgtgacaaacaaagatgtggttgtntgttgtggttggacactctctgggtgttctgctctcggcccaatggtctgctctctctctcacccggaggaacactgttctcaccccactttatnagacggggagagtctcctgggcccccgagagaacacacacaagagaccacaagattctggtcgtccccagtctccnccnccagcagtgtgggattctctccacgagttgagaacaccctcgggtgatgtgacaaaattcacagcgtgacacacacactctccccacaaagnagagaggccactcttggagagacaagagaccccacagcctcgggtgntctcactaaagggagattggcacacactcgagagatgcgcaccaccactaatgttatgcctgtaatccaagttcaccgagtcacttcttatcgatatccaggctgtgaaaatgtcacccacctaacctcggaccacagttgcaccactcgttttaactgggaatattttttttctgttttttctgtattgctctgtgctagatagggtggattccgtaataaatactgtgaagcttttgtttcca

SEQ ID NO: 644103 - DNA, 644 bp, Homo sapiens
  misc_feature (286)..(287): n is a, c, g, or t
  misc_feature (289)..(291): n is a, c, g, or t
tagtctatagatcattgcacttcaactgatgtctaaaataagatgctgttggggaagatactggagaataaaaataaaggacagcacttacctttgttaatacgttaagcagatgaatttttgatcacacatctcattacttgtaacatattaccatacctttcatttacaagggctttttcattctttcaacacatttttattgagcctttgcagtcagtatgtgctaagtcagtctgctggatcttgggacttcagtggtgaaaaattagacgtggtgccgccnntnnncaagcttttaccgctggtggtgaatacagataaataaccaaaacaattaccagaaactgtgccaaatgccatgacagcacagagaagaggttccctaaacagggaaaggaaacgaatgtgttacagaaagcttgctggagtctctaagctgagatctgagggctagttagaagttagctaggtgcagttggagtgggagaggaagtttcagttgtaggcaaagggaacagcatttacaaaagcctaaatacaagaaataacatggtccattcaaataattaaaagctcattatgatttaattattaagggactggggtaggagtaggggtgcggtaaaaattggagcgagctc

SEQ ID NO: 644104 - DNA, 850 bp, Homo sapiens
  misc_feature (93)..(94): n is a, c, g, or t
  misc_feature (97)..(99): n is a, c, g, or t
  misc_feature (103)..(103): n is a, c, g, or t
  misc_feature (105)..(105): n is a, c, g, or t
  misc_feature (110)..(110): n is a, c, g, or t
  misc_feature (115)..(115): n is a, c, g, or t
  misc_feature (316)..(316): n is a, c, g, or t
  misc_feature (341)..(341): n is a, c, g, or t
  misc_feature (486)..(486): n is a, c, g, or t
  misc_feature (508)..(508): n is a, c, g, or t
  misc_feature (556)..(556): n is a, c, g, or t
  misc_feature (558)..(558): n is a, c, g, or t
  misc_feature (567)..(567): n is a, c, g, or t
  misc_feature (573)..(573): n is a, c, g, or t
  misc_feature (589)..(589): n is a, c, g, or t
  misc_feature (599)..(599): n is a, c, g, or t
  misc_feature (601)..(601): n is a, c, g, or t
  misc_feature (609)..(609): n is a, c, g, or t
  misc_feature (615)..(616): n is a, c, g, or t
  misc_feature (628)..(628): n is a, c, g, or t
  misc_feature (633)..(633): n is a, c, g, or t
  misc_feature (649)..(649): n is a, c, g, or t
  misc_feature (654)..(654): n is a, c, g, or t
  misc_feature (658)..(658): n is a, c, g, or t
  misc_feature (663)..(663): n is a, c, g, or t
  misc_feature (666)..(666): n is a, c, g, or t
  misc_feature (673)..(673): n is a, c, g, or t
  misc_feature (675)..(675): n is a, c, g, or t
  misc_feature (689)..(689): n is a, c, g, or t
  misc_feature (695)..(695): n is a, c, g, or t
  misc_feature (708)..(708): n is a, c, g, or t
  misc_feature (712)..(712): n is a, c, g, or t
  misc_feature (715)..(715): n is a, c, g, or t
  misc_feature (721)..(721): n is a, c, g, or t
  misc_feature (726)..(726): n is a, c, g, or t
  misc_feature (733)..(733): n is a, c, g, or t
  misc_feature (781)..(781): n is a, c, g, or t
  misc_feature (784)..(785): n is a, c, g, or t
  misc_feature (803)..(803): n is a, c, g, or t
tatattccacagagtgtgagcaggctaaagcaagctgctcaagggccccagttgcaaaatctggggtttaagtaccctttaggggtttcctannggnnncacncnatgcnaccantcggaggccgaagtgaaggctcccagtctccagactcttattctcctagctcaaagaaatccactgatttcctctgtagcatcttcaggttccatcttgacaacttcctctaaatccccaggggaagagttgtttagagactcctggatgccctgagggagcggctccagagcttgccttccctcctctgttttcacaacnggtccagcgataggcactgttctcngacaatccttcttggcactgtttatcgactggtggaggccctgggctatgttccactttggggaaaacagtagcagagagaggagatagttcctggggctctaatttgggttctaggccctgaaagcattttccccatcagccantgtcacaagcaaatgtccacantcaatgtgggccttaatcttcaggggtggatggtatatggaagatttnangaattgccngaaaanattaaagggtgagagngaggagggcnanagggggtngtttanngggacagggganggaanagggtttaaaccaagngtggngctnggganagnttggggngnctggggccacgacnccttgnacaggtgggttcngttnacntccacncccanggctcanatacttcacagtggtagcaggaacagtgaagataacagatgcagggtngannacaggggcagggtttaancagcgaaaggccctggctccccttcttttttagcgggctcctgctca

SEQ ID NO: 644105 - DNA, 305 bp, Homo sapiens
  misc_feature (93)..(94): n is a, c, g, or t
  misc_feature (97)..(99): n is a, c, g, or t
  misc_feature (103)..(103): n is a, c, g, or t
  misc_feature (105)..(105): n is a, c, g, or t
  misc_feature (110)..(110): n is a, c, g, or t
  misc_feature (115)..(115): n is a, c, g, or t
  misc_feature (245)..(246): n is a, c, g, or t
  misc_feature (249)..(249): n is a, c, g, or t
  misc_feature (252)..(252): n is a, c, g, or t
  misc_feature (254)..(254): n is a, c, g, or t
  misc_feature (261)..(262): n is a, c, g, or t
  misc_feature (266)..(266): n is a, c, g, or t
  misc_feature (268)..(269): n is a, c, g, or t
  misc_feature (276)..(277): n is a, c, g, or t
tatattccacagagtgtgagcaggctaaagcaagctgctcaagggccccagttgcaaaatctggggtttaagtaccctttaggggtttcctannggnnncacncnatgcnaccantcggaggccgaagtgaaggctcccagtctccagactcttattctcctagctcaaagaaatccactgatttcctctgtagcatcttcacgatctcatcgcgacaaaatccgcattatgcccaggggaagannggnttntnatagctnnctananncactgannggagcccctgcagagcttgacttcccgc

SEQ ID NO: 644106 - DNA, 319 bp, Homo sapiens
  misc_feature (93)..(94): n is a, c, g, or t
  misc_feature (97)..(99): n is a, c, g, or t
  misc_feature (103)..(103): n is a, c, g, or t
  misc_feature (105)..(105): n is a, c, g, or t
  misc_feature (110)..(110): n is a, c, g, or t
  misc_feature (115)..(115): n is a, c, g, or t
  misc_feature (205)..(208): n is a, c, g, or t
  misc_feature (210)..(211): n is a, c, g, or t
  misc_feature (215)..(216): n is a, c, g, or t
  misc_feature (218)..(218): n is a, c, g, or t
  misc_feature (223)..(223): n is a, c, g, or t
  misc_feature (226)..(226): n is a, c, g, or t
  misc_feature (231)..(231): n is a, c, g, or t
  misc_feature (236)..(236): n is a, c, g, or t
  misc_feature (240)..(240): n is a, c, g, or t
  misc_feature (254)..(254): n is a, c, g, or t
tatattccacagagtgtgagcaggctaaagcaagctgctcaagggccccagttgcaaaatctggggtttaagtaccctttaggggtttcctannggnnncacncnatgcnaccantcggaggccgaagtgaaggctcccagtctccagactcttattctcctagctcaaagaaatccactgatttcctctgtagcatcttcaagnnnnannatannangatcnatngcaanaatcngcanggtgatgagcagangataggctgttttgcagttaatcatggcgaggcccgtgcagacgatgactacgctgatgacatgc

SEQ ID NO: 644107 - DNA, 375 bp, Homo sapiens
ggatcccccatatgtccatcctgtcagcacccaggctagaggtgcagtggtgtgactctcattgcaagcctcccaggtgcacaaggttcattgcaatgctagtgcctcagcctcccaagaagcagggattactggcgcctgcctaccacacctggctaattatggttattgtaaggagagacctaattggccatgttgaccaggctggtcttgaacctcctgacctcaagtgatccacccgttgtttggcctcccaaggtgctgggattacaggcatgagccactgtgcacagccagcctgcttcatcttgaatgctttgctgctcagaaatttcttctgccagttaccctaaacaatttatctcaagttcaaag

SEQ ID NO: 644108 - DNA, 354 bp, Homo sapiens
taacactagtttttgacccatgactacatctagttgtaacagtccacatagttctcttctctgtccactcaccctattctaggtttcaccctcatctttctgttgaaactgcttcctcaccagtgcactggccattggtctcctgcctgcagatctgaggccttagccccggtcttcctcttctcgtgtccccgctctgtgtttcttttccatcaacaaacctttgcgcctctgtatctccctgtctccatgacactggttgtccaggcccactcgaacctcatttgtttcctttttcttcctggcatgtagacacggggatgctgtgagatcctgtccttggccttatccgag

SEQ ID NO: 644109 - DNA, 485 bp, Homo sapiens
agaacacatgtgttgacctagcgaagcacaggttctatactcatgtagcccagtgttggagtgcagtggtgcaatttcagctcactgcaacctccacctcctgagctcaagtgattctcccacctcagcctcctgattagcttcgattacaggcacctgttgccacgccctgctaattttttttgtatttttagtggaaacagggtttctccatgttggtcaggctggtctcgaactcccgatctcaggtgatctgccttggtctcccaaagtgctgtgattataggcgtgagccaccatacccggcctcaatacatagttttttaaagttcactctttttttttttcttttgggagatggagtcttgctctctgtgcccaggctgaaattgcattggtgtgattcccactcgctgaaacctctccctcccgggttcaagcaattctctggcctcagcctcctgagtagctatgaaaagcatccg

SEQ ID NO: 644110 - DNA, 954 bp, Homo sapiens
agcgggggcggagcgcgtccgcagccggctggtccctgtcgcgtggccctgcgctcgtccgagctcacccgccaggtgcggagctcgccatggaggcaagctgagtctggagcgcttgtcgaatgcgatagaccaggagcgcccaggaggcgtcatcccgtgtggcgggactaggtggggtgatcagataggccgtcctcctgtatcaggcttggatcgtggaagctcggtgcgactcgaggacttgacgcttcggccatctctctgctgtggagggaagacgcgggcgactgtgagcgaagcactcgcagacaccgagtgaaccaacaccatctttggaagcaatcggaccgtatccgagacacaagacggtacaagccgacgtctaggcgactgaacggtcactggccgtcgacaggcgcatggcagcgggcgcgcgagcacgcggtactggtagccttcgcatgagaacgaagccgacagcgggttgacgtacggcatccaataggagatggattctcgacttggattgcgcacatgcacagacgtgtgtccaaatatgtgtgccgcatgtaccattggaaatacgaataggaaacagaggtagtatgaggaacaaggcgcctcaattatgtttggggatcataccgagataggaaatggtagatcgctactatgtggaaatatatagcttacattccttgcatagaggataagagaaaggcgtgcaacaagagagtaaagcgagactggggattgggaacttgctatgtgcgaatagttcccactaactatgtaacagacgagaatagagacatcgccacaccgttgttataggcacggttcttgtaagttttacaaatgcaaaggggcttggacaagtgaggagagacacagaatatacccacgtatgagctagtaatcaatacctaattacaatcctgaaagttggac

SEQ ID NO: 644111 - DNA, 139 bp, Homo sapiens
catgccgggcatgtctggcacgtgctcagtgcatcttctggttgtacatcgtggtgtggcgcagtgtcatctgtgcagctgtgcacactgtgtgctggcggaggccatcaactgccctccaggacaacatgggacactg

SEQ ID NO: 644112 - DNA, 929 bp, Homo sapiens
  misc_feature (929)..(929): n is a, c, g, or t
gaggcgcgtggtgcttgaggccgagaactggaccgttggtgccgccatacatggatgacgtttgtagcctgctgtcccgttctttatcctgctcgtcatgtctccaagcgctgtactctgatatgataggcctgcgcctgggttgcacattgccgtcgcggcatgacttggtgtactgctcgtggtgtgtggtgtcttagcttcctcgagtcatcctggagagaataatttactgatcgttacttgttgagacctccaagtgtcgggtgactatgtactgatgaaggatgggcatcagaggccagaagcttccttggcctacagagtaaatggacaatatattatggacacggacgttgcatccatacttccgtatttacaatggagagggttaggtttcatagatcctggaccgatcgaatgtgccaaatatcctcaaaattcaatagattccttcttctgtgcattggatacgtcggtgtcctatcgagttctgacatggctaggagtatcatgacgagatgaacactgccgggctatctgatgggttagagtgcctttgaccaagaatatcagttggatactggatttcgcatcctgtcaatgactgttgtcagaggctgtaccaattcctcgtaatattgaccatgtggcaccagagtgaacgagcagtcgcgtttcacgaagatatctagtgcagaaatcaggaagcgtatttgaagcttggactagaatttcttcatggcgtagataccgatgactaggtttacttcccgcggaacttagttctatccatgttgggcctatttgcgttattgcccaattgattgtttaacttgcgctttggccttttaggttttgccgttacagactattttcccttattttccacctattgtgttccctgtcaggtgggctactttgtgtcn

SEQ ID NO: 644113 - DNA, 558 bp, Homo sapiens
cgttccccacaaagataggtggtgcgtgtttcagggtctctcgtttctctcctacagaaatgaaaaagaaatgtcattagaagaggcgtaacacgtcagtccgtccccaggtttgtgtttcctggagcggccggagatcagttctaacctgctctgcaggaataacggtcctgcctctcgacactcttggcgaggtttttcgccagtttgctccttgagctgcccctttctttgcaccttcctctcccttataccatgcgtcttctttatgcttttctttcctaccatttctgtccatatctacactcatgacttcctatctcgtgcctcctccctactcgcacagcgctccctgtccacgcgacccgccattcgatccgctcttacacctctcgacctcatcactgcccacgcccttcattgcatgtccctatcccctccctccccagctcttccttctctcttccccttctaactcttcgtctactttcctcctctctccttcttctccccttctcctccccttcccctcccccctttcctcctccctctcccccc

SEQ ID NO: 644114 - DNA, 222 bp, Homo sapiens
gtttgatcgaggattatcgattacagaacaggctcctctagagggatatgaagcaccgccagttcctttgagtgataagctgtgactcgcagtgatctggcgagcagttttgttgatttaactgctgacggttagggctaagcataggggggtatctaatcccagtttgggtcttagctattgtgtgatcagatatgttaaagccactctcgtagtctattt

SEQ ID NO: 644115 - DNA, 335 bp, Homo sapiens
agtgagtattactggcgctcaagagttatgtctacagtcgccgggaaagatttcctctcgtgcatgtcacgctgcaacgagaagcatggtgagaaaggagggctgctgggaacagggcctaccttgcacatggaaggaaatgaggaaatctcaaaacaggcttttcatagaacaagttagttcataacttttccaggtaaatgtatttctttacagaattatttttgaacagaggtgaaattgaaggatttaaactaataccatcgataaaaatgaactacaggccaggcgcagtggctcacacctgtaatcccagcattttgggaggccaaggt

SEQ ID NO: 644116 - DNA, 791 bp, Homo sapiens
  misc_feature (3)..(3): n is a, c, g, or t
  misc_feature (73)..(73): n is a, c, g, or t
  misc_feature (90)..(90): n is a, c, g, or t
  misc_feature (98)..(98): n is a, c, g, or t
  misc_feature (107)..(107): n is a, c, g, or t
  misc_feature (109)..(110): n is a, c, g, or t
  misc_feature (112)..(112): n is a, c, g, or t
  misc_feature (126)..(126): n is a, c, g, or t
  misc_feature (131)..(131): n is a, c, g, or t
  misc_feature (140)..(140): n is a, c, g, or t
  misc_feature (156)..(158): n is a, c, g, or t
  misc_feature (168)..(170): n is a, c, g, or t
  misc_feature (173)..(173): n is a, c, g, or t
  misc_feature (183)..(183): n is a, c, g, or t
  misc_feature (188)..(188): n is a, c, g, or t
  misc_feature (190)..(191): n is a, c, g, or t
  misc_feature (196)..(196): n is a, c, g, or t
  misc_feature (203)..(203): n is a, c, g, or t
  misc_feature (218)..(219): n is a, c, g, or t
  misc_feature (254)..(255): n is a, c, g, or t
  misc_feature (291)..(292): n is a, c, g, or t
  misc_feature (541)..(541): n is a, c, g, or t
  misc_feature (560)..(560): n is a, c, g, or t
  misc_feature (584)..(584): n is a, c, g, or t
  misc_feature (625)..(625): n is a, c, g, or t
  misc_feature (664)..(664): n is a, c, g, or t
  misc_feature (707)..(708): n is a, c, g, or t
  misc_feature (717)..(717): n is a, c, g, or t
  misc_feature (719)..(719): n is a, c, g, or t
  misc_feature (728)..(728): n is a, c, g, or t
  misc_feature (788)..(788): n is a, c, g, or t
tgngcgagtagtcccagggtgggaggtgggagcagaataaaaaaaatctgccatgattcctaattgtttttcnatacagttgcttggggnggggtttntggggggtntnntntggggggcctcttnttgcnggggttgtnttggggtttgggtttnnngttctttttnnnggntggcctcttntcccncnnttgcnttggtgntgtgctggctggctnntcctcctgacttctgtgcgtgttacctgctttgtnnctgtgttttttaagcgagcttgcttgtggtgcgcgnngggttgttttggcccccccggaacacaccggccaggagcccgtgtgggtgttcttgttatctcggctctttgtctgacctctcacaagggtgcattcccaagaacttcacaatattacccacagcctcttcaagtgtcttgatggtagacaaggtgaacgtttcctccttctcaaattcatcccctacctcatcccaggctgcttcgaagttcagtttcatgaccttttgaatgtgatcagctacagtnacttccagatcttccagcncatactcatcctcatagccttcgncatcagtctccccagtggtgggatcacagtgcttgacagtnaacttcatcatgcagctgaatgtgcaggccacagctgtngggtcttctttgggcagtgccaccagtgtgtagcaggtcccgnnctggttgtngngcaggctcngggcaggcacgtcacagagcgcctcataggcctcagtgggctccatctgcactgtgacantct

SEQ ID NO: 644117 - DNA, 253 bp, Homo sapiens
aaaaaaaaaaaaaaaggaaaagggccattagggaggtttcccttagggatggccttttataaaaaatggctctgaaccaggccaggctgttggaaaacattttatccagggaagaccttttttaaaaatgggggcaagccttttaaaaccctgccattgtttggaaaacaaagtttcggggatattcaaaacccttggtggccatccaaacatggtcaatagcaccctcaccagaagatcccatctaaggaga

SEQ ID NO: 644118 - DNA, 188 bp, Homo sapiens
caaatcatggagcctgacccctggatctccccagtctaggggtcaggctccattacgatttgccccttcccatcatcttcctacaccatgccactcagattaatctttctttatcctgagaccagttgtggagcactgaagtgcaggcaggagaggggaagggccagtctgggctgccgggttctatt

SEQ ID NO: 644119 - DNA, 1497 bp, Homo sapiens
ctctgcccagctcaatttgggttgtcgcacctacctcttttctcgcccccctgatatataatattttcctctcccaaaacacttactaaaataaatttagcggacggatactctccaattgcgggtaagttgtaatacggggaactcttatctattttatacggccacaatcaggtcctaaatactcggtagcgctaccccccaattacgctttttccgggggaacctttaaaggtgatactacgccgccgaaccgatatgtaacccttcctcggggaaaaccaaacgaattgctataacgcttttctctgggccttccttttaagctgttggaattttatttctcttgggcctctcttgggactggaatattgtagcaacaattgtttgtctcacaagggaagtgtcacctgcacagtgttactctcgtattcccacaaaaaggtatcgaatgttccgcttaggaactgtgggagtctttcccctctcaacagtggcccaaacacctttcgcgaaacagttctccaagggaacgcttaacggagcatccaaggccgtatactacggtgtgtgccgaacacccaaagttctcatagtatggcggcgcacaatgggccccctggcgcaccgaaccgaattaacgttcccacctgcaaggccccgtttattatcaactcgggtggccccttactcctgaacaccaccagcggcccattggagtctcgaaccatcgcattgaaacggttatttcgaacaggcttccttgtgtgcgcgccttcacagggacctcacgaacggtgggaccatcacgactgtttggctaagcaaccacaggggctgggtttccccgcacgaaacacttccctcggcctggactgctgggatcaataactacccacgggcttcttccgcccactgtgtgcctgcactcgcaagttggcttactgactaattggacctaatcgcgaatgactcgtattcggcgaattaccgcacgctacactaccaattcgcattcgcacacgaagagcctcgagcactctaaacgctcttagccacagtcaagcattctccatcccctgtggatgatcatagagaactcatgtcctcaaaccaagtagcatgcacaatggaatgaagtgccgagaatgttgaacgagtccagctcaggcaaggccacctaccaaggaaaaacggcaatttcccacctgcaaattctatctctcagcatcaccccaggtctgccattacattacgcgtcgcggcaagtgccgcgcatctcctatgtagcataccgatccagcaccctgctctcacacagacgcacccggaatttctgtccgttcccaaagatcaggccccggataaagtctgccccagaaactctcacagcttccagagcctgagaaaaaagccaacctgaatttaccacggcatgcactcttcagataagccatgtcaggcaaataccgcgagtatctttatagtaaattcagc

SEQ ID NO: 644120 - DNA, 1718 bp, Homo sapiens
  misc_feature (621)..(621): n is a, c, g, or t
  misc_feature (654)..(654): n is a, c, g, or t
  misc_feature (1147)..(1147): n is a, c, g, or t
  misc_feature (1226)..(1226): n is a, c, g, or t
  misc_feature (1261)..(1261): n is a, c, g, or t
gttcccgcgcctcctcttgtgtttgtggaggagggatattttttgaggaggggttagtcgtcgccgcgtgcctcaggagttgtctcaagaagagttgtgggagaggaatctctttgtgggtgggttgtttgtggggccggcccgagtgttgggttgtcacatcacgtggggtaggagaggatcgtctcccacgcgtggggggggactaattttttggtggtaggtagaggaggtggtccctctctttcctgctcctgcctctgccggctccgtaggtggtcccgccccgtgcggcacttggttggggagaatctggtggggaaggatgtttttcctcctccaatatgtggtgcatcctcgtgtgtgcaccgacgagttgtgtttcgctcctcgcggctttgaagtggtggtagtttctctcccccccccatgtggttgtatgaggaatattatgggggggcgccccgccccctctgtgtgtgttgaaaccaccgcccccctgtttgtttttcctccgcagaggatggtgttgaagagcacaacaccatctccgccggttgtttttgtgccccacgcctgtttatgagatactactccgtgctgttttaggaacaactcttngggggtgtttcgtcctcaccacgaaagatgtgngtgtggaagaacaccgtcgtcttgtggaggagaaaaaatttgttgtcttaataggagaccatcacctttgggggaccatcacacagcgcttattattacgacatcttttttcatcatcttgcgaagagggatctacaccgcctcatcacatccaccacagtcttattatgggggggaaccccccagcgtggtgttgggctcgtgtggagaacaattataataatggagtgtcttgtgttgtcgtgtcttcgtctttttaaactatttgctggagttattgtggagagtgggggaaatattatcttcgtgagagtgggagatactacacacaatatataaagacatatgagcacacatcacacattagtagagagacacatctgtgtgtgtgtttgtggggcacaactcaggtgcgcacagatatggtgagacacatctgtgagtatatataagggtgcgcgggtaactcgtgtgctataagaagtatattgtncccgtcgtgtggtggcgtcacatcatgcgcgcgtttatacacacacagcatcgcagagagagactcgttatagacgccnacgcgtatagtatgcggcgtcgttgtgtgtgtgtngcacacagatatataaggggtgtgtgtgagaggtttagagagccaccgcgccctctcacatgtgtctctgtgtgtgtgtggagagtgtgttgtgtgtgtgtgtcttctctctcacaggtactcacctgtgtgagtaaaggtgtctccttgagagggcacagggccacctgtgcgccacacttgtctctctctgtgtgataagtttcacaaatggcccacattaaaaggggtcccacattaaaatgttttgttttgaacacacatttgagaatgtgctggttgttctggaaaaggggtataatatattggtgagagctgaaatcacccacacatataagtatattataattttgtttggactatggtgattgtttaaaagactgccgcccttctcagacttgggccgtaaatggcttaattaattatggccttttaattaaatcgaaattaacccttg

SEQ ID NO: 644121 - DNA, 717 bp, Homo sapiens
  misc_feature (717)..(717): n is a, c, g, or t
caggaagaccttgaggaaaagctgaaggagtatgtggactgtctcacagacaagatgtgccaagacccggtcaggggtgctcttgagagcctgcgcctggccctagacgtcccgcctactccccgacttcttgctggagacgcgcgcctctgcggctagcgcgtattgccctggaaggagagtgcgcgtcagggaaagggaagggcggaggtaagcagaggccctggtcgtgctgcgtgttgctatggcgctgtctctgcgttgctagcttgggcccgtggacctagatgggtgaggagctgtttcacaggccgtgcacgtcctctgtctgggtctctgtgcttagtgatcgagcgagcagctagccctgctgccgccggctccactgtgcttctgcccttggacctggggctggctacgtgggctgtccgctgatcgatccaggacctggtctctgtgccttgccgtgcttagaaagtgtttccagccggttctatggcttgcgtggggcaggctccacgaacgtcctgtggttcctgccatgcctgcacggcctgctctctggtgccctgcaggcctgggctattgctgttcaccatctggcctagcgacccaagtcagccacatccttgagcaggcagctgccccgtgtgcccagctcttgtccagtgaaagtgtgaactggggatcgctgcggtgaaagcattgggtggtctn

SEQ ID NO: 644122 - DNA, 435 bp, Homo sapiens
aactcggatccaagatacagtcctcagaaacagtccgtggacatgcatgcctttgtcactgatgttgcctacaatatgaggcttatgcaaattgaaaacatgcttttgagcccctggaccctaatagttgctgttctgcttcagaaccgagcatccatggtctttgacgctctgagggaaaagactttatgcctaaaagggttaacccaggcatttggaggttttatcatttcggcctgataataaacctgctgaagatgatgcaccgcacacgcatacttctgcattccaacattgccagcacttgtcaaagacgaggagactctgtaagtggggctccgttgactcgcaagggcgcgctgggcttatgctcgagcacatgactctcctcatgtgctcagcttatagtatccaagttatgctataccgtcgact

SEQ ID NO: 644123 - DNA, 172 bp, Homo sapiens
  misc_feature (138)..(138): n is a, c, g, or t
cagctgctgtcatctcctgagcgggaggatgcggggcttgagtgtctcttgatgttggtacctctgtcttctacctgctgctgagttcggttgtggtctcttgtactgggttggctctcgagaacttgcgtgctctgnatgcccagatagaacgtgcttcacaagccgtcac

SEQ ID NO: 644124 - DNA, 82 bp, Homo sapiens
gaagtgggcttttgtgttataattttccctttctccaaccctgtagaataagatttctttcttgtcttttaaacctaaaaaa

SEQ ID NO: 644125 - DNA, 838 bp, Homo sapiens
gaattcccagcgtgagaggttcgcagagtactaggttttgacaagcttgcatcatgcgtgagtataagctagtcgttcttggctcaggaggcgttggaaagtctgctttgactgtacaatttgttcaaggaatttttgtagaaaaatacgatcctacgatagaagattcttatagaaagcaagttgaagtagatgcacaacagtgtatgcttgaaatcttggatactgcaggaacggagcaatttacagcaatgagggatttatacatgaaaaatggacaaggatttgcattagtttattccatcacagcacagtccacatttaacgatttacaagacctgagagaacagattcttcgagttaaagacactgatgatgttccaatgattcttgttggtaataagtgtgacttggaagatgaaagagttgtagggaaggaacaaggtcaaaatctagcaagacaatggaacaactgtgcattcttagaatcttctgcaaaatcaaaaataaatgttaatgagatcttttatgacctagtgcggcaaattaacagaaaaactccagtgcctgggaaggctcgcaaaaagtcatcatgtcagctgctttaatactaaatgcattgtagctctgagccaggtctgaagaactgttgcccaattcaacagtgccagcattccaactttgttaaaccatccaacatcttaaatggactttcctgtggtggtaccctttaagaggcggatgaaagctagctatatcagtttgcacattctaatcactttccagtatgagaagagagatttttacaattatataatagtcctagagtttgcagctg

SEQ ID NO: 644126 - DNA, 610 bp, Homo sapiens
attgccatgtatagaacagcagagtggttcaagcgtatactgcattatactgccctgtcgctacacgtagtaacattctcaatctatcggtttaccgctatcgtatgaagattactagtctataatgtattttcgggcccaagtaactgatagattgtctgcaaagaatctcttcaccatctttcctgggcactggagttgcttgggagctatcttgtaccttgagagccagttgttatcacccaggatattgttgagactttgagagtgagatcatatttcctcagaataccttcattataaatttcattcatttctggccataagccttctcccattgacacaagaatgatatacgttaaattttggttagtagctacctgttggaaagtagaaagatgaaaggtgttgaagataggtaaacaggaagcttccactcattggttctgggtttggtttgtttgtacttgtgttgtttgttctttttttaaggttggaatttgttagattttactttcgttatattatttttatttgtcttcaaaataattcccaattttaaaaatttaaggaaagtaaaatagaactggatgtataggccatccagctt

SEQ ID NO: 644127 - DNA, 114 bp, Homo sapiens
gtgtcacccccttcgtggacaggacagtctattctattctggcagcaatgatgacattgtattcatgcatgtagatgaacctgagagacactgggtttggcacaatctttacct

SEQ ID NO: 644128 - DNA, 457 bp, Homo sapiens
cgagctcggttccctatccgtgtctcggggttgcgcacggagtatcacgcttgtaatcccagcacttttggaggccgaggcgggtggatcctctgaggtcaggagttctagaccagcttggcgaacatggcaaaaccccgtctccactaaaaatgcaaaaattagccaggcatggtggccggggcctgtaatcccagctacatgggaggctgaggcagcagaatcgccttaaccctggaggcagaggttgtaatgagccgagatcatgccactgcactccagactaggcgacacagggagactgtctcaacaacaacaaaaaagaaattgtattcaaaagctcaaggacctactagcttaaattctaagttgaagatcaaatattatattaaagatttcattttttatgcagcaatattttgttcccaatatgccatacatagtggatagaacttaa

SEQ ID NO: 644129 - DNA, 922 bp, Homo sapiens
gtattcgaagggaagggagccccctataaaacagtctacagtggacagtctggtcggcagagccgcatggtcagatcgtgaagagggagccgtctattgccagccatgtagatttctccggcaatgtaccatctgtcctacgccaggacaaacttttgaagccttcatgaacgcggcgaatcggtctgccggaagagctcatccagaaggggacggatatcatagggcgtgtcgaaaatcgtgcagaatgggaatgcacttcataatgttgcacctagtcaccgctggggtcccaaagtgcagtccaaacacgaattcacggattggggcgtgacgcgaattgttgagcctcgtgatgacgaaattgactggcgccgaagagacgtcgagtgacatcgtaggcttcagttaggaaggttgacctagtaaaattgggtggatcaaagcttttcagacaaacatcagtcatatgttctggttgtaccgcagaatctccacactggtgaacattatactcatccaaatacccagtgacaattcgggttcgacattggtctctcaagaagacatcagcggctggcttataattgttcctttcataactaaaaaaatcccgtttgggggagtagccaggccaccttgataaatgtggttgtaattaataaactgcaagtaagggcatggcgcctctccagttagagatcttggtgcacttgcttgcactaaagggcggggtacttcagaagtaacctggggcgattgtaaatagtgggggccgatagcactccctcctgagaatactgccccggcttgcaaacgtaagggttgtctgaaacaaacctaacaatgaggtcatctaggccattggtgggattgttctccgaaggggattctcccaatgggtgcctcttttagtttgccc

SEQ ID NO: 644130 - DNA, 177 bp, Homo sapiens
cgcccagcaaaataacctttttttattttcaggtctagcccatcagatagatttactcaaatattttctgggaccctttatgggtagaccatttaatcctgtttagaagccttttaggaatactatagatttcaaaggcatcatttaaaataaataaattcccctttctctctccta

SEQ ID NO: 644131 - DNA, 658 bp, Homo sapiens
ttttaagtcaaaaaattaattttattgaatcaaggcattcattcagtacttaacacagattgcaagagaacctcaacacgtagggctgcaagggagagggggagcagtttacatttttaatgtaaaataaaaaccctaattgctacagatagtttataaaatttgtaaaattccccaaacaaggtctagccaactttattgtttagtgattttttcccccttacttaaagaatgaaaagctagatgatgtgtgtattactggttataactaataaatcagcttggaaaaattgtaagacagaagcataaatacaatataaaaaggcgagatttttaaaatcgtattataagaatattaacaataagtggaaaagatacattagagccagcgtggtgttacactagtttgaaacagaactgaaagacagaccaaaaccaatgcacgcggagggaaacggcctgatttcaggaagtgtgtccagtcagacaaccgcagagaagggctgtcggtggctgcgtggtcccctctgttactcagccatgcgtcccaggcagagtgcccagctcagcagttaggctttctctaaggacttgtagtactctaccagcacagtccagccttgggggccatgaagccctctggaggtttctggccttc

SEQ ID NO: 644132 - DNA, 113 bp, Homo sapiens
gtgccttcccacttggttgccaaaaagcacagggaaacggaaaacctcgttcagctgcaagtgtgaaaccatctaagaagcaagaggaaaaggagaagaagggaaagggaaag

SEQ ID NO: 644133 - DNA, 283 bp, Homo sapiens
gcaaggcctccttttatttttttggcctcaggggcccccattttcccatacagcagcccaagttgttcattgattccgctccccccaccctccttcatgcccccatgtttgtggtgttccctttgcggggcatgcccttacccatcaggggaactccttttcaaccttccggtagggccaattcatacccctcctatgaaaaaacttcctccccctccccctagcattacttatatgatatgtttccaaacccattccaatttccagcattccccctcaaaca

SEQ ID NO: 644134 - DNA, 406 bp, Homo sapiens
  misc_feature (137)..(137): n is a, c, g, or t
ctcggaccgctctcgtgagactgtacttcagatatcctagtgtcttgaatagaggttttttgttttgttttgttttgttttgttttttgtctttcctagggccgcacctatagcttatggaggttgccaggccaggnagccaatcggagctgtagccaccagcctaagccagagcaacttgccagatccaagctgcgtccacaacccacaccacagcccatggcaatgccagatccccaacccactgagcaagaccagagattgaacccacaacctcatgtttcccggtgggattcattaaccactgagccatgatgggaactccatgctttttgctttttaaagccatacatgcagcatatggaaattcccaggctaggggtcgaattggaactgtagctaccgg

SEQ ID NO: 644135 - DNA, 725 bp, Homo sapiens
tattcacagaaatcatggtagtattccccttcccatttgaatacccggtttctgtaggttttaaaactcatatctgaaaagttttcattctctcagtgtaacctgggagtcacattgcatcagttaaccgctacttactccttgtgtattatagtgttttacctttaacatcggttgctttttacccgacaatgagcaagttttatggacaatgcaattccttactatataatgaatccatagtctcattgtattagagagtccagtcagccagctagagtatccacctgttaaatccctaaacctaattctggtaaagagaaagttaatcaatgtctttacctccatcgtggacaagatctatgttaggcattattcatgtgaaacagatgtcgcaaagttcttatttctcaacttttaaagcaagtatgagtaagagtttcagtcctttcctgtcttatagtccagaacacctatgtcttagcaagtggtcatcatgagtctttgcacgcctatgtgttggtcaatggttaaggcacgtctgtaatattattatcctctgttgtccttcatgttctttacaacaaaagtccgcatgtattctatcttgcttcaataagtctttggcagaaaaggcaaaatcatgtcatttatacctctccttgctctaaagaaagcagttatatacatatataaaaagtgttaataccagtttctttctatca

SEQ ID NO: 644136 - DNA, 169 bp, Homo sapiens
taggtgtgttatggtatggtagttatgtctgtgatgttggacaggtaaaataatatgatgtctgggattgattaaaaagaataccttgtgggtcagggagtgactgagtggatgtgaggtgatattagggcgattaggtgacaggtatatggtagttcattatacctat

SEQ ID NO: 644137 - DNA, 660 bp, Homo sapiens
ggtatagatgctccccatctttattggtctcgaccttcctgctcagcttattctctccgttcttgtcgattatggtcattgtgatggtggcaaagtgtccctcgtggccaagatttaaacctccacttcatcacaatatgtttctcagggaccagatcagtaaattccccagagacgttgccatctaccatgtggaactttccacctctgtctgcttctaatgttgcaggagcatgggtaaaggcctgcaccagctcttgggtggtaaacactctatagagctcctctggtgacgtcaggaaggtttccttaagagtgatcttacaagtggggattttgactccaacaggtctggcctgggtttttgaaggagcaggcttagccttgcgctcctcagttttcagtgctggctgccccactgggtctactgactctccattcattgtaggtaagatcatgccctgggtgaactctgttttgagggtgctgatgtaaattcccattgcttctcttagaagtttcaccccctcttccttcattaaggccacgagatttgtgtcaggctcatctttggcaaggctcacactaatctccacttcatccacgctgttttcatcaaacaaaattggggatctccacacgtccttttggattgtactc

SEQ ID NO: 644138 - DNA, 286 bp, Homo sapiens
tggtataataaagcaggtacgtgataaaagtccactgtgggaatacctatttatttttttattcctcccaaagagtcgagttataggcttgctttccctatgtggaattggcttgagaaatgggctttgggtgactgactgccagatctgggggaatctcagaccagaactgaaaggaccagaagctgtgatgactaattgaggtgggagattgggggtggctttttcaaagggaattgtcccgggttcttttttttttttttttttttttttaaattaagggggg

SEQ ID NO: 644139 - DNA, 843 bp, Homo sapiens
cgtttagtaatatcccctatataacttatatatccgcccgtccaccatatttgtttgcccaaataacttttaagtctcgaccacatactcctatttcctatgcccaaagttttgcacttcataaggtgtttctagattggccgcggccaatgtatttttcacagagagacagctgtgctcttccttaaaccccccattgagtcttgtatcaccaagttcatcgtatcaaaagaactcttgtacagaacctgctttaacacgtaccaaacgtatgtgctccacccacttcgaagtgggttctccaaaaaccaacgtcactcccacccgtgccgcccaacctccccaagggggggtctcaaccccccaggatcaacaaaacctagtctagagaggttctttcctccgcctcaattgttggtaatcgatcaatgcctccgttctcaaaaagtcaagattctttcataacgagtcattttctcactaaaatcgtctattacacacccccctcttcttagcagcgtcccttatataaaaggacgcacaaacaattggacaatttctccctaacaggccccccggttgttcaatcccccacagggaattctctccgcagttcatccctagtcctcttttcctcctctccccggcggggccctccaccgttataactctgacacctttatactacctccccgcagcttattcatgagaaaataacaaacaaaaaggttataagttgacctctcccccctccaacccaaatatttgattaagcaaatataaacgtagctgtataagtcctaaaaccacccacaaacccgtgccttatatcaaagagtcaca

SEQ ID NO: 644140 - DNA, 195 bp, Homo sapiens
atggctgtctagaggatcccgatatgcgtctcaggactattccatgctaatattccgcatttccaggagtcgcctaagcgaatcggtcaccgtgatcagcatcactgtgcgctgctcgtttccgatagccaaagtgaaatcacctattttttgtaacaagttgtttggcatgagacccagtcacaagtgccttca

SEQ ID NO: 644141 - DNA, 206 bp, Homo sapiens
aaaaaaaaaaaaatggggccttagcttctggctttttattttgccagctaagggcataaaacaaaaattaaccaaccaaaaccaatagccctttgctatcagcatccttatgtaaaaaaaaatatattttagcccgtaaaattaggaaaaatgtaatctcagaataaaggttgtcctttaagttgaattaatatatagctttatta

SEQ ID NO: 644142 - DNA, 88 bp, Homo sapiens
cctgcctctaaaagttgtgaccagaaagtatgattcatttcgcgcccagagggaataaaatatgtttttctcatatacctcccatatt

SEQ ID NO: 644143 - DNA, 431 bp, Homo sapiens
  misc_feature (385)..(385): n is a, c, g, or t
acggcgtcggctgctgtttgtgctctaggggacggtgcacttgaagacagtagctctctccggatcagcctatctcattcctttctttcgattacccgcggcgcggtgagtctgggcggtggttgcggaagctggggcccaaggtggccgggcggcagctgctgtgacatgtgcagcatgaatcctgggtatgaccagtcattcacgtgactattcgattggcgactcaagggatgggttttgcctacttcataggcttgcggatgatacatatacagcaaggtccattagcactatcggtgtggcttacgatatccgtactctagagttagacgggaacacgatctagcatactatatggcacacagattgccattgccgattntgctattaggtctagtgattacagtggagacactggcctcatgctg

SEQ ID NO: 644144 - DNA, 128 bp, Homo sapiens
gtctacaggatcttatgctatgcggcagtacgtagctcagatctcccgcttcctcttggtgcgtatgtcgtccccacccttttcttgataaatttgagggcccgtttgtccttagagaccttcagtaa

SEQ ID NO: 644145 - DNA, 415 bp, Homo sapiens
  misc_feature (11)..(11): n is a, c, g, or t
aggtacatcanagatatattatattctgtacataaaatatcaaactacaccaaatatatattatatgctgtacataatatattaaatttgcccatatatacattatatactgtacataaaatatgaacgtacatcaaatatatagtatatgctgcacataaaatatcaaagtacccaaagtatgtattgtatactgtacataaaatatcaaagtaccaaaagtatatattacctactgtaaataaaatatgaagatacctcaaatatatattatattctgtacataaaatatcaaagtacaccaagtatatactatatactctgcataaaatattaaattacccaaaatatgtattgtattgtgtacataaaatatgaaagtaaccaaacatttataataaactgtacataaaat

SEQ ID NO: 644146 - DNA, 288 bp, Homo sapiens
tgaggcatagaacgtagacctggaggcagagtgtgcgcgagcgagatcacgtcactgcactcccagctgatgacagagctagaccccgtctcaaaaaaaatctaagaacaactgactcagttctgcagtagagctcaatctccctcaggtaagattgtcatgttctcttccgtaagatctatatgggagataatctagtccatgtgcttgtccagtacaaactttcttgcaatgattggtaaatgttctattatctacaccattgctagccccaatagaacacttcaa

SEQ ID NO: 644147 - DNA, 316 bp, Homo sapiens
ccctatgcctggaatttttttttgagtggagtcagggtttccccatgtaggccaggctggtttccgactcctgacctcaggtgatccccctgcctcagcctcccaaagtgctgggattgcaggcgtgagcccctgtgcccagccccagctcagtgatttttatagaccaactggaacccatgtgatgtgacttattcaaggttatagcgtttttgtggcagagccagaagtcgaaccgagtccttgtcccctgtttgaaccctgttttttttctggtcattgttgactttttaccccataaaatttgaacctttta

SEQ ID NO: 644148 - DNA, 804 bp, Homo sapiens
ttctatcacggatttcatgccggacacgtggaacccggctggtctgtctccaccatcctgactggtgctcctgatcttcatggtgcgaagaatgggccccaccctggtcagtatatgagacgtcgtgacttcagggataaagacaactggcagtgcagagtttagcatttaattttgaactcgatatagtcttttgtgaagttatttcctgatagtcgtggatggagattaaacaaaaagcatgaaagcacaacgacgaactcagatagcagaccccagactctccccttgtcagacgtggttccagacggggagacagcacctcgtccagaacgggattcaggctgctcaacgggcatgcgccgggggcctgtcccaaacctcgcagggctccagtaggccaaccgggtaccactggactcctgggtggctgccctgggagaacttgtctgagatagtagggtttgcagccttggttacacggtcaagtacgttgctgaggagccattgcgcagggagttgaggcccaatggctgccgaggacccaatgcgccacatgtagtggcaccgcgcaccagagcgtgacctcggcgggctgcacaatactgcccagtcgacaggcagagccaccaggctcctaggtatagcttttagaaacctgaataggggaagcaaaaaccaaaatgttgtgcattggggctttggaggaagactggagccctcagccttgtacgtggcccatgggccggtggaggctgctgtgggttggccttgtgtgctggatttgtagccttatcttccggg

SEQ ID NO: 644149 - DNA, 459 bp, Homo sapiens
  misc_feature (89)..(89): n is a, c, g, or t
  misc_feature (154)..(154): n is a, c, g, or t
tctacaggatccctgcaacggttggcagggtagctgtacacagttgcacgcagtggttaggggctgaggactccatgtacagaggatgnagtgtcttgcctcttccagactcgggcagtgggagacagcgggagattggctctgtgaaccagcnctgttctgtagatgcccagagggggcaacaacaggaaagaccagagtcgtggtcagtagtgcacatgcttaacaggtctttggtgcttgggtagcagcatctcttatgtacaaaggcttctgaagccagcaaagctgggaaagtcatctcctgcacagtcgcggcctgactcctctcctgtgtgctggccactcagaaggctccctgcagccttcaccttccacctccgaggttccccccggttggggttccttccatccaggagctccacaatttctctgatctcacactcattctccagccgc

SEQ ID NO: 644150 - DNA, 204 bp, Homo sapiens
ggtttctgtctccctgctgccctgtgaagagattccctctgccaagattgtatgtttcctgaggcctttccagccatgaagaattgtgaatcaatctaacttattttctttataaattacccagccttggtatttgtagcaatgtgagaccagactaataaagggggtgaataaagaaatgagaggagattgaaaattccttga

SEQ ID NO: 644151 - DNA, 215 bp, Homo sapiens
  misc_feature (24)..(24): n is a, c, g, or t
tggccaggtctctacctctggatngctgggaagtgggtcaatttctggagctagggggtagtgatctcacctaggtaggagcattgggtatgtgaagttaggcttgaataaaagaagttccacaacagcttctgaagcctagtctacctctggagagttaagggtggagcccagagctgacggctctgagtagtgggttaggatgggtggcaggg

SEQ ID NO: 644152 - DNA, 338 bp, Homo sapiens
atttagtgtcactttctatttgaaacgatgttaattttctggatcagtgtctagccgtaagttcactgtaaagaagggactgggccctttagcttgtaaatgcggtatgtgatttgaatgacatgaatgtgatgactgaacatgactcggtgaacatgagacacatggtgattctcccccaatattctttatcttttcggtgatcactgagaagtaaatgctctctgattactcctttctctgacttgttcctctgtggttgaggcagtccattgaacttctggttcattcttctcactagcagtagcatccttatcagggcagtttttgctagtttc

SEQ ID NO: 644153 - DNA, 891 bp, Homo sapiens
taaaacaaaaaaaaaaattccttttccctgtggtttaccttccaagggggcccccgggttgggcgggaaaggcaatgtctaaagaatgaatacccctgtgtatataagagggacctacaacggacgaggataatgctaaatataaattctcaaaatctctaccccaaattttaaagataaaataactcatttttttacgactaataaaattaatgggctgtctatgttcactctgaaaaaaatctaaatgactgaaatgttacagaatataaaatattaagcaaacaatttattctagggtattatttccagattttacttcatttcttgaaatgctgtgtcgccatatgcaatgcgctttctcttgtcgcccagaaactattagaccttatttcactttaccttttttaaaaaatgtgaattacagtcataatagtccaattcatggccttacagatggcttacatcacgcgtccgcagctgacactgcagtccctttcatgcaaacatcccataaaactgttggatgaaacatcatgcccctaatggaaactctctagttttcccatataagctatcctactgcacatgtcacacatatctcatctccgccccaagggcttaatgtgaaaacccctgcaataaggtggaccgctcgtgtgggtcatcctgtgaagcaatcggaaccggtgaccgagcggcgctatggtccatacacggattactccggtgaccttcttaataaaacgcgctaaacaacaccctgtcattacacaaaaaaggcggctaaacccgaagcacatacccccgtctgtaccgccccagggcaataacacggcgccacgtctgaaaccgacttgccttcgagtggccacagccaacatgagactc

SEQ ID NO: 644154 - DNA, 486 bp, Homo sapiens
tgaaaggcataaaaaaaaaaaaaaaaaaaatttaaaaaaaaaaaaaaaaaaaaaaaaaaaaaaaaaaaaaaaaaaaaaaaaaaaaaaaaaaaaaaaaaaaaaaaaaaaaaaaaaaaaaaaaaaaaaaaaaaaacaaaaaaaaaaaaaaaaaaaaaaaaaaaaaaaaaaggggggccccctgggcccaaaccactttaaaaccgggaaaccttaaacaaggggcccaaaatgggcccaaatgggccaaaccccccaaaagggggggggaaaaaaaataaaggggccgggttaaaaaaagccggaacgggaaaaacccggggggcacccaaaaaaaaccccttggaaaaaaaccccctttaccaaaaggggagaaaagcaaaaaggccccaaccgaaggcccttccaaaaaaggggacaccccaaagggcaaagggaaaagggaacgcgaaaaaaatggggaaaaaacccggggaaaattttgggaaa

SEQ ID NO: 644155 - DNA, 111 bp, Homo sapiens
  misc_feature (1)..(1): n is a, c, g, or t
naccactgttcgtgtagaaatacatcttcctagagacagtctgtggaggtggactttaaagcactggttttaccagcttgacaggagactcaagcttgcaggaacagctga

SEQ ID NO: 644156 - DNA, 379 bp, Homo sapiens
ggtaccctgatattagaagaggcatacaggggactgggtcttgaagagtgtcccgttccatgactgggaacgtgttaagtttactcaaaggtcatgtgagcaaatcatccctctatcacaaggtcccaaatccagggccgggggcccattggtgcctagctccctgatcacctcgccgtaggggtcgatggaatagccaagctggagatgaaacacaatacaccacttcttaccacccgtaggctccccatccacagatctgctttactgaggcgactgatcactgggtgatggggctgctaatgggtgagatgctgaaaaggctggtttctaatggacagaaatggaaggagcgagggtcacagttgatttgtcatga

SEQ ID NO: 644157 - DNA, 628 bp, Homo sapiens
ctatgagtagacaaacgtgcggcaccgcgtatccaagaaggtagcctagaacatgggcttattcatggtgtcctagagaagatatctcgggaaaatgatcggtagatgcaagacattccgacacaatccaaggattgccttgggttttcggaactcctgatgcgagattctgggaacggaggactccactagtggccgtttgcatagagcgctctcctacatctgcaattcgagtcaggcctagtcacgatcctacagcacgatcgcactcctatttcctccggccagtagctgccccagttcagtgcacacccggaaaggattcacaatattcaaaacaccaacagcatctatgaacccgccgagaaaacgaattgcgaccgcacacacacaggaggtcaccaggcgcacctcgcgaccataggacacagggtcaaacttcaagagaaggacccgaaaacaaaacctgggggcagaccacccagggcgacaacgccaagaaaacacggaaacccgaacaggtaagtgaccccagtatcaccaccttgcgattaaggcgaaccacgggggatggacaacatggcacacacacacccccaggaacactggaagtcactgaccccaggaa

SEQ ID NO: 644158 - DNA, 649 bp, Homo sapiens
actctagagtatccctggtcttgattgtactgcttcctctcagcaaggcctcactgaaggaagttcatcaggttctggcttgacccggggaaaggccatttcacactaaaccagaagtaaacaactacattctatttgccgaagataatatacaggagagattgttttttctattactacgacagaaaaaggttaaaaacagaaaattctacacttgtttttacttgcttaattttgttcaatatagctgggcggtggtggctcacactctgtaatcccagcatacttgggaaggctgaggtagatagctggggcgtggtggctcacaccttgtaatcccagctacttgggaggctgaggtgagagaatcccttgaacacaggaagcgaggttgcagtgagccaagatcgcgccattgcaactccagcctgggcaacagagtgagaccctgcctcaaaaaaaaaaatttattcaaaggccaggcacagtgggtcacgcacacctgtaatcccagcaccgtgggaggctgaggtgggcagatcacttgaggtcaggagtcaagatcagcctgggaacatggtgaaacccgtttttataaaataaaaaattgtgggctgatgggggtacctgtatccaggtatcagaggtg

SEQ ID NO: 644159 - DNA, 303 bp, Homo sapiens
  misc_feature (85)..(85): n is a, c, g, or t
tgtttattaaatatcccttaaattatttcattgcaaagtgaggggaagtcatattgtattaggataaccaaaacattttacactntgagcctctaaatggatgaagaatgcccattgctttttaaacaaaccaaaacaaaaacaaaaaaaagtttatctttgttaaaataagtgatgcatttatcttctttctttacctatggcaatgttctgctaacatagtaataagctgagttactctctggatgtggcaattaatagaaataaatatattacagtgaagcacagagaggatatataagc

SEQ ID NO: 644160 - DNA, 1029 bp, Homo sapiens
gtgaacccgtcatacttaatgaatatcatcctaaacatcttcctttctacttcttctaatgcaatacgtatgtaataatagcatgatctgctcgatctccatccgcgtaactaattgcctagatatgcgaatcctatctaatatgtctcgttatattaactcagttgaatactgcaatacttcgctcttcggcaatccatttccctactttattctcaaatattctgagtccttatagttcacaactgaatctaggactcagcacttggcagagactcagcgagtgggagatctcttgctccattccactttccatttccttcccgggcacgttataggacctgagcctaagaagattcatgcttctcaataatcgaatttccatttaactaataataataatattaagttacctctatccataattaaataattgggaacataccaccatttgtacccttcgaaaaatattcatctaaaatatcaaaaacaactaattatcttcgcatattactaatctacaggcactatcactcagcaagccccattaattttactttttagtcaatactattctcccttactgatcgtaataacttttttaatccttgttgcaatactagctctgatcatattttacagctttgatactaactgaactcattcttgccttgcgctgagatcgcgcggcccaacatcagaacttctcgttccgataatatttgcataggtagaagcactttgtagtttcctcaatagtccccttacgtgctgctactttcatttttgactaattgataattaattaattcatactttaattttacaagtgtgaaaccccaacgtaattaaacgtaccccacaaaacggggctagcgctacttgcgtaatacataatttttcttccccataaacaaattgtttcctcacacagaataaagcgagtttcaaccagtcaagacggaaggaaattcattatatgtggatcattgcattttggaaaaccgactatatacatacctttgggca

SEQ ID NO: 644161 - DNA, 923 bp, Homo sapiens
cacggcgtgtgtgcgcttcacgacattggggtcagacagccagcctggttcctgttggccccccctatccctaatggtcatccgtgtgaagacccggagcgtgcgatgtggcacccccgacgtgttggtcccggccgccccgccttttctcaagggatgcttcctcgttctcctctaagcgcgcggggtcttccacccccgggagccagcgtgtttgccgcaccgaaagtgtggttcccggcctccccccacacacccgtgtttggacgttagttgtaaatcagcccctctgggagtggtaacccccggggagacatttacgggaggtgcaacaaccgggcgggggatataccaccgcctctgctactttgaaagatattggaattttttctgtaacacccctgctgaggggtaaagtgggaaccgagttggtcccatcttagaaatatctatataattgaacaaagtttgggaaattgtctccagcctgtcaccccccgatgttcgcccaatcgtgagggtgagattttgtgagtctttatttgcgtctaaccggcggaactctatctattttgacacagtttttttcacttcagttgcgctcctcggtatagttttccgcggcatagggtggcacgcgtctaagtgggggaggcggcctccccctgctgtgtgtgcacagcacagccttttcactcgggggtgccccccccactccgttatctgtcggcgcccttactgccgcgttgcccttccccacctatgggggggatttcacccctccttccccaaacttttttgtagcgacccttgtctttaaattaacccccccttttgtctatttttgtccctaattttttcccccactaccccgattttgggcctttacccaaattgtaaaaaaaaaaagttttcccatccga

SEQ ID NO: 644162 - DNA, 1285 bp, Homo sapiens
  misc_feature (291)..(292): n is a, c, g, or t
  misc_feature (294)..(294): n is a, c, g, or t
  misc_feature (315)..(315): n is a, c, g, or t
  misc_feature (326)..(326): n is a, c, g, or t
  misc_feature (347)..(347): n is a, c, g, or t
  misc_feature (349)..(349): n is a, c, g, or t
  misc_feature (370)..(370): n is a, c, g, or t
  misc_feature (372)..(372): n is a, c, g, or t
  misc_feature (386)..(386): n is a, c, g, or t
  misc_feature (388)..(388): n is a, c, g, or t
  misc_feature (394)..(394): n is a, c, g, or t
  misc_feature (411)..(411): n is a, c, g, or t
  misc_feature (414)..(414): n is a, c, g, or t
  misc_feature (417)..(418): n is a, c, g, or t
  misc_feature (425)..(425): n is a, c, g, or t
  misc_feature (430)..(431): n is a, c, g, or t
  misc_feature (434)..(434): n is a, c, g, or t
  misc_feature (445)..(445): n is a, c, g, or t
  misc_feature (461)..(461): n is a, c, g, or t
  misc_feature (500)..(500): n is a, c, g, or t
  misc_feature (503)..(503): n is a, c, g, or t
  misc_feature (516)..(516): n is a, c, g, or t
  misc_feature (682)..(682): n is a, c, g, or t
  misc_feature (692)..(692): n is a, c, g, or t
  misc_feature (776)..(776): n is a, c, g, or t
  misc_feature (786)..(786): n is a, c, g, or t
  misc_feature (811)..(811): n is a, c, g, or t
  misc_feature (826)..(826): n is a, c, g, or t
  misc_feature (838)..(838): n is a, c, g, or t
  misc_feature (860)..(861): n is a, c, g, or t
  misc_feature (930)..(931): n is a, c, g, or t
  misc_feature (936)..(939): n is a, c, g, or t
  misc_feature (942)..(942): n is a, c, g, or t
  misc_feature (948)..(948): n is a, c, g, or t
  misc_feature (965)..(966): n is a, c, g, or t
  misc_feature (976)..(976): n is a, c, g, or t
  misc_feature (1003)..(1003): n is a, c, g, or t
  misc_feature (1012)..(1012): n is a, c, g, or t
  misc_feature (1145)..(1145): n is a, c, g, or t
tagcataatgaagcaatgtgtcttccttttcctttgtccgccagaggtgtgcaggactttgagcaggagcatgcaccttgactcagagctgataggctcccgcatgtggcttgtggggttgccaagaatgctggggttgcccatcctcggggtacatgtctggccagtcctcgttggggtattgtaccatcgtgatgctgagagttgtgagttacgctgatattgtgtctacgtactacagtacttaggagttcactgtgttcagtcttaaatgcctgcatggatgccttnntnaggataaggtataaccatacnttttcggtggnagtgtttctgggggaagttanangtctgtttatccgtaagtggngnaggagggtcagctnangagaantgggagggccagagctntcnggnntctgatntacannatnaatgaagtagntttcaaacaacgcggncatgtttacctctccatttgggagcctgcctacattctngtnctagaagcacaanaaaatcctcagatgaattagaagaaagaggtttggggactcagcggatactagttcttttaccttctgcttggtaacttagattaaactgagcattgtttttctgtcacaaatgttttccttatgacactggtttcgacatgtaaaatgtgtttgaaaacctgctntgtagatgcngagagaagctataggaaacccagtaccacccctggtctgtttgacgagacatcgttcataaggcacagcacatcgcaagatgancagttgttantaaaagctgttgctggaaacttgcnttaggaacagctcangaacctggagtncatatttcacacatattaatanntataagtccaagagctgtcagcctaatctgtaggagcagaacctctgattgacacaaggcatatgggtnnaggtnnnnctngatgcntatgctctgatgggctnnaagtgtactngccttgacactgctgctgtgggctccngcctgccgngaaaacctgaaatgcgagaagcagcaaaccagggccactgaaaaaatagctctcattagatttttcgaggaccaaaagtaagtaacgttgtactgtacttttgagaaagtactaaacctcctgattacatcantcaaagttgagaaatttgggaacttccttaggactgtgtgaggttcacctattggaccggaatactcttgtaggcactttgtttaaataacttcaaaaaggatttttttgcttaagggaataatattctctttttatggg

SEQ ID NO: 644163 - DNA, 118 bp, Homo sapiens
tatggcactagaactggatgaagatgatttagaagcagagtaggatgcactaggtgatgagcttctggctgatgaagacagttctatattcggatgactgcagcatctgcccctgcaa

SEQ ID NO: 644164 - DNA, 375 bp, Homo sapiens
tctcctatgaaagaggaattaataggaaaagaaaagcaaggaagtaatgttcaaaacttccttaatggccaggtgcggtcgctcacgctggtaacccaagccctttggggggctgagaggggtggatcacctgaggtcaggagttcaggaccagctgaggtcaggagttccagaccatcctggccagactggtgaaacctcgtctctactgaaggtacaaaaattagctgggcatggtgtcgggtgcctgtgatcccagctgcttgggaggctggcacgggagaatcgcttgggcttggaaagtggaggttgcagtgagccaagatcctgtgccatggcactccggcctgggcgacaagagtgaagctttgtccc

SEQ ID NO: 644165 - DNA, 530 bp, Homo sapiens
gactgcaggacacttaaaactgcaacatccgttctctgaacaagttaactgaggcaaactgagaaggcagtatatatccaggagcacagcacacattgggcggaagatctgggatgagagcccaaaagtcccatttgcctgtctcatacttttgtattcaaaatattgcaatctgttacctagaagaagattagtgtgtagaactgaatgctttaattttactgcaggaaaaagtaatgtagaaagagcataggctgtgatggatataaaatgtgtctaaacacagatatcttgggttaattagtaaaatggcaaagacacttcgaaaaacaagagaggcacataaatctctttcataagtgttaaatatttcaatattcactcatatgaaaatctttgaatggagctctcacatatttgtagaaataattaacattatatttgaagcatcaattttgtggcccactgagctaacataactttttatcattatatctttgaatactgtattacctatctgatctagaaca

SEQ ID NO: 644166 - DNA, 99 bp, Homo sapiens
ggatttgctggtgcagtacaactaggcttaatagggacatgagatgagatgaccaccaatcatttccttggggggagggggtgtctgcaccttagaaaa

SEQ ID NO: 644167 - DNA, 654 bp, Homo sapiens
  misc_feature (4)..(4): n is a, c, g, or t
  misc_feature (21)..(21): n is a, c, g, or t
  misc_feature (120)..(120): n is a, c, g, or t
  misc_feature (127)..(127): n is a, c, g, or t
  misc_feature (135)..(135): n is a, c, g, or t
  misc_feature (138)..(138): n is a, c, g, or t
  misc_feature (158)..(158): n is a, c, g, or t
  misc_feature (160)..(160): n is a, c, g, or t
  misc_feature (205)..(205): n is a, c, g, or t
  misc_feature (287)..(287): n is a, c, g, or t
  misc_feature (293)..(293): n is a, c, g, or t
  misc_feature (495)..(495): n is a, c, g, or t
  misc_feature (548)..(548): n is a, c, g, or t
  misc_feature (551)..(551): n is a, c, g, or t
  misc_feature (563)..(563): n is a, c, g, or t
  misc_feature (574)..(574): n is a, c, g, or t
  misc_feature (590)..(590): n is a, c, g, or t
  misc_feature (611)..(611): n is a, c, g, or t
  misc_feature (621)..(621): n is a, c, g, or t
  misc_feature (639)..(639): n is a, c, g, or t
tccnagtatctgtaaaatgtncagggattttcagttatctgctggcacccagaggcaatgggtaaggttaactggagctagagccaatatttttttcttcctagaaggagtaacagcagnaaacagnaggagagnagntgccaagttagaagtggatntngttctcttccacaggagggctacatgccgccacttgtgctgccgncatgtctctagtgatccctgaaaagtcccagcatattttggcgagtagtcaacaccaacattgatgggtggcggaaaatggnctttgncatcactgccgttaagggtgtgggccgaagatatgctcatgtggtgttgaggaaagcagacactgacctcaccaagagggggggagaactcactgaggatgaggtggaacatgtgatcaccattatgcagaatccacactagtacaagatgccagcctggttcttggacaggacagaaggatgtaaagggatggaaaatatnggcagggtcctaggcaatggtcttggacaacaaactcttgtgaaggacctggnggngattgaaaaagntccgggcccgnagaggggtggggtcanttcttgggggctccgggtccnagggcagganaaccaagaccccaggctnccgtggccgatcgtt

SEQ ID NO: 644168 - DNA, 149 bp, Homo sapiens
  misc_feature (1)..(1): n is a, c, g, or t
ntgccaaagctgtagtacccaatatgtgtgctgcactgaactgtcctgtgcagcatgctcatcaacgagtatacaacaaatgcctgacacacagagatggcaaacttgccagtgtggctctatctaggcctgtgcctcccaacacgctc

SEQ ID NO: 644169 - DNA, 349 bp, Homo sapiens
tcgcacctaagcaagataattttaagccacttaggtcaataactgtgcctataagaatttcctttgggccaggcatggtggctcacgcctgtaatcccagcactttgggaggccaaggcgggcagatcacctgaggtcacaagttcgagaccagcctggccaacatggcaaaaccctgtctctactaaaaatacaaaaattagccggggtggtggtacatgcctgtagtcccagctactcaggaagctaaggcacgagaatcatttgaacactggaggcagaagttgcagtgagctgagatcgtgccattgcactccagcctgggtgacagagtgagactctgccctgg

SEQ ID NO: 644170 - DNA, 196 bp, Homo sapiens
ccccctttttttttcccattggggggtaatcccgggtgaagcccaaaaaagaatgggccgggggttcccctttggaaaaactgggggggggggatagggggggggctttttttccacctgggggattgccccacctggggatttgggtttttggaggtaaattaaaatttaggttaaatttaatttttaaattcca

SEQ ID NO: 644171 - DNA, 98 bp, Homo sapiens
gctcgaattcaagcttctaaagatgaacggggacatgggatttggcctttttgattaaattcctgctcccctgcgatgaaagcctttttacacatcaa

SEQ ID NO: 644172 - DNA, 1020 bp, Homo sapiens
tcgtgagatccccatgcccccgtgcttaccatccgcagtatacggggctcgccgtgtcaggccaggcctcaggtccttctgtagactcccttgcctggattcgacgtaacctgggatgaaacacctaacacttgcgaaaggttcctgctgccaaaggggtgtcagtacgctgcccccagaggattcgaatttcacccaagatgtcacggcccagacgcccttggaggcgactgtttctctgatgccacgaggcaactccatgggcaagcgcaacactgtaatgtcttctctaatgggagcatacctaatagcctgccgctcagcgactggtgtcccttgtctcgttctgacccacgtgggaaagtagtcagtagaaatcatcacccacattgggtcccgcacgtgtagccaacggggtctcaggtcagctacagatagggcgcgcgggccttttgggaccagatgtcccacgctatccccatggggtatctaccccatggctggcacaggccactgtaggatcggcaaggggtctcttctcatcagagccattgtaccaggcaaaagacaaggccctgcttggccgcgagtcactggccgccaagatcacgggcatacacgactgtctgctcatcatggaccccacagtgactctggccatctggggaccctccaccgcgactcccactcccagtgatgaggggcacttttcagtgcaagtcaaaggcatagacgaggcttcacgattagacgtcccaggaggtccctcctgtgagcgcaccaagggcctaggcgtgccctcccagcccccaggccctcgtcccacctacagagacgcctccgctgcgcccctccactccggggcctgtgccgccagaaccgggctctgcaccccatacgctgccctcgcagcctggcggcctcacgactgtggctgcctagcatgtcaagagcaaaggctttttttttcttcaaccccattttcttccatttctcatactcgtggtgccagaacacttt

SEQ ID NO: 644173 - DNA, 1606 bp, Homo sapiens
  misc_feature (823)..(823): n is a, c, g, or t
  misc_feature (886)..(886): n is a, c, g, or t
taatgtcctttgaagtatacttgaggagggtgacgggcggggtgtacgcccttcagggccctgttcaactaagcactctacctctcagtttactggcgtaaactccacctttcgacccttaagtttcataaggggctatcggtagttttctgggggtaagaaaatggtacgcccatttcttggccacctcagggcgctaccacctttgacctaaacgtgtctttcactgtgggtgtcacttggcgcgcttcactttggtgacgccttcaactcaggggtttggcgtggaacatatgggcgggtatattatatagcgctggacgcaaaaagtgtgggtggagtgttgagaccgcggggtgttatatacgatattacacgagaacacagaggtctcctctctctatagagaggggtattttgtgaagagccccacgctgcccagaggtccccctctggagagagattttatacaaagctctgtgtgggtgtctcacgctaaagatgtgtgtctctggggggcgaagccgagtgtttgtgtgtgtgtgcatattatacactgtgtgtgatgagagagtgttatgaggggccataagcccatatagagtggggggatatctctctatatctcccccgagttgttggtgggggtcccttatagcccctaatttgtgggtgtgtgtgttcccagaatatatgtgtttttaagagccccccacccttttctcgggataggactccatattgtgtgtggggtgtgctcaccacgcgtggggggagattttttttttctaccaaacctcctccgcgggtgctggacgggttntattaaaggcgcctttttatgtgtgggcgaggccacccccagtggtggcggggtttgttgggnctcaagataaccccaaaaggcagcgccctttataaaccaggaaaacagtggtgccggggggcgaaaaccatgtcgggtggagggcccccaaattgacaaaccggaaacactgggtgtggtgtgtgtagatcctccccacttttttctcccataaaaagcacacaacggaactctgggggtcacattgacactttttgttgtaaataagccaccctcctgtggcttaatttggttcccccacaatatattctacacggacacacatctttttcgtggggcaggaaaagagaacgctcggctttctcggggttctcaacccacgcatggggaggacgccccccagtgggtggaagcccccacaaaatttggtgcggctcttcgtggggatgtgggggcccccccaaagggggcaggcccgctgcgtgtgggttctctgcaacaaatgtgacgagtatcaccttcgggccgagaaagtttgggccccacaatgcggtgttgtcgaacaacgcttcctgcggcagttctttacagcagcacaactaatctaccaacgagccggggactacaacaccggaagacgtcaagttcttccctccgcgtggtgaagacaacaaagcggtgcgtgcgtaggacacaactacaccagagggggagagggaggaatactacaccccggcggagcaacacatagtgtggtccttcgtgttgcacaactaaaga

SEQ ID NO: 644174 - DNA, 1080 bp, Homo sapiens
agcgggagggagccgaagccccaggctaagaggtgccaagcttctagatctatttctgagctcttttgcgtacactgaatacattgaatcctcacaacactccgtatataaggctacggtatcgcctagttacccccactttctacagcactgacaaactgtacttagcgcaccagagcaggctccaggaaaagcacgtgctcgtctaccaatggttcactcaacaggttacactgcaggtcacgctgccagcgcactctgggacaacgcaactgacgccttacccaatgtgcgaccttgaattgtctgctcaacgaattgccatgcgaggctaccactcgggcaacaacggctgcacaccccagtaccggtactcgcaatcctcatggtcgctataacactcatactgctacaataccgataactaaccaacccccaagttgaccccctgctacctgcacccagcctactgccgcgagacacctacggctcacactcaacgcacgccagccacaccccttccgcctccacaacacctcaactgacctaactagcccaagacagagcctaccctgaaccacggcacacctccacgaaacatgagtacccagcgcacatgcacacgcgcgcacacacaccccatggcgcgggcactctcgcagtcacaaccaccacgcgacgtgccctttaacaacgacaggcctaccgtgaccgctagaggcctatacacgcaactgtaggcgccgaccccgcccatgagcgtgcccaacggctgccgagacaccgtcggacgacccgggccaacaccactggacgcgcgactgcccgtaacgcggtacgccgcgagaccgctgctcgaacactcacaccgactcccacacccgctcccagccaagctccagtcgaccaggcgtacccaaccgcgtaaccatacatcggcagaacacaactgctcccatcaccgacgggcactgtgattcgcggccctgagctccacacacttcacgaacgcgccgtcacccgcgcacctgcctcccgtccctcccagcagacatccaatgatgtggcccagcgaagaag

SEQ ID NO: 644175 - DNA, 579 bp, Homo sapiens
gacccggtatgttagtaccataatcagtgcctcttcgtaggattcctgagactgagcttgtggcagccatcatcatgtggctcttcggtcaattgtaaggcagatcatgactgggttctggagaactgagttctctaatggaggccgattctgagtcagaacttcagaagacaatggccagcatttaccagacatgcagctcagaactgtagttaacttagtgtacacgataacaacaggagccagcacagggaagtgttcctctcaagtacaggcaggcccaaggagacatgcatctgataatgcatggtgcaaaatcgagaccatcccagcctcatactcgaaccacatgtgacagtaggagtggcatgcagttgcgaaatccaaacaatttagttgaacactggaacactacccattcttcgccttggtcacttttttttactaaattgaaccgtgatgactgatgatcgaatacgtggtttaaccaagatgagcagacttgacaatcttttcctccaggcactatgagcataacagtatggatagtgaactaggtaaaactctgtagtgtttgca

SEQ ID NO: 644176 - DNA, 191 bp, Homo sapiens
agcgacttctgcgggactttcacccgccacggagttctggggcgggagagtcttctctgggcatggcgcctccttctcaggcgaggagggctctaggggggacctgtcacttggctgcacctcaggctacgacgccaggtgcccgccatcctccgctggctccggcccctgctcagctacctgctgccctc

SEQ ID NO: 644177 - DNA, 732 bp, Homo sapiens
agcggggcaggctggtctcaaactcctgaccttaagtgatccacccacctcggcctcccaaagtgctgggattacaggtgtgagccactgcacctggccatggttagttgttctattcattattgaaaggagggtgttgaatttttcaacttttattatttaactgtctatttctcacttcaaattctgttagttttgcttcatatatttcgagactctgttatgagtgcatatgtttataccgtgttatatatcttgataaattgacccttttatcattatataaatgccctccttgcctcttgtaacaatttttgtcttaaagtctattttgtctgacattagtagccactccagctctctttgggttactattttcatggaatatctttttgtgtcctctcattttcaacctatgtgtgacttgaaagcaaaaatgagtatcttgtagctggggtataattgggaaatgttcacccattctgcaatatctggtttttaaatgaagagtttaactctattttatttaaccgtgattactgatcattacttctgcattttatcttggttttctaaatgtcttacatatatttgttcctcagttcctgttattccccttcgtttgtattacaaaatatattgattgctttcatgggagtgtccggcagtgtacaaagaacgatattttaacaggaaccatttgattccattttcatttcttttactataaac

SEQ ID NO: 644178 - DNA, 175 bp, Homo sapiens
taccgcaagtacttgaaagtagtagatgcgcagaaataggtcctcaatatttacacaagttgacatgtttgttcaagtcagcaagctctatgtgagtctcaggaagtgaattaaattggaccttatgttttactcttgtttttttttttttttttggattgtcccttggccgcgg

SEQ ID NO: 644179 - DNA, 243 bp, Homo sapiens
aaaaccccaaaaaccaacaaaaaaaccctcccttcccaggaacaaatagaattctgggaccaaggtcacaccagatcgggaagaccccttgcccccggggcccagggaaaggaaacacagttcaaggtttgggtgttttgttcaagggaaactgcccccctgccctgagactccaactcacgggccgtaagggttttttttttttaaagttttttttttctttttaaaacccaacccatccta

SEQ ID NO: 644180 - DNA, 335 bp, Homo sapiens
tggtttccgggccattatgtcccactgcacacattcgagctgcagatattcactttcacatgcagggtcatgtctaaaaactgaaccctgattgcaacagaagccagttagaagattaattagttaagtatttaatcaattaatcctgaattaagatcccattttggctttactagccataaccatttctttctttgaactaaaatcttctgccttcatttataagctcttaaaccacgtgtttgaatttcctcaggtgggctggaattttacccctcttgtgttgcagaagtgtaacttaaatgggccaatattttcacctacggacattcgta

SEQ ID NO: 644181 - DNA, 392 bp, Homo sapiens
atggcatgtagtgaggacacttaggcaagaggaatcaaaagcccagctacaaatagaaaagacttgcaacatgcgtgacgtgaagaaagtacaagcaacttgaaacactgcaaacaagttagaagtagctgctaccttcaagggcaaatagtggaggttaagagagaaacttgggtgtcaatcaaactgctttccaattggaaaagacatctgttgctttaatctcgggtgtcctgctaatttgcaccacatgcagctatcctgggcttcagtacaggtcaaagcttattcagcgatgatcattagatctctgagtgctgtcatatgtatcggtacgatagttcatttgcagttctcatttacatatctgacttgaaggaagtatctttgtg

SEQ ID NO: 644182 - DNA, 281 bp, Homo sapiens
gggttaaaaatttcaatttttgggggaaacccaaagaaaaaggaggggggggttttccccaactccccccccttgggggggcaaaagggggggggggggggggggccaaaagaaaaccctttttttttttaaaaaggggggcggccggggggatattggcctttttccaaaaattcggggaaaaaaagggggttttttcttttattaaaaaaaaaccccccctttttttaaatttttttgggggaaaaaaactgccaaaaaaaagggggttttggggccca

SEQ ID NO: 644183 - DNA, 331 bp, Homo sapiens
aggatccggaatgtgtggtgttatgagaatagaacagtcgtgaagcacatttaatcgtatttggtataagacctaattacgatttttggcactctcatggagagaagccatttagcagtgttgaggatgttgttgatgatcatgataatgataatgacgacgacattgatgatattgatgatgaaatcgaggaaaaagaagttccacaataagatgaacgagtggaggttattggcgaagaaatctgatgcgaagatcagtacatggaggatataataaatgatttatatccaaatattagtctttgtgaccatcataacaccacacaatt

SEQ ID NO: 644184 - DNA, 1386 bp, Homo sapiens
  misc_feature (293)..(293): n is a, c, g, or t
  misc_feature (319)..(319): n is a, c, g, or t
gatggaagagaactttggcgttgaagctgcttaactaccaagacagtaatgggcagccgtgctcggtatgaagattcaggtaagtatgtaagggacggaatatggtctcggtcaccgtttcgctgaatacctagaggacccttgtcgtctacattgtttaatgactggcgcctctgcagcaattgaaggattgcctacgatacagtgaaggctggcgtagaacgtgcgtgaggagtaggcaggagtgttctctgtcactctatctgcaacatggtgtttctcgtgcccttganacgcatgagggtgaaacgtataatcntggtagttacatcatccacctcgtggtattgattcctcgcatgcgtcaaatataggagacaactatgcttggattccatagtaccgtggtcttgatacaacatatagcatgagatcgcgcacaagagtgattacatacgaaacaaggtatatacatctccatccaaagaccatcgcacttgaattgagagcgtatagatacaattccacaagagacatatgggctacgacgcacttgctcagtggcatatggcgaaaattgcaatagtattagcgctagggcaagaggtagaataaacatacgacagggaatatgccttatcaatcccttatagacatgcaaggacgcaagcggtattctcaagaagggtagcccatttgtccctggtgaagttgtgatttttcccaaggggaagcctgggcggagaatggatttgaaggaattttttgcggcaaatttaagggggaccacgttagcagggccttacccattaagggattatatccgtttgtaagaagctataacccactggtcgggaagctcttccccatttaacccgtagaggaagtccctcaaccgaaaaccgcacagcacactggtttctggaccgagagcccaatttaagggtctcgtaaaggcggatattaaagcatcggaagacacacaatttctttctgttttggccgtgacgaggaacactttaaccgtgtttttttcacaaacaccggggtgaactcctctctgggacaattaacccctcagtttgtgaaaagacacaccattggcgtttctcttgggatcttttctgttgttccccacagggcctgagaaaggtgaaatctccatgagacccttgaagaacagtttgtgcgactatgtcctgttggccattattccacatcgtccacaattgtgttctttgcgggcagcagaccgacagttgtccccagaaagcatagagaacaccgtattaaagcgcagaggggggcgggcgagcggcacaacatagagagaaatacacacagcgctcgaagagtgggacacgcacagatggcttatctggagaa

SEQ ID NO: 644185 - DNA, 155 bp, Homo sapiens
gtgtgtcactaaattccttgcccttgagcacagctgtacctcaaccttgttggaataattgtagtcctgaggccgctttcattctgttattagtgaatataaagatagatgtttgtgtcacttgctctggtgagttggttttggtcttggttgtt

SEQ ID NO: 644186 - DNA, 249 bp, Homo sapiens
cctgatctgttcttatacagactgtgggggacacaactgtgtgcacgtacgtgctacatttccagtagatcgcacctggcatcacaagctcagcttcatcttagggtcctgcttgactattacaaacagactaattttaagtcctaggactcaaaataaacatgattttttgaataatagatctatacatcaaaaatacatctacaacaggcattggttcgtgctattaaaagagctctcacgtgggga

SEQ ID NO: 644187 - DNA, 548 bp, Homo sapiens
  misc_feature (238)..(239): n is a, c, g, or t
tggacgcagtacactggatatcattttaaaatctagagttgtttagcactgagttgatgaaaagacggcaggattccattaagttcaaagttctctagcattggacagaaaagccatctacatgtaaccgattttcatcaagttcagaggctcaaagatggaggtggaaaagacagacctcaatgaagagccggagaaactcaggagtcaattgagtcatcagcccaggtgggttcanncctgtggatccccggtccgaggctacaggactctcctcccagggatccaagtgactgtgcagtgaccgtggtccgccacagccaccagccagagtgcagtccacatcgtggccacgtatggctcctacaatctcaagcttgccgagaaggcagccgtaaacccgcacaggctcagcgatctggggtcccgagaatgattttcctttcacaagatgaacatgcagctcaaagggggagtgggatgtggttgcggcctcaactgaacgcctctctggacccaataattaaaaggacttgctcctcagaaaa

SEQ ID NO: 644188 - DNA, 140 bp, Homo sapiens
tcgagctcggcccacatttcgatcgcggagaaaggcctcaagcaacaacttgcatgctgggactggagatgtcgtcattccagggatcttcattgccttgctgctgcgctttgacatcagcttgaagaagaatacccaca

SEQ ID NO: 644189 - DNA, 547 bp, Homo sapiens
  misc_feature (436)..(436): n is a, c, g, or t
  misc_feature (470)..(470): n is a, c, g, or t
  misc_feature (508)..(508): n is a, c, g, or t
  misc_feature (522)..(523): n is a, c, g, or t
  misc_feature (525)..(525): n is a, c, g, or t
  misc_feature (527)..(527): n is a, c, g, or t
ggccacagagccgcgggaccatggcacctgctggacgcccgggggccaagaaggtgagtttcgtcccctcgatcctcgcggagctcctggccgctgggctgcgagcgaatccgttcacacccggcgtgcattcctagacaagccctggggcctcggcaaaacacttggacgggatgggcctgagcctgaatttttccctgtcacgggttgtgtagcgtttatggagcccttactcggtgcctggcgctgtacagagagctgtgctcaagttatctcctcatcttcacaattatccccatttcacaggtgaggctgaggctcggcgagtcaggcgactagctcatggtcacgggtccagacccgcggggagcgaggatcagaagtctagctttcggacgcatgtcgcgcacacatttattttccttaaccgaccctnggcccgagatctttgggcttaaaccgaccggganctcttttgactgtaccctccggtttggatagtaggctnggcacacccccagnntntngtgcgttggagggggggcgg

SEQ ID NO: 644190 - DNA, 980 bp, Homo sapiens
  misc_feature (35)..(35): n is a, c, g, or t
agcggctttaaatatattatttaattgtaggaatnggtttacacagaacttttttggaatacatctcttagtaaagtgaaatataataatataattgtatttagttactattgtagataacttaaacttgagtagtgatttactgttttataaaatgctttcatatatgttatctcatttgaacctcataaccagccctgaaatagtaaaaacaagctatattcccactttataaagaatttgaggttaagataaaaggactcatttaagctcacatggtcagtaggtggcagagctactagtagggaaagaagaaagctagcattaatgaatgcttactatgtgccaggtactacatcctgtcatttaatcttaacctagtctgggagatgcgtaatataattctggtgaagtaatagtttcagtggatgattgaaaacaacaacaacaaaaacaaaatgaaactaatctgctgcctctaatttccaaaaatgtaagaaattttacaattgtgaaaacctcatggatttgggcaaactgaatgtatataggcttttgacaaaagttggaaaaaagtataaaaggaggcctattcttttcagttgaccttttgtaatatttgatttagagtattttggacaaatgctctataactctaatccatttattttgtaactgtacttaaaattttgaatcttgcaactaagtttagcctcattcagaatttttttattttgtgagcataatttattgttttaaattaattttttagcagatagcagttagcacttaatctgtaaattgaataatttatcaagtgcaggaatgtgttaatctaatgggttttgacttaaatgcaccaaagatttttagtaggtattaaatagtttaaaagactttaaattctttcttgcttgaataactatttgtccaaagaagcacagttgaagtcctagaataatggatttttttaaaaaaaa

SEQ ID NO: 644191 - DNA, 170 bp, Homo sapiens
  misc_feature (1)..(1): n is a, c, g, or t
  misc_feature (80)..(80): n is a, c, g, or t
  misc_feature (86)..(86): n is a, c, g, or t
  misc_feature (103)..(103): n is a, c, g, or t
  misc_feature (117)..(117): n is a, c, g, or t
nctgctggctgcttttccgcaactgggctgggccttcttcggtgccgggcagaaggggacaaggcatttcattcttgggnaagtgnccccaatcctccggtgncaggagaaattttnacgtgaaataagtatctcggaaagatggtacgaaaattgagaaagatcccaac

SEQ ID NO: 644192 - DNA, 154 bp, Homo sapiens
catcagatgagggtacgctggtgggtgggggtggttcgttctcgagccagcagactctacactccatcataggacatcgagtccctcctcctcttctcccatgccttgtgtgccacgcctctctgggtcccctccctggcctttgacttcctct

SEQ ID NO: 644193 - DNA, 329 bp, Homo sapiens
  misc_feature (136)..(136): n is a, c, g, or t
  misc_feature (145)..(145): n is a, c, g, or t
  misc_feature (152)..(152): n is a, c, g, or t
  misc_feature (154)..(154): n is a, c, g, or t
  misc_feature (166)..(166): n is a, c, g, or t
  misc_feature (173)..(173): n is a, c, g, or t
  misc_feature (177)..(177): n is a, c, g, or t
  misc_feature (179)..(179): n is a, c, g, or t
  misc_feature (186)..(186): n is a, c, g, or t
  misc_feature (190)..(190): n is a, c, g, or t
  misc_feature (208)..(209): n is a, c, g, or t
  misc_feature (215)..(215): n is a, c, g, or t
  misc_feature (218)..(219): n is a, c, g, or t
  misc_feature (222)..(222): n is a, c, g, or t
  misc_feature (230)..(230): n is a, c, g, or t
  misc_feature (301)..(301): n is a, c, g, or t
agattcaggagaaactgcagcagcctcgattcctgagcccggcccctccatatccttgagatccacttcatcatctagccataatgctatcataaagattcctgacttggggctgagtttaaagatattaggcccngcctggccnacatggncnaaccctgtctcnactaaantacnanattagcngggnaatggtagtgcatcctgnnatcccngcnnctngggaggcngaggcaggagagtcacttgaaccccggaggcagaggttgcagtgagctgagattgtgccactgtactccancctgggtgacagagcgacactgtgtctc

SEQ ID NO: 644194 - DNA, 357 bp, Homo sapiens
gtcacctctcccttctcccttctagaccctcattgcagaggggtcctgctccatacccagaaggaaggaatgccacccagaaaggccaagaagaatctgttgaggcaggccttgagggtttcccacttcagtccaccaccattaggtcagaacctttcatggaatctaagtgtaaaaagttttccttgggtcttcttttctgaagactctcatgtcagataaaacttacatatctgttatgcttttctcctgttaacctagctttttgtatgactacagccatacctgtgctacagctgcctgcatgccttcccttcccttcaaatactagctgaacctctgaccaaagatatggcc

SEQ ID NO: 644195 - DNA, 1256 bp, Homo sapiens
  misc_feature (1255)..(1256): n is a, c, g, or t
taaggggagcgcgcgaagctgaacttgtgcgctcgatgggggccgttagcctgccctagagctgcgcggagccgcagaggcgtagctggactacaacgcagtgcatctcgtggagtgccaactcgactggactggccccctcatgccctggctgctgagctgccctgtgggcacctgccctggacatgtgccctggcctgcctgagctgctgcccagctgctgaaatgggagcacctgtctgcacctgcttggatggtgtgtgcctggtgtttgcctgccatgggaccctgcccctgctgctggatcctgcatgctgctgctgtgtgaatgtgatgtacatgcctgaccctgcctgccgtgcaatgccccggtgccccctgcccatgccagtttgctgtccgtgccactccgttgcttgcttggccacctgtgctgctaccttggcctggtgaggttggctgtgagagctgcctgacatctgccctgctgcctgagtgtggccagcttctgtttggcagaccgcttgcgagcttgtgcgcctggacctgtgcgctgcagggagcgggcgacgccgaggcaggctggtggtgctggaggcggcgctggccacgctgctggccgtagtggcgcggctctgggcccgacgcggcgcggggaccctgggacccggtgctgctgcatggcccagtgtgcaggagggcttcggatcggctgctggtgctgatacgcgcggggcgcggtgcgaagccccgacaaaccgctttccaggggcctctttcatgctctataacctgggctcggttggaagccttgaattgaggttctacagatggctgttggcttgtgcgcctgcctgacatcgaaaggcttgggggaatgtgctccgagagggcatgtgcgccttgaccggttggtcagaacatgggctactggcgagttggctgtgactgccttgtgggacagccagcgggaaacctggggcggatagatcgggggcttagagccccatggggagagattggacttgggttcagggaacaccttggcatgtgggtcgatgaggagagaactttgtagaacacggtgagctttagagaaaggagatgtgcatgcacgagcgagacgaaaagcgcagcgacgcgcgtactgaagtgagaggaatgaagacagaacgatggaggcagcgaagaagagagacgcaaggacacgaagcagacatgtagattgctactgccgacgtgctctctctaagcnn

SEQ ID NO: 644196 - DNA, 344 bp, Homo sapiens
cgtcgacctggtttcttttattctgcaatatttttaaaaatcacattttcagccaggcgcagtggcccacacctataatcccagcactttgggaggctgagatgggtggatccaaaggtcaagagatcaaaaccatcctggccaacatgatgaaaccctgtctctactaaaaatacaaaaattagctgggtgtagtggcatgcgcctgtagtcccagctactcggcaggctgaggcaggagaatcacttgaacccgcgaggcggaggttgcagtgagccgagatagcaccactgaactcaagcctggcgacagagcaagactccatctcaaaaaaaaagtcgac

SEQ ID NO: 644197 - DNA, 1175 bp, Homo sapiens
tgggggaaattggggggcttccatcttatatctcccacaaaaaaacggttatatataggaacccgcaaaaaaaaaaaaaaaaaaaaaaaaaaaaaaaaaggaaaaagaaaagaaagaagcacaagaagagcaccgagacagccgcgcgggacggtcgcacgctgtactagtgggggtggctgttacaggacggcgaccatcccctatgcagacgagacaggtgcgtgccgatcaaggcggtcacacacgccgcattcaatttccatgtatgtctaatcaaaataccataaaagattaatcatagatactagacatttactcgcacatacataatgaaacatgaagaaaaaaacatatctcacatactccgtcattacaaaaataattcatgccgtcactatctattatgactatactcacgcaatccagcagagacgcgaagagagacggacgcacgccacactgcagggccagtgacgcggtgggacggggggcgactcgacgcggcccacagcgacgacaaccaagcgatggtgtggtggacggcaagcggggggcagccgagcgcggagggggggagggataggtagggaaaaaagggggggagggaaagagaggagggaagggtataatggcgtgagggtggggaggggagagggacgggagtcacggaaggaggaacagaagaagaattagtgtgctgaagacggcggtgcggcggcgctcgggggtggcgtagtggaggaggagagggtgggatgattgcaggcggggaggcaaggggggcgggggggcggcggccgcgtgggcgagggacgggcgccgaagcgagaggggggggggaccggacgcgcaggggggtggtggctgcggagacggcgagaggagggtgggaattgaggtatggaaagtaagcgcgagaaagtaggggtgatggtgcgagggggatgcgcggcgcgcggcgagggagcgagacggccggggaggtcggaggggggacgacgccacacacacaccacgccaagaagcaacccagcgaacgtagggctgacgagagagagtgaggagtgggagatgagcgaaggcaccagaaagaaagcaagcaagtcggtccggcgaagcagctccatgacaggcgagaggacaggcgaccgacgaacgagaaagcgacgaga

SEQ ID NO: 644198 - DNA, 91 bp, Homo sapiens
ctcagccatccagcctgtctctactgggccccacttctctggatcatagaccctgcctctgtttgaccccgcactgactgaataaagctcc

SEQ ID NO: 644199 - DNA, 1473 bp, Homo sapiens
gtctgtgtttacttcgtcggtgcttctgactgcagtatgttgtgttgtttgtctcttgtctgcgtcactctttgcctccttggtcatgttatgttttgtttcctgcccagcttcctctttcttggttggttagtctgtcatatgtgcggcgtctctctgtgtacttattttctcgtgcttccgcgtttgtgttagttgttggttctcttctatctttgcggttctctttcggcgtcgtcatagtatccgtgcgatattttatgggtgtcggctctatagtatgtgtctcacgctcgtgcgtatcggtttcattcttcttcacatgccgttagggctttttcattccgcttatattttctccttgtatatatgtgggtcacgcgctatcttcgttgtatgtcctgggtggatttcggtcctcgtgtctctcgttgtcatacttttttgggtcgtctatctatttttggggggcccctcctcgtttctcggggttttctctgtcttactgtttgtggtatcactctcctcatggatgttcgggtcccgattcattgttcctccataatctttaggtgtgatatactttcctttgtcttggacgtccatagtccaaagccccgtctatcactgggcgtctattcttgggctgcgtgcaagttggtattcgttctgtcttaaggatgtgaacggattaaccagtcctacggactcgccaggccgaagtgcggggcgtgattcagattacctgttcttaggatcgtttctatgtatcttaacttagtatccattctgggctcatattagtatgtgtgtccggacctctgtcttttatctttgtctatagcgttcacggcgttcctaggattcaacagttctttcggtatcataggagcgataagtgtcgtattactctctcgtcgtcactgcatgctatggttgtctattgtgtggacgtaaggttcacagggtctagtctattttccatcgtactgagtcagtagagtcttatcgtctacgtgtcggtaggagtcatagagtcagctctccacctctagaagattctaggtcatggttcgtattatataggtattcgaggtagtgtccaatccccgtcgtaggtcaatgtattcaagtattcccaggtctattgttcacgtacccatacgatagcagccgtatcataagtccagtatctcctatctccaaaaagatagtcgttcccctatcaggcatagtcctcgcgagaagtgcatagtcctgaaagaatggtactggaagctgctcgaagttgcaccctttagggtaacaagtgtattattgtttagcattattataagggatttgtgatgtgctgtaaagtgtaacctaggaaagatgattcaaccatctaatcataaatggatctggaattaactaatgtaaattcacagcagtaagataatataaattttgttgaataacatcgaacgtcat

SEQ ID NO: 644200 - DNA, 589 bp, Homo sapiens
  misc_feature (2)..(2): n is a, c, g, or t
  misc_feature (14)..(14): n is a, c, g, or t
  misc_feature (560)..(560): n is a, c, g, or t
  misc_feature (571)..(571): n is a, c, g, or t
cngtctcgggtagnctttatcaggcagtgtgaaaatggactaatacatcagacgagtcctttcattacccatgataaagtgaggcaacaaacaccacccactctggagccttgtctaagcagagacaacaacagtatcacgtgcaaagtaccaaaacgtgcccttctcccatctaagaagaatggcaggtgcttccttacccatcacagcctcattctgactttcctcccctacgtaagattccttaggttacacagagaattacctctgcagagaaaagtcccccttccttaaactcttccccccaaatcaccaagcacaagcccagatcaccgtggcatacattctcctttgtgacgctgagcgataaatccgacttgcttaactatagatgtgtactcagtggtcttcaatgctggagggcactgagaaattaaactatattattttttgttgaaattaaactatattatttttgttgtttttcatccactttgtgtgcaaaagcccacggtactgacaggtgacaacgtgctagcagccctcgcttgctctcggcncttctcggccntcgtccactctggccgcg

SEQ ID NO: 644201 - DNA, 137 bp, Homo sapiens
gcggccgcctactactactactactgctcgaattcaagcttctaacgatgtacggggacatggcctgctgggcttggctcggcgcccccacccctggctaccttgtgggaataaacagacaaattagaaaaaaaaaa

SEQ ID NO: 644202 - DNA, 937 bp, Homo sapiens
  misc_feature (871)..(871): n is a, c, g, or t
tttaatcagtagatgtcagagttatacgggcagcattgagccttctatgcttggcgatttacgaaataatagattggtgtcattctataattgcgctagcatcttagatctgagagaagatctgtatacttgtaatgacggaatggtgttgacgagacaaggaattttgttaaaaagctatatcttcactgttatgtgtaacgacgattatctacattctaaggaaattgattaaggatcccccaccctggcgagtaggtacccagtataaagatacgggactcaatagatgttacagccaagttttggaacgggcaaactatatttcgttaatgagaggccagtccttcatgtcaagcatttaaaatgacttttagcgaaaattattgacacgtggtgggagccgtagccaagagattgtccctcagagtgggcccctaggattacagcgatgaccacagtattgactgtgtgcccactggctggttcccatataaggagtagtctaatttaagaaaggcgaaggcggctgggccagacgattacttgaaacgcgatcttgggcacggggtgaacacggtgacttacctgtgcgggaattcctctgacgctaagagtatacctttataatcccagagtgatgtttgcgacataatgtggcgtcaccaaactttaccttataatggaacatcctaaaaagctgctacagagggtacaatttttacaccgctttttattaagggggcgactcactgcgtgctttaccctctttagaccggactaagttgcttgagcggcttgagcacaacgcatgggggcacaacgacgcaacgtacttggacgcaaacacttctcattacgccgacgatangctaaaataataccggccatctcacccaggtgtacacctcctcaggaacacctctcatcggcagcc

SEQ ID NO: 644203 - DNA, 102 bp, Homo sapiens
  misc_feature (37)..(37): n is a, c, g, or t
  misc_feature (79)..(79): n is a, c, g, or t
  misc_feature (88)..(88): n is a, c, g, or t
accagcagcctcggggggcaccccccgcccagcctgnctccctcccgctcagccctgccagggttccccagccatgaanctcttccgnttcctgggagacct

SEQ ID NO: 644204 - DNA, 467 bp, Homo sapiens
  misc_feature (108)..(108): n is a, c, g, or t
  misc_feature (130)..(130): n is a, c, g, or t
tagtactgtgagagggattctattactaacttctggaataggatccttcaggagagtatcatgctcttctggacatcttcactcaaaggaggcccttgagaagagcanatcaaaacatcaataggcaggnttctgggatctcttagtttcatctctcatttttatatgggaaagctgagacccagaaaagtcaggggttttgtttccctagccttagactcttcattcattcattcattcattcattcattcattcatttaccttacagatatttattaaaaggcgtactttgtactggatactagttgctggggatacagcagtgtaagggtctctgcgctccggaagcttataatttaggggagggagaccgaccataaccacaaaataagtaaatatatcacgtcgagggtggaaaagctatagagaaacgtcgaattgaggggtcccgggctcaatcgtaaca

SEQ ID NO: 644205 - DNA, 173 bp, Homo sapiens
cagccgccaccgtaggctatagtgtgcacacattcaaacagcagacagagctatttatatagaaaggctggaatgagggattatgagctaaagcacattaacttcttgtcaactgccacaacaaaacagaactgagcatatgagtgttagtatactgaagcgcatgttatacc

SEQ ID NO: 644206 - DNA, 392 bp, Homo sapiens
gtcggaggataaccgaggcgttgctggaacgagagatcccagtgatggtagtctctgagagtcgatgacggggatcgatcaacaggcagtccgaagcgcagcgtcggatatcgagttgcacgcgcacgtgcagtcatgccattgcactccagcctgggcacgacagagcaaaatccgtctcaaaaaaaaaaaaagaggtaaccatccatcagggtaaacaagattatactggggattggtcaaaataatccttggctacttttgaatggtggaaaattattctcaaaattccttgaagatagggtaacgggatggcttaaaaatgattgattgacttgcaaaattagcaatatttcttgaaaaatattctggcatgatgtatactatatata

SEQ ID NO: 644207 - DNA, 381 bp, Homo sapiens
tactactactaaattcgcggccgcgtcgacggctgggcatggtggctcacacctgtaatcccagcactttgggaggcccacgcaggtggatcacctgaggtcatgagctcgagatcagcctgttgaacatggtgaaaccccatctttactaaaaaaaaaacagaaaaacaaaattagccaggtgtggtggtgcatgcctgcaatcccagctacttgggaggctaaggcaggagaattgcttgaacccgggaggtggaggttgcagtcagcccacatcacactattgtgctccaacctgggcaagaagagcgaaacttcatcaaactaaaaaaaaacgtcgacgcggtcgctaattcatgccctgcagatggcgcatgctct

SEQ ID NO: 644208 - DNA, 225 bp, Homo sapiens
  misc_feature (39)..(39): n is a, c, g, or t
catcctcagcacaatatttctttgtgcttatatatgtgnggcaacagagatatatcgcacattataaatatggtttggtacaccacgcacgctctttcgcttgagagtcttatgaaagaatatacgaaaccacatgtcactcacataatttaaaatgttccggtaatgtgatgcctcaggtctgccttttttttctggagaataaatgccgtaatcctctcccca

SEQ ID NO: 644209 - DNA, 200 bp, Homo sapiens
ctgcttaagcttcaccgctatcttacccagagagaccacgtctgtctctgcatccagtcatagaagttctgggcattgtcgagtggggtctccctcaccgtaggttgccatgcagaaaaccaccaggacgttgtcgatctctggcagagctgctacaggtcggccagcgtcatactccgtcaggatccgcatgactatgc

SEQ ID NO: 644210 - DNA, 93 bp, Homo sapiens
ctagaagattcagcaaagtacttttgtgctcttggggaacccctcctagcgtcacacttctgggggatacgcgaatatgccgataaactcact

SEQ ID NO: 644211 - DNA, 282 bp, Homo sapiens
acactaacttcactcctattaagacaactaaaagcaagaagacagataataacaaatgttgacacgaaatatcaacgctcataaactgctaagattgtcaaatgcgactgccactttggaaaacagtgtagcagttcctcaaaagattaaacattaagtgaccatatgactcagcaattctactctcaggtatatacccaatagaattagaaatatatgtgcaggccgggcgcagtggctcacgcctgtaatcccagcactttgggaggccaaggtgggtgg

SEQ ID NO: 644212 - DNA, 836 bp, Homo sapiens
atcccggcgactgacatgaataattacaagaggttggatcatctatgttggctgattaccatattgtacagcacatggcattagttacgcacttctattaaagttctatctacggaaatgtatttcgacagttcaatgcatgtgtcatattctggtcacttcattatatatagaatatggcgtacatgataatgagggacgagtatagagccacttaatcatgtgtcaggtcctagattagataaattttagcagctaagtcaggtctcaattcacttttgcacagttatcaagagatgtacatttccgatcagttaaccatttactattaatgtggcaagttttagcatagtctgtactcgagctttttatttggttcagacctacttcaaatagatatactttaaaagggaacaagagaagctctcaacatttcacaattatgcatatgttattgtagccattttcacacgtttctttaagaaggtgtaaacctccatgtgtccttgatagtttgttactcctttcatttatacaatactgataccaggagatttcttttaagattctgagttagcagagttcaaaactatttgtgtgggaaacaagccaacttagtaacatatgcggcaacacttctggtttagctaaaattatttttccaatgtaggaaatccacactgtttgtacgtctgactgaggagaaaagatgctcgtctccagcagagaaaagtggcacagcattgtgggaaggtgatggtctccctcctccctccccatttcatgtgggtacgtacagggtgttcggaccttttacataaacctttttttacttc

SEQ ID NO: 644213 - DNA, 394 bp, Homo sapiens
  misc_feature (162)..(162): n is a, c, g, or t
  misc_feature (342)..(342): n is a, c, g, or t
  misc_feature (389)..(389): n is a, c, g, or t
acttttagtagagacagggtttcaccatattggccaggctggtctcgaactcctgaccttgtgatccacccaccttggcctccaaaagtgctgggattacaggtgtgagccaccacgcccagccatgtcgggtgctttctctcactggttgttaaacttggnctgcatgtttgaatagctagagatttttaaaaaatactgatgcctggggcctcaccttcagaggatttaggatacaattattgggggtcccaggaatatttttaaagataggtattgtcataagtatttaggttacggttgcacctttcaaaaaaaattgtagggatttacctttaaggncccaatattttaggggttttggaattatttgtgggatggaaaaaacncctaa

SEQ ID NO: 644214 - DNA, 165 bp, Homo sapiens
tttagtaggaaagtggttctattgtgaaacaggagttgtgcctttgggccagatgctgggtctgggtcagcatggacatgattctccaaatcttccatcctcggcaaggaaatatgccaccagggtcaacccacgggcaagccacggtctacccacaagccacgg

SEQ ID NO: 644215 - DNA, 219 bp, Homo sapiens
atgcccggccagagactcaaatttctaagggccattatttaaaggctaatacaatttattttaaaaatattttaagaccaggcatggcggctaacgcctgcaatcccagcacctcgggaggccaagacgggcggatcacctgaggctgggagttcgagaccagcctgaccaacacggagaaaccccatccccgctaataatacaaaattagctgggcgt

SEQ ID NO: 644216 - DNA, 1205 bp, Homo sapiens
cacaggacactgacacagtagagcagggactttttacacacgtccaatagccaaactacgaactttcaatctatgaactattttctacacccactcagaactgagtgaaacaacttctacttatttggctgtacccggctgctacacttccataaaagtcttactctttctcttctccattccagggtgcaccgtctcttactcaattcttatatccagtgcccattgcgcggcgctgctcaacggtttcaatattacgttaacactttcacctgtgctccactctacacgaacaagccgcctttgctctcacaaaagtgctctcaaacccgctcacataccgacacagggcgcgcaataactctccacgccaccctcctccccccgtggcttaccacaccctcctaccagcgcttcctctacgtctctgatctccctctcacgcacgcctcctcaagcgcgctcccgtggctaccagtttatactgggcgctcttcgactcactctctatacaccacaaccctctcctcacacacccccattaccctcactacataccacataccgtgcgcgcgcatccaacgctactccacacaactatctacatccttccccattctcaatctctccaacaactcattcccccaccccacggtcaacccaaccctccaccactccacgggactaccccccttcttctcttcacgcctatcctattccccaaaacgtctgacacttgtgtcccctcctattcagttccccctccgtctggcttacaacacgacccatgttcctaacgaggccgtctcacctcgaccccttccctggcggcacaccttcctgccgcacaccaatgtacaccgcggcatctgacctcggcgcctggtccacccaaatatctttaccacacatccccaccaacccacccccccccacctcaccgccccacaccccgcacaccccccgcaacaccccctcaccgcacaactagcacacccgtccacaccacctcaccccccctacgcggcacaccgacacaacgcacgcccacacacgcgcacgccaaccccagccaaccctccccccgccccccaacagctacacgtaagccgactaccacacggcagcacgacacacactcagacacgccaacgacgccctagctcgcccacgcaacacacacactcaacggcggctccacacca

SEQ ID NO: 644217 - DNA, 475 bp, Homo sapiens
acgtcatagctcaatgcattactcacaggtttgcggtcatgctgatgtaaactaacctactgcgctgccaggcttataaacgtctagcacatacaattacatacagtgcataatatacttaataacaaatgactatatgactcctttgtgtatttactatactatacttttcattgtcattttagaatgtatttcttctacttacaaaataaaaaagttaactgtaaaatggccttaggcaggtccttcaggaggtattccagaagtcactgttatcacaggaggacagctccatgtgtgttattgcccctgaagacagtgggacaagatgtggaggtagaagacagtgatactggtgatcctgaccctaacgtgtgtaatgtgtgtgttcgtgtcttcattctaagaaaacgttttgtacagatgtacagtgtgtttgagtttaagctaagtgttatttcaagagtcaaaaaga

SEQ ID NO: 644218 - DNA, 1413 bp, Homo sapiens
ggcgacacgctgggcgaggggacgagaggctaacagattgtgaccccggctctccaaggcaggtgctgacactcactcatcactctctggccggacacacgaaaagtgtgaggctgccaaggcaacgctctggaggcattggcttcctgtcaccacttgaacgctagaggtgccctttgaccttcaccgcttacgctctattggcgcagacaacggcacagctggcgactccgcacagcactgcactggcactgacgctctctgagcgctgacaccatacaactgatcccgcgcaccctggagcctgccagctctgacactcactcgcccatccacggcgcccatcgccatggccacacactcccgcgcacacgtgggcccaacggccctgggtatcctgccatggcgagccgctgctggcaagcgacgccttaacgaggggcaccggaaggcatggggagggcaccccggggcccttgctaacgcggacggctccttacacacgcccctgcaggcgtggctccaccctggctagggaccccccgctaacagttacgcaagttctcccaaatggaactttcactcggcggcaaggcacaagggcgggcggcccagcgtaaaccttttaagcccaccaaagaagttcccggatatggagacccgccacctccaccggcttgcaaaaccaacatcagccaggaactcctaccaccgttggcacctacccgcggagcgggaagtgggcggaaaaaccccgaacgcgcgccccgcgaggggcaagcccgcacaccagctctagaccccaacctccaaccagacgggtgcctaccgggaacacaccaggcaaaaccccagccaggcacaggccgtggacccaaggcgggcacacggcccatacctaacctggcagcaaaactcggcctggcgcggattgaaaaccccttggcatacgccacgcaactgcagctctaccctgcgacaccgcagcggctcccccggcccgtgtcggacccaacacggatagacttcaaacctgccgcccagcacaactccacgttagggagcgggccccccgccggcaccaccaccccccacatcccgccccaaccaccccgacgggcaaccggaaagcccccaagggactcgcacccactcccgggccattcgccccacaacgaagccggcgagcccccacaagaaacccacccaacgatggcggcccacctgcgcgcaccgcggcgacaccccaacgcaccactcggcgccggggacgcccaccggcacccacaatagcccgacatcctggacagagaggacaccaccgcacaatccagaccgtcgcgtgggaccacacgaagggcccagcacagcggaccaacacacggagagacgcccgcgaccgcagcacgcgcg

SEQ ID NO: 644219 - DNA, 103 bp, Homo sapiens
ttcagagttggcgacaatactgaggcgacaataacctgagtttgggttgcagaatgaaatcactcctgaagagagcagtgaaggtctcagcagaagcttcccc

SEQ ID NO: 644220 - DNA, 190 bp, Homo sapiens
  misc_feature (54)..(54): n is a, c, g, or t
  misc_feature (170)..(170): n is a, c, g, or t
  misc_feature (187)..(187): n is a, c, g, or t
ctcacatgaatgcactcacctcctagaaggaccaggcttccatcatgctctggnaagcttgtggagaatgtcaagtacgaagatatctatgagatgttagtccacacctattcatccatggaccggcacgatggtgtcccgagccacagctcgcggcctctccccagctngggctcggttttcccanggg

SEQ ID NO: 644221 - DNA, 123 bp, Homo sapiens
aagtaagacactgtctcaaaaggaaaaaataagataaaatatgagacaggttatgatacaatgttaaatgcaaaaaggaaaatgtaaaatgatacctagtggttaatctcaatcatgtagata

SEQ ID NO: 644222 - DNA, 206 bp, Homo sapiens
atttagatttttctagtgattttgtaaagcagatcatatatggtcccctagttcagcatttttccaaacttgttgcccacccatctattgttaaaagtatcctttgcattcatattataacaaaataatatttcctcttcctggacccaatcccctctattttttaaattcgatttccctttttaaaagttggtcccccctcgcta

SEQ ID NO: 644223 - DNA, 128 bp, Homo sapiens
atggaagagagaggcccatcaccttgcccttcagtgttcaagcaggggacatgcacctctttagtaacctggatcgggacccatctacatgacaaccatgctccaacgaccatcattcatgaagccgc

SEQ ID NO: 644224 - DNA, 281 bp, Homo sapiens
gctcgacaggtgaaaaaggacatatcttcccataaagactagacagaagcattgtcagaaacttactcatgatgtgtgtcctcaactgacggagtagaacctttcttttgatagagcagttttgaaacactctttttgtagaatctccaagtggatatttggatagctttgaggccttcgttggaaacgggatttcttcatataatgccagacagaagaattctcagtcacttctttgtgttgtgtgtattcaagtcacagagttgaatcttccgtcgacg

SEQ ID NO: 644225 - DNA, 1165 bp, Homo sapiens
  misc_feature (10)..(10): n is a, c, g, or t
  misc_feature (219)..(219): n is a, c, g, or t
  misc_feature (545)..(545): n is a, c, g, or t
  misc_feature (558)..(558): n is a, c, g, or t
  misc_feature (739)..(739): n is a, c, g, or t
  misc_feature (788)..(788): n is a, c, g, or t
  misc_feature (1038)..(1038): n is a, c, g, or t
ttgaaatctncgggccactgtcgagggcccggcggcggcgaccgcggcggacacatcagggcgagagcaggacgggcgagggcgcccagcgagcgccaggagcaaggtgagcgtgcgtgaagatttattgtatatatatgtcgactaggcttctgcgttctctgttgtgacacaccacaccatgcccttacgacctgtttctgtcctttggtgttatantatagttggacacccgtggtaggttcgataggtatagattggggagggagggagggcgcgggggcgcgcggcgcggcaacgatgtatagctagagaatattgtttgagtacatttttatgtttatctgaggtcagtgccctcttctctccgcatctccacaactatagacctacgatcacgactatcatgtacgaccatcaaacaatgacgactcacctatctgcgcgggggagaaaggcgactggttgtgggtgagaggacaggaagtccacgagacaccgctccgacactacagccgtcctctaactacgttgggagggtgagngtacgattgtcgnatagggagatagacagtgtgtcaatacaagtcagagtcctcgcgcgactctctgctgaggtgcgacattttgatacgcgtgtgatgttgtgggtgtcgcgtagctgcagaaggtaaggtgacgagtagatcgacgcaaagtagaacatgggcgaatatatctgtctgctgtcatcggatgntatacgatacatgatctagtcgatctcgttcgtatgcacgcgttgctgntgtggcagcgcagcccgacgtcaccagcgacgcgtagcggacactggtcgagcgcatcgtttacacgctcgctctgtgtcacatgataactcgtcacgtaatctcatgaggagtcgtattctatctataatttatgttccacactagtttgttatgatgcgtctctactacggatacaacaatagaacaatgcgctgagacaccaggcaccagtctcgcattcatccacacacacgtatccatgtaatantatccatagtcatgtagatcacagacctggtgagcgacgcgctaaggaaaggctaggtatcgcgactaatgtgcgttatgtagttagttcctacgctactcattgctacagttactgtcctagatat

SEQ ID NO: 644226 - DNA, 925 bp, Homo sapiens
gttaggcatggagctgtggtctgctattgctcatgcgagtgcccggagagacccggtacgagagctacgccggggtccaccgaccgagatctgctgcccgggcccggaccgctcatggcggcatccgcaagaagctggtggtggtgggcgacggcagcgtgtggcaagacgtgccgtgctgactcgtggttcagctaaggacgagattccccgatggtgtacgtgcccaccgtcttcttataacgtatgtggaccgacagttagaggtggacggcaagcaggtggagctggcgactgtgggacacggcggggcacaggaggacatacagaccgcctgacggaccgacatcataggagttatccactctgaggaggccacaaaagccgttaacgacgtaccacagcgcttcacattgataacaaaggtgagatcacctaataggtgaacgtcgataattatacatgcataagaggcacatgggcacgaaacggttaataacgaacgatacgttgaacatgggggaaaaaactggactaagacattggggaactcataatggtggaaaggggaaacactataacattcatggtggatagatgcagccttaagtatggggaaccaaagagagtagacgcgttaaccgaggaggcaatttctaaagaaggacatcttagaagcggtacaaactcgatacaagagttcgtacttaagaaggatggatgaatacaaacgtggataggtttcagcaaaaacacgttgagacctttgggccaacttagttggtcaatgtcactgtgacacatgtgacgaaaaggatacaaaggaccctataaacaatggggggataacttgaagattagtaaattgcaaagaaagataggtaacaataagccacccaagggagaagacataaaagtggaaata

SEQ ID NO: 644227 - DNA, 942 bp, Homo sapiens
gaatgaggcatccacctcttggtgtaagtggcctctgtggatgacgtctctcatccttgaacgcagttgcatagttggagatagcgcaggatcctgtcttcagtaggagggcccgaagcgggttcctctggtgtcaagctctttggaggtagcctggtttgcatgactactgtcccagagcaggtgatgatgaatgatgggtgtgtgcagagggagtgggacgcagtgaggcaggggtcttccagctaggccgctgacgagagcctcgctttccgagcaggcaatgatacatccgctgtgctgaggcaagattcaagactccgataggcatgtctcctgctcccagtctgcttaggaatggagtccttcaggcgcttgagtcccagattttccagtgatgctccgagttaaggcagcgtgataggcacaccccatcgtccagggaaagtgacgttcagagatactatggtctaactgcatccgtgtgttgaaatttgaggaccctgtccccatgatgattatcactcttgtctgcatcttgtttctttgtaggccaggggtatgaaggcctcattcgggtgcgtgggcatgggtcagtccatagacaattccctcactcttgtgtgcataacagcgaactaggaatacactaataagggttacaactgtactccataccgttactgtctcgccaggcattaagctaagtgctttacatatattaaagtgatttgaatcctcataagtgacgctatgaaaggagataccatctcaacccaattgaaagtgggttcgcaagaatcgggagggatgaaggacccaggggaaaatgcgagggaaaatcttgacccggggccaagctgggatgtcttgatgctgggaccaaggtatcacatgttggagttaggaccacctaaaggagattcggggggcgggggacac

SEQ ID NO: 644228 - DNA, 166 bp, Homo sapiens
  misc_feature (51)..(51): n is a, c, g, or t
atagatgagctggtacctggttctcaactgcagttggattaacgtcccccntttttccggcgcttcggcgccgctaatttcatcggcctgattgcgggccgatgctgttttatctgggcggttcgcggttgttaattgcaaaatcggtgatggcaattatgattag

SEQ ID NO: 644229 - DNA, 120 bp, Homo sapiens
gaggttgcaccactgcactccctcctgggctacagaacaagactccatctcaaaaaaaaaaaagtgcttcataaaattccttcatccgtgaacttgctagagcaatgcagggtgtaccga

SEQ ID NO: 644230 - DNA, 225 bp, Homo sapiens
cagagatgatgccactgcactccagcctgggcgacagagcaagacttcatctcaaaaaaaaaaaaaaaaaagctgctgaaatcaggcagcgcctttaaaattcccggcccaggtaatttcgaaactcctgggcacccggggatagggccctttcctaggccctgtgcaatttacccttcttcctcacatttagcacttggggcccagtgttctctaaaattctcc

SEQ ID NO: 644231 - DNA, 209 bp, Homo sapiens
  misc_feature (40)..(40): n is a, c, g, or t
atgtgccctgtgagctactcgtgactgcagcttcccacanggatacagtcataagcaaaaatatttttcaaaggcagctctggataagagcttttttttttttgaaacggatcccgccctgtcgcccaggctggattcgcagtggccaatcttggtttattggaacctccacctcctgaataccagtggtcctccaacctcagcctccc

SEQ ID NO: 644232 - DNA, 409 bp, Homo sapiens
cttcgcctgctccgtcccgccgtgccacttcgcctgcctccgtcccccgaccgcgaggcatgtctgtggccggctcggagctgccgcgccggacctaggcaccccggcgcacaggagcgggacgccgagccgcgtaccgccgcacggagagctgaacggaccatggggcagatccaagagatcctccgctgcggcgtacaggaaggacgaccgcacgggcaccgggacccttgtcggtattcggcatgcaggcgcgctacagcctgagagatgaattccctactgctgacaaccaaacgtgtgtactggaagggtgtatcggaggagttgctgtggtttatcaagggatccacaaatgctaaagagctgtcttccaagggagtgcacaatctgggatgccaatggatcc

SEQ ID NO: 644233 - DNA, 200 bp, Homo sapiens
gggtgagaaaggtccgcgccagagcccagcgcgcctcgtcgccatgcctcggaaaattgaggaaatcaaggacttcctgctcacagcccgacgaaaggatgccaaatctgtcaagatcaagaaaaataagggacaacgttgaagttttaaagttcgatgcagcagatacctttaaccctggtatacctgacaaagagagg

SEQ ID NO: 644234 - DNA, 440 bp, Homo sapiens
tgtgaatgatgagattcaagtataacgaagaactccatgagttcgctaaaatataaattgatctttatatattacacatacactattttagctaaatgagaaatgtgatggatatatacatctttcccttattaaatacttagtcaaaaacaggcatggtaaaatatcaggcttcggctcctcaggcctctgaatgacaagttacaacgttgattgcattgttaggatggaccttacgtggagatgttaatggtgtgtcccatcggaggcatcacagacatgctggccaccatcttctccctgttcctgcagattctctactctacttctgcacagtgttgtcaagcccagcttgactactaggcaacaaagctgggattagactacaactggtgaactcctcatttactgcccttttcatgttacctttctgcctttaa

SEQ ID NO: 644235 - DNA, 378 bp, Homo sapiens
  misc_feature (9)..(9): n is a, c, g, or t
  misc_feature (31)..(31): n is a, c, g, or t
  misc_feature (83)..(83): n is a, c, g, or t
  misc_feature (122)..(122): n is a, c, g, or t
  misc_feature (189)..(189): n is a, c, g, or t
tttaaaagnctactgttcctagggtaagaancgttgtaaacagtaaaacctacacaatgggtgtttgggttttttcctcacantaaaaaaaaaaatagttatagcaggcatggtggctcacncctgtaatcccagcactttgggaggctgagacaggaggattacttgagcctaggagttcaagaccancctgggcaacatacagagactccaactctacaaaaataaaaataaattagctggatgtggtggtgcatacctgtactcctactacgcaggagactgaggtcagagaatcacctgagcatgagaggttgaggctccagtgagctgtgatcatgccactgtaccccagcctgagtgacagagcaagactct

SEQ ID NO: 644236 - DNA, 277 bp, Homo sapiens
tcgattaaggatcccggtcttggagtagcatcatgttgtactgttccatgggtgaaggctctaacacggccctgtaaaaaccctctcagaggctttgatggtggatgaggtggccaacaatgggagaatttggggagatccttagggtctttagcaggttcgggaaggggaggtgggctgggtaagggatgataggagagagagagagagaatcctctagggacgcccagccagagcctatccccttccggggttggggcaccaaaatgaaggttag

SEQ ID NO: 644237 - DNA, 132 bp, Homo sapiens
tgcctacggagatagtatgaaatgagcagtagagaagctacggatgcttaaaacattcttgattaaattactacatagtggtaagttcaacagttttaagttacttaattgaagccctcagaagtgcaaaga

SEQ ID NO: 644238 - DNA, 622 bp, Homo sapiens
  misc_feature (493)..(493): n is a, c, g, or t
  misc_feature (582)..(582): n is a, c, g, or t
  misc_feature (597)..(597): n is a, c, g, or t
  misc_feature (602)..(602): n is a, c, g, or t
gtatccggatgggctcattttatatgtgttttaaactctgagctagaaggcaacactactttcttgtgaagcacaccatctgtccttggccctagggagctcctgccgtcggtcactgggtcccctgatgcacccctttcaacagacttttcattttggggtacgtcctgacttcctggcactgcagggtgctccagcctcctcttgcattccctgccctggcccgggaatcagccccttctccaaggagccccgggtccttttattggcaagtcttaagagagtgaggcctgggtgccaggcagggagccccaggtccttttattgggaagtcttagagagtgaggcctgggtgccaggtgggtgccaggtgggtccggtgctgctgggatgttgtcacgtggaggccctcagctgcagagcagggacgagggtgtcacctgttcagctgcagagcagggatgagggtgtcacctgtgtgtatgaacatctncgcagccacttctgtatctgtgaagagaacatgagttcatgctactgcctctgactctaattcagaccccaaagctccttctaaccttnctagaacgttatttntcagnttaaaaaataaaaagaaaaa

SEQ ID NO: 644239 - DNA, 836 bp, Homo sapiens
atcgtgccactgaactccaacctgccaatagagcgagactccgtctcaaaaaaaaaaaaaaaaaagaaagaaataccttggaagaaaataccgcacatcagaggaaagcttattttctggcatggggtctttccaaagatagaatattggaaccatgtttcctagccgatggtgtggatgagggtgagctgggctgaggcatgcgctcaggctgggggggtgggtggtgtaaaaaagcgacgtggagccacaagagggacctcctatagtcagctaagggcttccctttctggggcccagttttggggtgaagggtgatttctattagacacaatctggtgcttcagtcatagatgtaaatagaggaagcagctttctccggcggcagatttcctgaatagagtggctgaaaagagctctacttcgggactcaggggcaacgttgaaggccagtcgggtggtacacagggctgaggcacgggggaaagaccgtgccagctagttacattacgcctctgacactagtactcccattgagtggcttccagtgacactgtgcctggatcagaattctaaactctctggaattccccgtggctggcgacttcctatggcccgtggactggtcccagggtaaccctgaatgcccagatgctatggggtgcactgaagcaactcacagccctcgccgtcttgggggcacccctgcgaggccaccggatcctgtggcttcctgccaggccattttttgaaaacccctgtcccaacggtgcctcgggctgcctcgctgacacaagtccgggggaaaattcgcgtcaactaaggcttatcccagc

SEQ ID NO: 644240 - DNA, 1536 bp, Homo sapiens
tgtggacctcctgaaatcttttaatgtgggccccttgtccccccaaggggtcccctgttttctgggtgggtttaattggctctccaaaatcttgggtgtgtccttgtggtgtctctccaaacccctctctttggcctatcccatctatatcccgggggggggtgggtctctttggggtatggtgttggcttgggaagtcggctggttgagtcccagggtctatcccacagaatatataaagagtcctctccgtcgcacactattttccacagagagagtgtgcgtggggagtagagggtgaggagatatctctcacagcctctcccacagattgtgaacactctttgagatgtgttacaagagaggggcctctaatattatctccgcgtgggcctcggtggcgcgtggcgcctctctctggcccgggtgtcttctgtgtgcgccagtctctctggatctccaaggtgtggcaagaagagagtatcccctgtgagagaggtgtgtgtgtcccactctcgtgtgtgagggggtgtgtatgcggggctctcccacctctccctctcaagggtgtggtgtctctacacaaaggtgtgggggctctatcaaaagtatttcctcacagagagagagttccccagagtgtgacagattctccacagaggagagtgtgagagattagtggtgaggtgttctcacagagctctctgttgagaaagagcgtgtgaggtctctcacagggaaattgtctccacaaaacatcttgacaagaaaatagattgtgtgtgttgttgtgttgcgagaacccaactgtcgtggtggggggtgcgtctctcctctctctcacaaaattttgtgtgtgtaggaaacaaacaccatagaaactgtgagtgtataaacagtctctctctctcacagagagatatatcacacacgagaaaaccaacagatcggggaccatatataggggggcgcccgcgaagatatgctactgagccacaaaaaaaaaaccttgtaggaggaaaagagcccgacgaaaaaacaacgagggggagggggaaaatataaacccctcccaagaggagtaaaaccccacgaagaagatcggggacaaaatcggagggaccctaagtaaagagccccaataaaaatacaatccacaaaacgagagggaaacacaattcaaatagagaaaaaagaagcagggtctcccacctcaactgaaagaaagacccgcaagagaaatcaggggaggaccacaccagagctgtgaacgacgctggttgacaaaacaatggggaggggcaccaacaaagaacaactcttgtgagagaccccacgtaggatagtttttgttataccaccaaaaaaatgagagcatgtagtgcaccaattgtggtccaacaagtagtggagactataaatagtatatccggagcgaaagagagtgctgttggacaccatgtgcgacaaaaaccagggtgcagttgacacacaatttgcgacaaatattgcccctcgaagcccaaaagtgtgaaa

SEQ ID NO: 644241 - DNA, 452 bp, Homo sapiens
cccgaagtcgcacgagtgtgcgcatcactgctgcctctacttcatccccgccaccggtcatctccctcaggcccctggacatcgggttaatgaaacgcgctgagcaaaggtggtcaacaatcgtccctagtcatcgcgcaaggctggacacactctaccctggcaggagagggtccacgttcaacacaggcggatcaccgcagaacctagatgtccaactggcatcgaagttgtaccccacagacaggaatttgatgaaggactcggaggaccggctaatagaacgagaagtcccgggagattgatcccatatgctgtggagggcagtgaccacgaagtaccaggtcaacgggcaagaggatccttgggaggaagaccaagtggggtaccatcgaagttgaaaaaaccacacactgtgagatagcctacctgcgggaaccttctcatcagga

SEQ ID NO: 644242 - DNA, 510 bp, Homo sapiens
  misc_feature (16)..(16): n is a, c, g, or t
  misc_feature (415)..(415): n is a, c, g, or t
  misc_feature (417)..(417): n is a, c, g, or t
tgccttggcgggacgncggagggccaagcgtagacctaagcatcacttgaggggggcgggaagaggaataagatctgcgggcgccactcgctctatgtggacttcagcgatgtgggctggaatgactggattgtggctccagcaggctaccaggccttctactgtcatggggactgctcctttcggtggggtgagcacctcggctgaagcagggatggcagtgtgcagaccctggtcagttctgtggattccggtatcgcgaaagcctgttgtgtgggcagtgaagtgagtgccatgtccatgctgtagctggatgagtatgataaggtggtactgaaaaatgatcgggagatggtagtagagggatgtgggtgccgctgagatcaggcagtccttgaggatagacagatatacncnccacacacacacaccacatacaccacacacacacgttcccatccactcacccacacactacacagactgcttccttatagctggacttttatt

SEQ ID NO: 644243 - DNA, 1010 bp, Homo sapiens
taaaaaaaaaaaaagttcaatttttgaagttcttatagggaccaaagtgtggtgcccaggaatgtgatcgtccaaacacagtggaaccaagaagaaacacagataaaatttctcctgtgttgtgaagaaaccaagtagttttggtgccagcgcccgaggtgattcctgagggtttaggccaaaacacgagcccaatttccgtggaggggaagccctgtgttccgcacagcaggggttcctcgagcccggagaatataggcatgtgaggcggtgtgggatgcagggaacctgtgtgtcccctgtcttatccaaccaagcgcgcgggaaggactttctgtgagcacacaagacgttcacgtggagtgggaggaaagcgccaaatcagcatcacaataacgccccaggtgggaagagaccgcttctgtggggaacaccacaactccgcagagacaatgccccgaggcgagggggcaccacggaacagcgcctcccaggtgccccctcacgtggggacctcgctcgagaccaaagtgggtctcacaaatctcgcaaagatccaaatcttccaagggggggacggtgattccccccaaagagtccccccacgggggggtggggggaagtataaaccattaagagatatatgtgccttgtggacggagaaatttttgaacgccttcacaaaagtggccccgtggtgttctccccacgcgaatttggcaaaagcggtcaactatatgagccgagaacaggacagaaaaatgaaccacacaaaaagaaggcaccgatatgaggcggccgaaaagcagcggccagcgggaccacattcaagagaaaacagacgggcgccacaaaaaaactgccagcaatccggcgatgaggcacgaccaggcgaagggggaaattagcgcaaaaccatcccggggagttaggaagaaagacaccagcgcgatcggggaagagacaaccagagggcatgggcccacattacaccgggaccgacagggggg

SEQ ID NO: 644244 - DNA, 120 bp, Homo sapiens
cacatttctctttaaactaccctaacagacaaatttaatgcagactcatatcacattatcgtcatttgacacgttgattcttccaatccaccacttactttccactgatctataaatgct

SEQ ID NO: 644245 - DNA, 464 bp, Homo sapiens
ggttagtataagtaacattagttcttctatagggtgatagatggtccaatgggtgtgaggagtcagtatatgttgggatttaggtagtgggtgtgattgaagtttaattggtggtgtaggctatatggggtccaaaatcgaaatcacccaaggcataatataagacacaggacccaccccgataagcctatcatgcatgaactgacactgaacccatacgcaactagacttatcggcacatcggccgcagcgcgaccaagcatcagatcacccgccaaaaaacgcgcgcaccgacgcccaacgcacaacgacgcccgcttagcgcaccagacgcacaagcaccgctcgaatccaccgcacaacaagagagcgcacccactccatacgccccagacaggcgagccccccaacactcagccagacgcacccgactcgacaccgcccggtcgggtccgaccatgccg

SEQ ID NO: 644246 - DNA, 102 bp, Homo sapiens
ctacgtacttctcgacgctctagtacactgtccgcggtcggacgtaccgcgtactcgactggcgccacgctgacggcggcgaactactgcatcctacggcct

SEQ ID NO: 644247 - DNA, 557 bp, Homo sapiens
aaaaaaaaaaaaattaaaacttaaaattcttttttaattttaaaaaaaaaggtttttgctataaaaaaaaaaataccccccccgggttaaaaaaaaaaaaattatgggttttaaaaaaaaaaaaccccccccccaaaaggggccaaatctcgggccccaaaaaaaaggggcctttccccaaaaaaaaaaaaaaagacttgccaaaaactggggggtggggaaaaaaagggaaaaactttttccccgggaaaaaatgggccccctcaaaactggtgggaggctttttttttttggggcgccgtgtttaaaacaaaaccccccgataatttccaaccggaaaacgcggggaaattctttccgcgggggggggcgaaataaaaccctccccgtatttttgctttagcgccccaccctcctcgataataaaaacaaacctcacgttagattacttaaaggggcccccaaaaatggggggcggaaaatcaggaacaaagtgttttcttgtgggaatatgtttttctcctaaacaaattcacaaaaaatatagggcgcgtgct

SEQ ID NO: 644248 - DNA, 141 bp, Homo sapiens
aggatccccgtgagacgactttcacttctgatctgatctttctgataaagatagcaaagcaatgaatcaaagaaaatacagaagaaaaaactccagactaaaaaagaaatattcaaaaaaatctagttgagaaaaagaaag

SEQ ID NO: 644249 - DNA, 183 bp, Homo sapiens
cctttcctggatatcaaagtattaagtttctttctcatattaaataaaaaaatttaaaaaggctgggcccagtggctcatccctctaaccccacccctttgggaggctaaggcaggtggactgcttgagctcgtgagtttcagaccaccctaggcaacttggtgaaccctcttcttttattta

SEQ ID NO: 644250 - DNA, 185 bp, Homo sapiens
gggggttggcccccccccccccccgaaaaagcccttctcttttcccgggggtatttggggggggggggggggaacccccccccccccgggttttttggttggccgggggggtttggggggggcccccttttttttttttcccgggcccccgggggggatttaaggcccccccccccccctgggga

SEQ ID NO: 644251 - DNA, 333 bp, Homo sapiens
  misc_feature (328)..(328): n is a, c, g, or t
tcaagtggtctagacactccaggtagcatttaaaaagtagccagtctctagcatgaagggagtccttttaggaagtagattttttccccccgtttatcttttttttttcttcgaggcataaataggagtgcttgtggattttaatttaaattataattggtaaatcaggaatatgtggccaccagaacccaaaaattactaaaagatacgggaattacttccccttaatgacatgtcaagagtttcctgtggggaaggctagtaatcgggtgcgggtgcataccctgtgtccctgggagaagggtggagtgtggttaaggactctcgnttggc

SEQ ID NO: 644252 - DNA, 676 bp, Homo sapiens
catggtggctcacgcctgtaatcccagcactctgggaggccaacgtgagcagatgacgaggtcaggagatcgagaccatcctgggtaacacggtgaaaccccgtctctactaaaaatacaaaaaaattagccgggcgtggtggcgggcgcctgtagtcccagctactcgggaggctgaggcaggagaatggcgtgaacccgggaggcggagcttgcagtgagctgagatcgcgcctctgcactccagcctgggcgacagagaagagactccatcttaaaaaaaaaaaaaaaaaaaaggtaatttaaaattggcaatggttaaaaggaaaaaaaaggagaccgggaggggtaacaggaaggatattggggcccacgttgaaagagaaactgggggacctaaaatttttttgccttatgaaatttttccaggcattggtaaattcctgggtaacagagaaccaaggagataacaattttgacagagataaagaataagtgatcgggaaacagttaagggtatatatatatccagttaaaggttcccacgcgggagagacgagactatgtgagacataatttttcagaggaatacggcggtcagaactttctagatcctccttgaaggacaaattgtggaatcgtgaaacacttgcttccaaaatagggattactttac

SEQ ID NO: 644253 - DNA, 439 bp, Homo sapiens
aggattccaggcgttgtcagtgtagaacagctcacattatgcggtgatgttatcaaagagcactgagctgtctgaagccaaagcctgaggacagaaagacctgatgcaggtcaggccatggaggcagatggccttgctggggctgggggttttccaagccctcagctggtcctgaccaggatggagcaagctcttcccttgctcatgagctcctgatcagaggcatttgagcagctgaataacctgcacaggcttgcttgtatgacccctgggcacagccttccctctgcattgacctggaggggagaggtcagccttgacctaaatgaggtagctatagttgcagcccaaggacagttcagagatcaggatcagctttgaaggctggattctatctacataagtcctttcatttccaccagggccagagcagctccac

SEQ ID NO: 644254 - DNA, 192 bp, Homo sapiens
cagctatgcaggactcagaaacacccatttcctaatgacagggtgagtaactggatttctttttttggttggtttggtttgggttttcaactgggctgaccccgggtctatgatctattcacatcgaacccctgacgggtctgcctggtgccagggtgagcgtgcccgatcccaagatcgggcccatcttcg

SEQ ID NO: 644255 - DNA, 197 bp, Homo sapiens
tcctactactccattttaactcaagcaccattaccctactactatctcgcacctgaaacaagcttacatgactttcacgttttattcctttcaccctcctctcccttggaagcctgtccccgcttaccggctttttgcccaaattggccatttatcgaagaattcacaaaatagaaatgatatagttgtttgattgc

SEQ ID NO: 644256 - DNA, 323 bp, Homo sapiens
caatgaaaagaaaaggggcccttttttttcccccagaattattcaaagggggatttttgaaacggctaattccacacgggtgagggatgttggttttttagggcaatttttttgggggctattttttgccccaacgggggggatggttaaaattaatttaaatttgtttcatttgggagggatgggaagggggtttgggggtatggggggtttataatttgccaaagtcatgaaggtcggttgggggggaatttaattccccttcccttattttttttttttttggggggggggtgattcaataaaagggcctgcccctccca

SEQ ID NO: 644257 - DNA, 419 bp, Homo sapiens
agcctatcctctagtgaacgtccataacatgttcgcccagtccttgcgctacgtgagcatgcttatagctcatatcagctcgctaatacagttcgtctactgaacctccatagtgctcacatcaccccactccttcccctattgaacctccataacactcagatcaccccactccttcctctactgaacttccatagtgctcattatcgtaaaacatttattagctgtattagtatatgctggttctggtaagatcttaactatatttcctttttccaaactcggttgtaacaactgatgtcaaggacctgatatctgcctttttatatccccagtaatcaggctgggaccctgtatacaatagacacacactgcatgtatcttcattgtgatgggatgaagaggtatgagtggccaaa

SEQ ID NO: 644258 - DNA, 150 bp, Homo sapiens
cgttccggggggagatcttagccggagttgaccagagatttcgtgtagtcatctaaatcagagacatcacattgattatggagaatttgtgaatcttcagctagatgaagaaacccaataccaaactgctgttgaaacttctaaaactag

SEQ ID NO: 644259 - DNA, 394 bp, Homo sapiens
gcgtggtcgcggccgatgtacaggggaatggaatggaatggaatgcaatggaaaggaatggaatcaaattgattggaatggaatggaatggaatggaatgaaatggaatggaatggaattaaccccaatagaaaggaatggaatggaatggaacggaacggaatggaatggaatggaatggaatggaatggaatggaatcaacctgactgcaggggaatggaatggaatggaatgcaatggaatggattcaacttgaatggaatggaaagaatggaatcaacacgagtggaatggcatggaattaaccccaatagaaaggaatggaatggaatggaatggaacggaacggaatggaatggaatggaatggaatggaatggaatcaacctgactg

SEQ ID NO: 644260 - DNA, 276 bp, Homo sapiens
ctggaacccaggaggtagaggtagcagtgagccgaggtggcatcatggcacttcagccggggtgacatgagcgaaactcggtcttaacaataacaacaacaaaaacataacataaaatttaccatcttaactaatttcagatgtacagttcaggggcaattaatatattcgtaaggtggtacaatcatccccaacatccatttctataagcttttttcatctgggtaaaacgtgaaacgtgtattatctacgtaaaccaagtgaaggccccagtta

SEQ ID NO: 644261 - DNA, 624 bp, Homo sapiens
ccacagtgcccattgtcttactctgaatagtattgcaggtgtatagttagggtccacactcaatctacgtctttgtagaggtctgatcactggagacagtcaggcacgcaatacgagtgtaggtcgctggtaagtgcatgatgcatcatgagttcccttcgccaagacaatggcattcaccacatgcgtgtaggagcgccctactatgttctgtaagtgatctgttcgcaccatggacctttgagtgggtgctaatctcccagggataatgggtctgttcgcaggatctgaaactatcagcagacaggttaatcatctgcctgtattcaatatgtcctccggttcttggaaggcagcctgtggcacagtatgagaaatgatcgtgtttagctccactggatgggcggtatcagctgctgcctgtccagccttgggatgtgctctttcagcatggatggagagttataccgtcaaattcagtgtctacaagagcatatgacactttttcataaggtgcacagctggcagttttatcatccacaggcagtctgtgctctatagctctcagtgggccagcagtgggcattaccccatgctttgtgaatctcaatagcatcagatctg

SEQ ID NO: 644262 - DNA, 394 bp, Homo sapiens
gggagcttgttttaggggtcccaaggtttccacccacgtgcccaggtttcccacggtgcagggcagagggccacgcccacacccggccttttagctcaggtcccccatgggggacggccccgcgtgggtgggggttccagagggtcccgagtgggggccgttccttttcccagacccttcactttcaaccaggccagtccggttttggggggcaggggcctccccggcaacagccccaggggccttgggggtttgaggtcccccccctttttccaagtggccttttccccagctccctcctcccaggtttgtttgggtttgcgtgcgttttttccgagcttttttttcattttgcaaatttaaataaagggaggccgttttcggaaaaaaaaaa

SEQ ID NO: 644263 - DNA, 926 bp, Homo sapiens
cagcgtcttgcccgcccctctatggttcgcacctctttccgcagccgagtcgcccgccgctcttgtccctggggttttgcgcataggcaatttgttcgacgacccaggagccacccgtgagttggccccattagctctgtcccagccgagtgtgggccgccccccgcaaaagttcggctgattcccgcacggttttccgcgaagttcttttcccggggggggggacacatcacacacacatgacggtgtggccccccccgtctcctactcaaagggagggtcccccacccggtggaaagttgcaggagagttcgtcccgcccccccgtttcatgtcgccacaattctacggcccccagtgcaaaccccccgtcttctaatcacccgctgcttttttatgcgacttatcccccccccctaaagtaatactataaaggcgcccccaaaaagattttccatgtgctttctaaaaagagcaacccccctgggtatccctccttccttcggaataaaccccacccccgttaccaccattgacgacagagtttggtccctacacattcttatcccccacgagcctcaatagtataaattattccgacgcctcctccttggaggggatggcacgagaaaacgaggggtcacgaagaccccatcgagccagagtaggccccccctcgtatcttgatcatacaagggatctccatccctcgcggctttgtgggagtggtagcctgattcaatgatcccccccttgagcggagtggggtcttttgcttctcgcgggagcaacagcgccttatctgggtcgaacaacgcgcaagacgtagtgccattacccgagttatcactgtcgtcagaaagagggaagcccaacaaaccgttttgacgcaatctctgtagtaacccccacacaacataacaaca

SEQ ID NO: 644264 - DNA, 153 bp, Homo sapiens
tggaattaatacctaatgatcatctctcatgttctcgttgacacgtgctggggaaatccagaaatacaaggaatctgaagtctattcctaaggcaattaaagcaatccaatgctgcagtaaccatggtagtttggtctgttgatcatcgttgg

SEQ ID NO: 644265 - DNA, 213 bp, Homo sapiens
gtattcctatgagggataattatgacgtgctccatctgcctacgacaaacaggacctaaaatcgctcattgcatactcggcaagcggccacatggccctcgtagtaacaggcattctcatccaagagccccgtgaagcttcaccggcgcagtcattctctagtttcggccaggggtcttacatcctcattactattctgcctcaggtagagca

SEQ ID NO: 644266 - DNA, 503 bp, Homo sapiens
tgtgggtgttattagtctgcatggtactaggggggcgaagagatcagaagtgtcatccaacgtggtcagaaggtcatctgggagggtttccaggtcgatctatacccaacagggcatcgaagtcgaactccttcaaatccattttctccaagatccaatctgtgccggagaaggcatacctccattgctggtgttggagggacatgaccaacccatccacagccagacatgcggaggagcgccggcttagccttgtcgctggagaacccatgaggttagaagtgcttgggcacctccaggtaatcatctaagagacctaggcttgcttcagcccccaaacccgacgtggtcgaagggggacatcatgtcccccaccaacaccgtcgcggctcaggaagctcattgcggtcatgtcgcggtgcttggctgcaatcggggaatgtgcttaattcgaaggggtctttgtcggttacaggaacgctgttgctgaatgccgtgagaag

SEQ ID NO: 644267 - DNA, 1003 bp, Homo sapiens
  misc_feature (6)..(6): n is a, c, g, or t
  misc_feature (70)..(70): n is a, c, g, or t
  misc_feature (118)..(118): n is a, c, g, or t
  misc_feature (249)..(249): n is a, c, g, or t
  misc_feature (265)..(265): n is a, c, g, or t
  misc_feature (459)..(459): n is a, c, g, or t
  misc_feature (483)..(483): n is a, c, g, or t
  misc_feature (532)..(532): n is a, c, g, or t
  misc_feature (535)..(535): n is a, c, g, or t
  misc_feature (538)..(538): n is a, c, g, or t
  misc_feature (556)..(556): n is a, c, g, or t
  misc_feature (702)..(702): n is a, c, g, or t
  misc_feature (710)..(710): n is a, c, g, or t
  misc_feature (714)..(714): n is a, c, g, or t
  misc_feature (738)..(738): n is a, c, g, or t
  misc_feature (750)..(750): n is a, c, g, or t
  misc_feature (906)..(906): n is a, c, g, or t
  misc_feature (925)..(925): n is a, c, g, or t
  misc_feature (936)..(936): n is a, c, g, or t
  misc_feature (1001)..(1001): n is a, c, g, or t
agaganaagtgtgtaaaaaaagcaggcggggacgggccggaattccgcggatcccgcgagccgggccggnggcagccggcgaagcgggtggggtggtgtgttacccagtaactcctgnggacatcgctcggatacactccaccccgtcacaaccactactgtaatcaccggtccgccgaagggccgcaatactggttgcccgcagtgtaagcagaattccacgtgtatcgctgccgtcaaaatgaaagngacctttatccgtatncaataaccacacacactagggaaaccatccgctcccaaaacattatggcttcaacttcaatttccaatattataaaaaattctcttggtccaattggcttgaataaaatattggtggataatattagtgatgtaaccattactaacgatagtgcaaccatcctaaaattactaaaagtaaaacatcctgcaacnaaaattctttataaactggctaanctccaacacaaaaaaattggacatcaaactacttcaatagttattattncancanaactcctaaaaaatacanataaattaatcaaacacaaaattcatcccacatcaattattagtggctatcgacttgcttgcaaggaagcagtgcgttatatcaatgaaaacctaattgttaacacagatgaactgggaagagattgcctgattaatgctgctaanacatccangtcntccaaaatcattggaataaatggngatttctttgcnaacatggtagtagatgctgtacttgctattaaatacacagacataagaggccagccacgctatccagtcaactctgttaatattttgaaagcccatgggagaagtcaaatggagagtatgctcatcagtggctatgcactcaactgtgtggtgggntccagggcatgcccaaganaatcgtaaatncaaaaattgcttgcctttgacttcagcctgcaaaaaacaaaaatgaagcttggtgtacaggtggnca

SEQ ID NO: 644268 - DNA, 421 bp, Homo sapiens
aaaccacatggtggcttattttctgagtttctggtagagacggggtttcgctgtgttggccaggctggccttgaactcctgaggtcaggtgatctgcttgcctgcgcctcccaaagtgctgggattacaggcatgaaccaccacacacattttttttgagacagagtcttgatatattgccaacaatggagtgcagtggtgccatcacggctcaccatagcctcaatctcctggggctcaggtgatcctcccaccacagcctcccaagtagctgggactacaagtgcatgcgaccacacccagttaattttggtattattattttgggagagacagggtttcactgtgttgtccaggctgttctccaacttttgagctcatgtgatcggcccacttcagcctcccaaagtgcagggattac

SEQ ID NO: 644269 - DNA, 252 bp, Homo sapiens
atgcttcatttacgggggccgggcttagtgaagtagcggcttattactcttgtcctgttcgtacagggaggccctggaagtagcagtagacaccgacctggattactccggtctgaactcagatcacgtaggactttaatcgttgaacaaacgaacctttaatagcggcagcagcacacgaattcccttagcaccagcacgaattcccttagcatcagcacgaattcccttagcaccagcacgaattccctt

SEQ ID NO: 644270 - DNA, 220 bp, Homo sapiens
  misc_feature (129)..(129): n is a, c, g, or t
gtggatcgaacccatgtcctcatggaggagcagtcagatccatgtccactaggccacgaatgtaactccgaaaatgttcattttaaagttatgtatttaacagttcgcatcacactttctttcccttgnctcttaaaaggtgggttggtggtccgaggtgatgaaattcaaccctaacacaaatgcagtgtcccatgtcataccctggactgacctgcgg

SEQ ID NO: 644271 - DNA, 519 bp, Homo sapiens
agagcgacccccgagagtaaagtccaatgtcttgtaagcatggttagcaatcaccatgtggtaggggcacagagccatagtgtacctgtgggtgggtagagatagccacagagagggcgtactagagtatgcatcttctctaccttgaaaaaatttaccatttgtaactctggctgcataccaaatcgaacgaagacttaaggtttttagtttacctaactgattgaatacacttttaaaatgaattcatgtgtgtaaactagtatatcagtcatgtggatgcaataccgcagcccctgtcgcaaggacgcgtagggaagtgggtagagggtgtggtggagacaagaaacgcatgcctgatggtgtcctggtacaaccgctgctcagccggggtggccttggacaaatttcccaagagtacggcattgatgaagtacccatatccagcctcacagtgatgttatgaaatagacacgatggcaagaaaagcaacgacaaggtatgaaaatggtacataag

SEQ ID NO: 644272 - DNA, 116 bp, Homo sapiens
ggacgaagggaacgtaatcgtttggaaagcgtcgcaataagacgcacacgttgtgccgcagctgtggctataaggatctaaacactacagaagtagacatctggcaaatgtggcta

SEQ ID NO: 644273 - DNA, 211 bp, Homo sapiens
tattatagaggaccccttatcaactgggtcatatatcattggtttagtataaattggtcatagctgggttaactggaaaacaaacacatttaaaatgggtttaccttcaggttgaggtgcagaaaattggttgaaggataaacggttgagaggtggccccaatggttaggatgtccctcttgtctttcggtggtgctcggggtaccgagct

SEQ ID NO: 644274 - DNA, 179 bp, Homo sapiens
aaccccgccttcccctcagtgaggaaagttgcgccaataatgacgttaagtccgtggaagcttgtgctaactaaaaatgttgaacctgtagtatccgtcgagacatggtgaagtggatgactcgcacgtactctgaggcttgttaggagggttacaatagacgccccacgtaaaattgt

SEQ ID NO: 644275 - DNA, 732 bp, Homo sapiens
  misc_feature (47)..(47): n is a, c, g, or t
  misc_feature (66)..(66): n is a, c, g, or t
  misc_feature (77)..(77): n is a, c, g, or t
  misc_feature (135)..(135): n is a, c, g, or t
  misc_feature (156)..(156): n is a, c, g, or t
  misc_feature (186)..(186): n is a, c, g, or t
  misc_feature (190)..(190): n is a, c, g, or t
  misc_feature (201)..(201): n is a, c, g, or t
  misc_feature (224)..(224): n is a, c, g, or t
  misc_feature (257)..(257): n is a, c, g, or t
  misc_feature (279)..(279): n is a, c, g, or t
  misc_feature (301)..(301): n is a, c, g, or t
  misc_feature (322)..(322): n is a, c, g, or t
  misc_feature (327)..(327): n is a, c, g, or t
  misc_feature (336)..(336): n is a, c, g, or t
  misc_feature (360)..(360): n is a, c, g, or t
  misc_feature (467)..(467): n is a, c, g, or t
  misc_feature (579)..(579): n is a, c, g, or t
  misc_feature (589)..(589): n is a, c, g, or t
  misc_feature (594)..(594): n is a, c, g, or t
  misc_feature (604)..(604): n is a, c, g, or t
  misc_feature (606)..(606): n is a, c, g, or t
  misc_feature (610)..(610): n is a, c, g, or t
  misc_feature (620)..(622): n is a, c, g, or t
  misc_feature (631)..(632): n is a, c, g, or t
  misc_feature (655)..(655): n is a, c, g, or t
  misc_feature (671)..(671): n is a, c, g, or t
  misc_feature (690)..(690): n is a, c, g, or t
gtacttaccggcgtgcgccaggtgatgttgctgaggaagagcatgcngctgcccgtgtcggatgcngagtgtacgcncaggcccagcaacccgccttctagctgggcctgggctcgcggccggccctcgcgaggntggggcacctttctccaggtnaccaatggctgcgggtagccggagggtggnaggnaacccgcagtnctcacccaggttggctgtgagcnccagcgcctgcacgtggacagagggcggaatgnagatgaggctgctgtgggatangtccaggagaatctggagcgcnaggagcgggggctctgcacanatgancttcctgtncctggaggtgagcagccgctggcngccctccttgatccaggcacccagccagtgcagggcgcagtcacagcgccatgggttctctgtgggagagcagcgttaggcaggtggcttgagggtgctgctaaaanagcctgtgcagttggggttttgcaggccaggacagaggcctctttcccacctcccacagcgttttcacacggagtccaaggccctggcaccccttccttgaccccaagctcnttgggggggnagggncttcaccctngncccnctcccctttnnntcttttatnnctgcctgttacagatcacttctncgtcggtctctgaganagcacctgctccttaagtnttcctgcaacaagtgccactgtttttaggaacctgggcgtcc

SEQ ID NO: 644276 - DNA, 122 bp, Homo sapiens
gagtccgatagatgagtaggagtcagactatgtgagaaagagaggaagatgaggaggggaaagtaggaccagagaaatcatgcgaacagataggctcggggtggagaactgacacttgtgat

SEQ ID NO: 644277 - DNA, 133 bp, Homo sapiens
ctatgttagctgggccctggggcagtaggccgaaaacggacggaagacaaggtctggccggagattggtctcactctgtcacccagactgtagtgcagtgagtggtgcgatcatagcttactgcagcctgaaa

SEQ ID NO: 644278 - DNA, 458 bp, Homo sapiens
aaaccggtattactctttctgactggggaaacccctcgggggcttttatcactcgtagaaaccatgatactacttgtcgaggggaatgcacccacgagcccgtgacataaggactgcgcaaatatatcttgtgtaagtacacaccagcacaggctaccagagcaaacatagacaattggaattacataatgctacaaagcttctgcatcacacaggaaacaacaaactgaatagacaaaccacagatagagagaaaatctttgcaatctaactgacaaggggctaataacctgaatatataaagaactcaaacaactaaatagcaaagaaacaaataatttcatttataaaaatgggcaacaaattgggacaaacatttttcaaaaagaagacatacaaatggcctacagttatattttttaaatgtatgacattgctaatcatcagataaatgcaaa

SEQ ID NO: 644279 - DNA, 1106 bp, Homo sapiens
agcggcttggtgcgcgggcacagcagccaggctgaccggagagctgatctcggggattcgggtgcggatcccgttgcgcctggaggtgatatgggtggcccgtggacccggatcagtctgttgcaaaagtccgtgggaacaggcctgttctgagcgcctgcatagtacgtaccctattctggagacatgtgggggcctatgagacagacttgcgtctctaacattgacgtagcgagcacctagtacgtgtgctcccgtacagaagaagcatcgatctatcagaggtatcagcgtgcagtcgttgggccgatagcaaggggggcatggccttaaggtctctgcatatattcgctatgtagatctccgtaggggagtcctggcgcatcttcaccttgcctcttgcgccacacgtggtcgctggatacgagtagtggagttgtgcgtcgcgttggggccggccgggcacatcgtctttgctacccatagcacgcacccaacatcggccgccgggttttgggcatcggagccatgttgaaactacaacaccctgatggagatatcgcatccacggtctccaagtgccttgctttgcatgtgggggccctagggttatcgccccatgcgacgcccccatgacacgacgccaaaccatggtgctacaaactaggttctaacatattggtgccggatacggcttaattggagggggtagacgctccgaccgttgaacaaccaattttgccctctccagggtggacggtattgcaccatggactgggacccgtttgttggagaagcgcaataatcaccacgtagggggaaggctagacgggcataagccgtcggatgtctttcgcctccccgtattacggacagaacgtataaacacggtcccgtggcgagtgagtggccctcattccaaaacagaaggcgtcttaattgcgccgtcgttcgagggccgatactcgaaggaaagccgtgggaccaaaaaagggtgatacacacctggaaggaaatgttcgggtccgcccaggaaaattcacaaggcacggccaaggggggtgccgggtgcgaattcatttctaggttaggtcggaggggcttgg

SEQ ID NO: 644280 - DNA, 504 bp, Homo sapiens
aaaaaagggtgcccttttgtttttggtacaaaatatttttggggggcgcgcctcccctccccagaagggggggtttttaaaacaacaagtcttttttggggggggtttcccccccccccttggggggggttttttacccccccccaaaaaatttttacaggggggcccccttttttttttttttttaaaaaacaaaggggcccccccaaatatttttttttttttgccccccacggggggccctttttttttttaaaaaaaaacccccctttttttttccccccccccgttggggggcccatttttttgttttttcttcggggggaaaaagggcccccaggggggccccccattttttttttttttaaaaacccccctttttttttttcccccgggggtttttttttttttcccccccccccttttttttaaaaaaaattttttttttccccccccttttttttttttccccccctttttttaagggggccccctttttttcca

SEQ ID NO: 644281 - DNA, 773 bp, Homo sapiens
agcggaagaaagcggaagatggcggcggcggccgtggaggccgtgaggagagcggcggctgcgagggcggccgatggcggccgggaggcgccctcggacacttgctgggtcgttagtggcagcgacgctgggagtgcatgtctggagcactgtggagccctgcattctcctggggccctgggcccatacgtgcggcggcggcgtgcccggcccccgcgtcgcgggcctcgcacccccaatctcaagcctcaaacccctcatcgagacgtgcgcgaccggctcttccacgcgctggttcttcaagagtggctgtcaccttattcgcgtgctcttcccgcccgccttcccgccgctctcgttcgtagcttcttcgtgctgctcaaggcccctgtttgtgctcttcgtcctggcctacatccagcatcgtcttctcccggctcgcccatcaactgcctggagcacgtgcgtgacatagtggcacgcgtgagtggcatcctgcgtgctggacagtgcggcacaactcgagtccgcgcgcccgtacttcctacatgattctgtgacacgcggcggccgcggggagcttcccgggcctggccgtggaaccaggcagcaacctggacatggaagatgaggaggcagaagagctgaccatggagatgtgtgggaacagctccatcaagttaacgctggacatcgagccaaggtgtcaaagccgacaagtagcacagaggccctgaattgacagccaggagtccccttcccgagacgcccat

SEQ ID NO: 644282 - DNA, 477 bp, Homo sapiens
  misc_feature (463)..(463): n is a, c, g, or t
  misc_feature (469)..(469): n is a, c, g, or t
aggatcatttcctaggactggaactgccttggaaactcatcaccaaacacaagaacttagccttttctaagacggtggtattgacatgccacatggtttccaaattggtcaagtcattcagaactgttctgagatgggcactggaccacgaacattactaaggtgtgcttataccagaggtttcctttaaaactctgctacataaacaaggatctgccatttgctgcttcataagaggcgggctgacttcttagatcttggtttctatgtcctgcccactagtcaggcttctggtgacagtgacagattcaggaacacgtgcccctgtgggagctactcgaccagttggctggtgactgcatgttagtttgttaccaaggtctaaaattggtcatattttcctgggttttgataagcagctaacctaagctagggtttgtgaagtggaaaatccctttaaggncaaaanggggggtt

SEQ ID NO: 644283 - DNA, 152 bp, Homo sapiens
cccgagattagagagataggcttcagcgaacaaagagagcgagaactcagagcaaagcgagccgcggagggccttgccacagtgattagaatctgcaaatagctgtcttgtgcctgagggatgtgaccttattcatctgtattaactcttat

SEQ ID NO: 644284 - DNA, 463 bp, Homo sapiens
  misc_feature (146)..(146): n is a, c, g, or t
  misc_feature (382)..(382): n is a, c, g, or t
  misc_feature (392)..(392): n is a, c, g, or t
  misc_feature (455)..(455): n is a, c, g, or t
ccaagggccggtggtccgggcctggggggtcggggtcaagggtcccaaggaggtgctggtcaggcccacccattggaaggtggataggggcccttgttctttagatgtttgtctttgagggggactgtgggaccaaggactttgcngctgttttcctatgtcatttctgcttcagctctttgcggcttcccttctttggaaaggtggaacccgatgggaattagccggcttccttatttttgtaggccaacccatatgttccttagaattctttgcctttaatgttgaaaccggaagggggtttcgttccccttaaatgaatcaaccccgcccccttctgggcgggtttgtttgtttttttttttttttttttttgcttggngaaaaccccncaaaggctgggaagggatgtttttataatttgtttttttaaatatgaaaaataaaatgtttanctttttta

SEQ ID NO: 644285 - DNA, 375 bp, Homo sapiens
ccagattggaacgaacaatgggacggacaaggatggggagaacaagtgagcatgtgctgacagatactaggggtagaggatctgagtgaaaaatttgatcttagacaagcgcctaggtagagaaataatgggataagatattctaaaccccactatggtgcttaaaagatcatcctcgccattggggctgatctctgtcatcctctccttcctcagcctctttcgcatcatccttgatcaactccagctggtcatccccccgatcattcattatcatcatcatccagtagagtccccctcctcagcagagtcatctgcaacaccctcagactccatcttcacattagtctcatcttacttcacggagctgatgct

SEQ ID NO: 644286 - DNA, 155 bp, Homo sapiens
ctaagtgcccttttccaacttctgcttcccaggtccctggtctcttcctaagccccttaagttttatctgctcataattttgcatacacttcttgaagttggtcttgtaatacttggtggctccttttccaatccgtgaaaattttcccccttgt

SEQ ID NO: 644287 - DNA, 1034 bp, Homo sapiens
gagcgtactggtgcttggatgtggtccggcgacggtgtgctggcgaagcagaaccatattcaaagtctctgactgctagaaatgggaccgggtgaagctgtgtgcatgcaaaagacacttctcggaattatggacacacatatgagaggagtgaatttagaattccagtatctatggaatatctttccgaccagcagtctgcacactgcgagaaacaatgcccaacgcaggctacaattagcatagatcatgcaattacccatttatataaggcggcttgaccaagtaggtgcttggccggcttcatgctgttgtaagggctcgcctatccgagatattgggagaaattccgtgccttgctgactagttgacacctaactcgagacaagggccagagtttgggaggactatcaactgtgaagtgagtcgctattgggtattgtctgcaggatgtgttcacgagacacacacggagaccacgaaatgggttacactacctatagcagaaaattcgcctgcatagataccactttaccaaaagctacacgtgctcgcaggaccaaatgagatgtgtttgaaaatagttggaaatcagatggtgcctgggtttcatgaactgtccacttccctgaacagggattggcgtcatcgagcaacacattggagtcgaggtcttggcgtattgcaagtgggagcttgcaatctactcgtgcactggggcagaggaagtgacaggaggttgatagttgagatatttgtgcctaacccttaatacttgcctcatagcagatgcctgtagggcacaccgtgcaggtgtgagctcatgactagggagaagacttactaaggcgtgctgaaagtggaatacaatgagagcgccccggacgggcctcggggcacaagtccatgtatggagacctctagggcccagtgtgggcatggaccaaggccccctcgtttggatcaactcgagctgcctacacgaaagcttccaatgggacaaaacgacccttggcgaactcaaaaaccgtgtt

SEQ ID NO: 644288 - DNA, 889 bp, Homo sapiens
gagcctggggcggccggcaggaaccacccgttaaggtgtcttctctttagggatggtgaggtggaaaaaggctcctgtaaccctcctccaggatgaaccactgccagaagacatggagaacgctctcaccgggagccagagctcacatgcttctctgcgcaatatccattccatcaaccccacaaatcatggccaggattgagtcctatgacggacgggaacagacaggcatatctgatgtcaggaggacttctgtggtttgtccacctttgacctcttattcgtaacattactgtggataatagagttaacctgtgaatgcgaggcattgagaacacattaagagaaggaggtgatgcacgtatgactactattcttcatatttgatatatttctctctggcagctttttcgatttcaaagtgttaattacttgcatatgctgtgtgcagactgcgccatttgttgggcaatagcgtgacaacggcgtgtgacagtgcctttttacctagcacaagtgatcctttcgaagctttctctcaggggcttttgggctatgtgctgccatcattttcattcatccttgcctgtttgtgaacgtgttcctggattcacagtgtaacctcaagaagcgaggaagaaccaggatccggatagttcaggagctccagagagggcaggcttatatcacggggctcgaaggcagtatccctcagaaccgagcgctctgagagggagaaacaggacgggaaccctttgacatgggatacctggaggaacctccgaagatcgcaagaggggggccgcgagcaagaaggggccgcgcgttgagcaaacatatcccacgggcaccccaggtggggagagcaccaacgaggggagggggaaaa

SEQ ID NO: 644289 - DNA, 730 bp, Homo sapiens
  misc_feature (20)..(20): n is a, c, g, or t
  misc_feature (64)..(64): n is a, c, g, or t
  misc_feature (74)..(74): n is a, c, g, or t
  misc_feature (146)..(148): n is a, c, g, or t
  misc_feature (151)..(151): n is a, c, g, or t
  misc_feature (168)..(168): n is a, c, g, or t
  misc_feature (182)..(182): n is a, c, g, or t
  misc_feature (195)..(198): n is a, c, g, or t
  misc_feature (227)..(228): n is a, c, g, or t
  misc_feature (232)..(233): n is a, c, g, or t
  misc_feature (260)..(261): n is a, c, g, or t
  misc_feature (264)..(264): n is a, c, g, or t
  misc_feature (295)..(295): n is a, c, g, or t
  misc_feature (353)..(353): n is a, c, g, or t
  misc_feature (376)..(376): n is a, c, g, or t
  misc_feature (387)..(387): n is a, c, g, or t
  misc_feature (390)..(390): n is a, c, g, or t
  misc_feature (413)..(414): n is a, c, g, or t
  misc_feature (416)..(416): n is a, c, g, or t
  misc_feature (467)..(467): n is a, c, g, or t
  misc_feature (480)..(480): n is a, c, g, or t
  misc_feature (482)..(482): n is a, c, g, or t
  misc_feature (497)..(497): n is a, c, g, or t
  misc_feature (519)..(519): n is a, c, g, or t
  misc_feature (538)..(538): n is a, c, g, or t
  misc_feature (540)..(540): n is a, c, g, or t
  misc_feature (563)..(563): n is a, c, g, or t
  misc_feature (566)..(566): n is a, c, g, or t
  misc_feature (572)..(573): n is a, c, g, or t
  misc_feature (577)..(577): n is a, c, g, or t
  misc_feature (600)..(600): n is a, c, g, or t
  misc_feature (641)..(641): n is a, c, g, or t
ccctctcctataaggctctnatctctttcttgcgggttcccccctcattccctacgcatttttntgccttcccnaaggccccccctcttactacgttcgctttgggttttgggttctggcccatactttccctctttttctttccnnntantcgtgtgggcatttttnaaaactataaattntttcttgcataannnnccccccctatttttttttcccgttaaagnntaanntgtctgcttccccccccttagaaagcnntgnctccccccccctctgccggctcgcgtctgtncccccccccctcctttccccccctcctccccgccccggttcctgtccttttttttgcncttttccggcctccctgctgggngctggggcccngcngcgggctcccccctcttgggggnngntgttttgctgtgggggctggctggggcgtgggcggggggtctgggttcccncccttctgttctnanatgggggtggtgggnagtatctcatctttgggttccncaatgctcacgtggtcagncnggggcttcttagggccaatcttnccngttggnncccngggcagcatgatcttcaccttgntgcccagcacaccctgtctgagcaacacgtggcgcacagcngtgtcaacgtagtagttaacagggtctccgctgtggatcatcaggccatccacaaacttcatggattttgccctctgtcctcggagttt

SEQ ID NO: 644290 - DNA, 258 bp, Homo sapiens; identical to SEQ ID NO: 643295

SEQ ID NO: 644291 - DNA, 1010 bp, Homo sapiens
  misc_feature (694)..(694): n is a, c, g, or t
tgcaagtgattggattctagatactgatttcaagggtagcacacacgtgatctgctgatagattccatgtcaggtgtgagagggaggagagtcaagctcatccacagctctggcagcggaagacggccaaagtgaagaaggtggcctcaagtttacctccaccttccaaacctcaactggtaaaacctcatgcatgcccagaatgctagcacaagagatttagggaaatgtgggtattttgctttctggccctgcagttcaggttccaccttataaaatgggagtggcgtgggtggtgggcgccaccagccatattcacgggagttagcataagggttcacagtttgagtgaagcttcctgagactgtgccgtgctgccaacacagttctctccgattcattccctcaaaacagtatattcccaatgaaagcacgaccagtacttaaactagccatgttcagtgtggctctcagacctttccccagggcaagatgatcacaagaattcctttaggaacgtctcttaaattgtacaactaaagtttaatggttatattagaatccgtcttcgtactatgaaaattcacccaactgatctcccatttctgggatatttagattttttctagtttttcatcgtttaaaaaatgatgcagcctggggtggtggctcatgtctataatcctagcagttngggaggccaaggctggtggatcacttgagctcaggagttgagaccaagtctgggcacatggtgaaacccatctctaccaaaatataaacttagccggctggtggcttgctcctgtaactccagtacttgggggtgagtggaggattggtgagccgattggtagtgctggctggagaatgccctggcctagcggtggacgggaatgtcccaaataaattataaccttaaaaaaaagggggtaatcccgggcagcctttaagccaagataaaacggccgaaggtgatcggtgggccacactattttcggtgttcaagc

SEQ ID NO: 644292 - DNA, 325 bp, Homo sapiens
cgagcaacgatagcatgtaattgggatgtgatgtggtcaggtttgctaactcaggctcaagtgtggaagattggtgtactgcagagaagatatgtccaggttgactgtttgtagaaattctcgttagaggtgatgagggaacctggcataagggagcatagcagcgaggagatgtgaggggaccgatttaagtgactttaggatgttacattaagcggaattcgttactgaccagatgtaagggttgaaccataaggccgactcgaatattactcctcggtttcgtattctcggtgccagagctgggagtgtctttatctgggtt

SEQ ID NO: 644293 - DNA, 283 bp, Homo sapiens
tcagatggcacaggctagacacaggctcaagatggatcacttgaggtcaggagtttgagaccagcctggccaacacgttgaaaccccgtctctactaaaaatacaaaattagctgggcgtgtcggtgcgtgcctgtagtcccagctactcgggaggctgaggcaggacaatcgcttgaaccttggactgggaaggtggaggttgtggtgagccaagatcgcaccattgcactctagcctgggcaacaagagcaaaactccattaccatcttgagcctgtgtct

SEQ ID NO: 644294 - DNA, 167 bp, Homo sapiens
atgatactgtatcttgccccactactgccttctgccgcgattgtaggcctccccagccatgtggaagagtaagtccattgaacctctctttcttctcagtctctggctatgtctttatctgcagtgtgaaaatggactaatacagatatgatacatttcaggggtac

SEQ ID NO: 644295 - DNA, 133 bp, Homo sapiens
aatatgactcattacaacaatagtagcattaaaaaaattttaagggttttttgtttgttgagacacggtcttgctctgttgcacccgctggagtgcagaggcgcaaccatgactcactgcattctcgaccttt

SEQ ID NO: 644296 - DNA, 263 bp, Homo sapiens
  misc_feature (259)..(259): n is a, c, g, or t
gattacaggtgtgagccaccgtgcctggcctattaatatgctcttaaaactcatccatacgttttcatagcaagaaagcttatttctcccaactaccgaataatattctatcgtatggccgcacctctgtttatccatttacctatcgagaggcatcttgattacttctagctttggattattacaaataaaactatacaaacacgcaaacagagtttctcgtgtgaatataaacccgcaaaccggctggaggcatatnacca

SEQ ID NO: 644297 - DNA, 249 bp, Homo sapiens
  misc_feature (218)..(218): n is a, c, g, or t
  misc_feature (232)..(232): n is a, c, g, or t
tgaaaaattttgttatatatagcatatgccaaaaaaaagaaaagccccccaattggaaaagcagaagtaaattctctctgttcccagatgacatgattttatatttaaaaaattttaaagattttgcccagaaactattagaactaggaaatggattcagcaaagtttcagcccccaaaaccaaccctcaaaaatcagttgcatttttataccaatgnccgaaccccctctnccccctctagagcccaa

SEQ ID NO: 644298 - DNA, 105 bp, Homo sapiens
gttctgttcattgacgagttatgtgacatgaagataaaatggttatgtcgtggttaatattgtactttgtgttgatgtaaataaacatggtaatttattcattga

SEQ ID NO: 644299 - DNA, 341 bp, Homo sapiens
cactgtgcccctaagtcttcaaagcccacagctgggaactctaatacattgcctgtgtcactaatgaagagaagtgcacgttactagactacatcaacactattaaagggcaagtgacagcaagcaaggcacctactcatgtgtatgaagaccaggatttaccatgacacagtctacaacacgggcatagctgttatgatcctgaataccgctatcataaaaataatcaatttctatctttctgtcttccttctgctgcatgaggaaccaaagaagtcaaacagatgattgttctgtctgagccaaccatgaaatctttaagaacagacaggtgcagcgta

SEQ ID NO: 644300 - DNA, 113 bp, Homo sapiens
acccccggaaccgcgggtgaaaaacaacccccaccgccacgattgcatacctccagcaagaccctggaggaccccctgaaattccaggcccttggaaaaaattaccgcccccg

SEQ ID NO: 644301 - DNA, 141 bp, Homo sapiens
ctctagagtatcccgctacaaggccaaggagatcttgacatcagaagtacttgcatgcagaaatactatcatcgagactgccggcgaaacctgtccatcttgctggggaaagcgccgggctcctgggctcatgaggggcgg

SEQ ID NO: 644302 - DNA, 173 bp, Homo sapiens
acggttcacaccccggcacatgctgctggctgtggccaatgatgaacagctgactcagctgctaaaaggagtcaccatagccagtgggggtgtgacacccaacatgcaccccaagttgctaacgaataagcggtgatccaaaggaaagttggaagccatcatcacaccaccca

SEQ ID NO: 644303 - DNA, 126 bp, Homo sapiens
tgaggttaacatctcctcctgttttctccaatgttctcctttagtattggctggtaatttgttttggtgatttgccaccccctcgagattgccttgccataagtgctctgttgtgcccttatcgag

SEQ ID NO: 644304 - DNA, 141 bp, Homo sapiens
cggagaggacccgggaagcatttattgatccacggtggctcagggttggagccctacatactcccttccctttcacctcaaagggaactccttggtatgtagccacacactcatcattagggtgaagatccggctgtctca

SEQ ID NO: 644305 - DNA, 624 bp, Homo sapiens
caaacatggcttactgtagcctcaacctcctgggctcaaagtgctcctcctgcctcagtctcccaagtagctggaattacaggtgcgtgccaccatgtccagataatttttgtatttttagtacagacgttggtttcaccatcttggccaggctgtcttgaactcctgacctcgtgatacatccacctcggcctcccaaagtgctgggattacaggagtgagccaccgcgcctggccgagctatttaatttcttaaagtaattaaagcttaaacactttcaagtctaaaaacttttttttgaaacacaaacacttttgagcaaataagaaaacacagtatacatttttgctccttgtagataccttttcttaatgaatttttaccttacccttactccctttaaagcctatgctaggcttcagagaaatgctttctgttttctttagcctcacttgcatttgaatcctctagcagcttctcagtgactcttgctcacttattataaaatgccctcctccctcctgaatgaattgagcttaatctctacatgttaaatccccttgtgtgggcacccatgccagcagcctgggcaacagagccagactctttgtctcaattaaaaa

SEQ ID NO: 644306 - DNA, 402 bp, Homo sapiens
  misc_feature (279)..(279): n is a, c, g, or t
  misc_feature (346)..(346): n is a, c, g, or t
  misc_feature (353)..(353): n is a, c, g, or t
atactcgctgtatccttgaactcctgagctcaggtgatcctcctgcctcagcctcccaagtagctaggaccataggcatgtgccacaatgcctggctaattttgaatttttttttttcataaacagggtcttgctatgttggccatgctggtttcaaactcctgggcctcaagctatatttcctccttcagcctaccaaagtgttggggattacaggtgtgagccaccatgccctgccacttagggagttgttttatttttatcttggattggattggnttttctttgggggaaaagtatttaactggataattttatgttgggtgattcatatttttaatatttnctggaantatttcatatttccgagtagggaaagtttgttttttaacctggaaggtg

SEQ ID NO: 644307 - DNA, 146 bp, Homo sapiens
tgtgaagatcggcgactttgggctctctggtgtgcagtatggattctcggcgtgtgcagtctggacgttcggcgtgtgcacgtgaagatcggcgattttgcactcgtgcagatcggcgattacggtctggacgttcggcgtgtgca

SEQ ID NO: 644308 - DNA, 567 bp, Homo sapiens
acacgttacagatcatgcatactaacaccaagtccataagtccttaatgtgcaacttgtgtataacagtgtcactagttactagatgaacacagcttgttcatggaacagcacatctagaacgatgtgacgtagagactgctgctcaccttctgtgacctgaggtatcccatgcctgttttaacactaaatattcccacaattgcagcacatgatgccagaaatatgcactgaatcaagaaaatagccattgcggaggtgccctcttggagtctttctgtccatcccattctattctgtacggtgacttcaggttcagggaggttgggtaaggttgttaaaaataaacaggaaagagcaagtttggctcagtcaagtgatcagatccccgaactctagattccccagttctaaggccttatcaccctccccgtgaccataggccaaacaaccatagttcctcacataagtgtttagcagactctttgtggacgagtgaatttcacaaacggcacaatttcagaagaaatcgagggcacaggccccagtatgcttctttgggcgcatc

SEQ ID NO: 644309 - DNA, 496 bp, Homo sapiens
  misc_feature (91)..(91): n is a, c, g, or t
  misc_feature (284)..(284): n is a, c, g, or t
  misc_feature (296)..(296): n is a, c, g, or t
  misc_feature (301)..(301): n is a, c, g, or t
  misc_feature (309)..(309): n is a, c, g, or t
  misc_feature (319)..(319): n is a, c, g, or t
  misc_feature (341)..(341): n is a, c, g, or t
  misc_feature (398)..(398): n is a, c, g, or t
  misc_feature (419)..(419): n is a, c, g, or t
  misc_feature (459)..(459): n is a, c, g, or t
  misc_feature (489)..(489): n is a, c, g, or t
ctgcttgtttgttgcttttcttctcatatttattgtcaaagataaatgtttcaaaaagaaatgactaaggaaggaaaagaaacaaatgctntaaagattttctctccccaagcacttttactggtgaaataaaaaccagtaacaatcaatatgtaaaaacggcccacttccctaaaaaaaaaaaaaaccttgcagactacaaaaattacttttttttagtctgcaaggttttttttttttttgctttagtctaaatacttgttaatcttacatgttctcccaangtgctgggattncaggngtgagccnctgcgcccanccatttttgattttttgtaaanatggggtctcattgtgttgcccaggctgattaaagtttctataaggtatgtttattnttaaggatatctactctaacncctgtaaatgtagggtgatcaattagtaaattaataaatntgaatcaattaataaatctgtttaaaattnaaaaaaa

SEQ ID NO: 644310 - DNA, 502 bp, Homo sapiens
cagaatcatcctttttgaatccctgtctcagcatccattgcacagggtatgagggctggtcttcctaggacttgtggcaagatctgcacctatggcatttgcagatgttcagccccatgtagctgacgtcatggacagggctggatgttgagtgactgtagcttttccatactgagggtgcaatgctgtttgtgggtctcatgactctggggtttggagaatgatgcctccctgtatgggggcctgtgcacagcaatgggctgctgcagaggactgtgaaattgccttcgaggcctctttcccattgtcttggctatttgcactgggcttcttttcatgccgctactctaagcctccctgaattttcccccgggacaatcagcccctctttacgaccacttggccaggcagcggatcttccaaagtttaggtctccaattctcatgtcaatcgaacgtccaacttgaagtcctttcttaggtcacgcctaagaacacaggct

SEQ ID NO: 644311 - DNA, 388 bp, Homo sapiens
  misc_feature (46)..(46): n is a, c, g, or t
  misc_feature (159)..(159): n is a, c, g, or t
  misc_feature (176)..(176): n is a, c, g, or t
  misc_feature (188)..(188): n is a, c, g, or t
  misc_feature (193)..(193): n is a, c, g, or t
  misc_feature (201)..(201): n is a, c, g, or t
  misc_feature (211)..(211): n is a, c, g, or t
  misc_feature (233)..(233): n is a, c, g, or t
  misc_feature (290)..(290): n is a, c, g, or t
  misc_feature (311)..(311): n is a, c, g, or t
  misc_feature (351)..(351): n is a, c, g, or t
  misc_feature (381)..(381): n is a, c, g, or t
gccttttgggttcaagcgattttcctgcctcagcctcccaagtagntgggcctacaagtgcatgcccccacgccaagctaatttttgtatttttagtaaagatggggtttcatcatgttggccaggatggtcttgatctcttgacctggtgatctcccngccctggccctcccaangtgctgggattncaggngtgagccnctgcgcccanccatttttgattttttgtaaanatggggtctcattgtgttgcccaggctgattaaagtttctataaggtatgtttattnttaaggatatctactctaacncctgtaaatgtagggtgatcaattagtaaattaataaatntgaatcaattaataaatctgtttaaaattnaaaaaaa

SEQ ID NO: 644312 - DNA, 133 bp, Homo sapiens
aaaaaaccgtgcgtcgcttgcaggatctacacgcaggattgaaggaatgatcaaatacccaatgaccgtccagggcgcaaaagccctggaagaagaacacgcccacctgaccaaggtcgtccgtccgaagctg

SEQ ID NO: 644313 - DNA, 158 bp, Homo sapiens
gtctgcgttgtcgtgagctgtgtcctgtctggccaattccttggcaacagactgttgtacacggagtgcaaactcctcattcgcttcccctagttggcgatgaacaggacgaagccaccttacttgatacaccgtagaaagggacgaaagagtgacca

SEQ ID NO: 644314 - DNA, 1091 bp, Homo sapiens
cttggaatgtcagtcgtagtcctcgcaggtctcggctgggacgctggaagtgcgcagtccacgacagaacaaatattcggtgcttttacctacctacaactgagcgcgagaaccttgccgctcaatcgctgctggctgctggctgacacaagcttctccgagagttggaattcaacctaatgaacattataactcatagactgcactggaagccccagcattggaaacaaggggactgctgctgaaacacgttggaagaacgatctatggcgtcacgacagaattcttctacagaccaccgagagcaaacacacgttgggcacctaggaactgccatactattcatgcgacatgcaacacattgccacaggaaaacttacatcacttaatcaatggagtgcctgatcttctcaccacccaatcgcaaaaattttaattccctgacacttcactcacgcgacacgccaacaagcgagcggctaaattctcggactacttggtcatctgggaaaccccgttaacaaaggtacacatggcgcgctgtatattgcgctggcgatttcgcacaggacacaataactcgcccgctgggcgcccaatttttttaacctccaggtctatgcctggagaacccagtgagccatcttgattttacccagcgaccggtttccaagatttaattacccgaacaaggcacgtttcctaagaggaacacttacttccacacaaccggttgttacctaaagggcgtacgggcgttcccagaatggccgacttgacttgcgtcggggcaagaacccaggttggacattatacaaatgtgcgaagggttcccactatcactttgtgggcccccgggccaaacggcgcaacacccccgtttgggagcgacagcgaaccaagaaccccctcgcacagggccgatacttagcccccactacggcgagcagaccatcacacaaagcagccccacctgcatagcagaaccagacccaccaccgcggtacaactaacagaagccagcgcatcccgacatgaaatacgggccacccgcagacacactaagcacggagaacacagaccattagacg

SEQ ID NO: 644315 - DNA, 200 bp, Homo sapiens
tggtaaactacatacccaaaataaagcatatcaaaaactgtaaaaaaaaaaaaaaaaaacccctaatatcagatttcccaaacacaacaataccataatttaatcccttaaaatctttacctcaaaacttaaactcaagtgactcttttagggccaggtgtgttggtgggcctcatgattagtaactcacagctactttg

SEQ ID NO: 644316 - DNA, 449 bp, Homo sapiens
cacaggcacctcttctactcagaacatggcagaatactgagctatgcagccagcagtcaacaagccactctcaagagcgagggttgtcccaacagaggcagtcagatcaggaatcggcagcccttgaaaagtgtacggtgcaacaatgagcaatggggcgttcgacatccccaagtcttgcacgccaagaaaactgtatccccagtcagtccgcgtcagcattggcaaaagacatccggtgcctctaggcgccatcaccactgtccaaggcgctgtcttctttgggaaggtatctgatttggtcagtcaccaattgttttttagccttccgtggagaaaagcaagtcctcaagaaagaattcgctgtatgtagagaaaaaatattttctctcatgttagtacatgcagaacatttaatattccacaatatatatggttttttattcaaa

SEQ ID NO: 644317 - DNA, 1096 bp, Homo sapiens
cctcctttccacccccctatgtatctaagccttgaacccacagtctttgtgccctttttccttaatggcccactacccaccgctattcccaagcgaaaatgttaattctaacctataaatgccttaaatactcacaatctcgtttttttcgcccacactagcgtcgttgtcgagggttgcccaataagggtatcaacgttcgagtaggaaggacgttgaccttaacgtgagaaactcgaatgctgcccccccgtgggcacacagagaggacccccgagggcccgtcggattgaggtacacaatatttctgccggggcttctcgcaaagttgacactcggatttgttgccacttataggcacccctttcatggattccaaccacgatcttttacaccgaaccgcgctttcaagagctcgtgctctccggggcgcccagagctcgatagaaaaaggtggaggtcccaggtacatagcgcacacgttgcaaatttctgagaaattgtctatgggtccatatagtccgtgcacgccctccactctgtctcactgactcccgcgtccccagacgtcaacttcatggaccgttcagttagaatttctctttttgatcccagtatagtgtgcttgatgtgccacacaatgcgccatggtgcagcttgtcagtaggccgccatacttatggcataccacttgcaacgcctccgacccttcccggtgcctcagagccggacttccaattcctacgctcatcagctctccttcgagtagtctaggacctgccaggctgcgtccaccacgcaccggactaatttctttgtatttattagttacgagatgagggtttccccatgttgagccaggcatggtctcgaactcctggcctcagagtgtgatccgcccagcctccgcctccccaagcgctgagattacaggtgtgagccaccgtgcctcaggccctcactaggttttaaggagtccccagcctctcctcccttctgggcccgaccagccttatactgctccatcttccccggccacatgccccgccaagtacgtgctaccagggaccccccacataaggccgtgctccgtgaa

SEQ ID NO: 644318 - DNA, 1369 bp, Homo sapiens
  misc_feature (1369)..(1369): n is a, c, g, or t
gataagtaggtttatctcatggtagacatgcagaagagagagtacagattgttattaacatttggatgattaggtgtgataatggtggacggatgaactgggagtatgtaaatataatacatttatattgacgtgaaggctagagtagtcgctaggaatagtacgttgttagatgatcgctgtgcaaaggacaatcctctgatatatcatcctagacttgcattgtctttagcggagaagcatatagagcaaccgcacgtatacgcgcatgcacgtatgcattggctcaatttcagcttgaatggggcaaatctttcagaggttcgttagtgcttcggcaaggtctgcttgatcactttggaatacaaacgtgaacgtagaaacgtaggataagtaactcccgtggtgctacttcgaattcctttcaaagttataggccgtcacgtttagtggtttattaatggatatacaaagagatactagttgtacccgattttcgggagatgactactaatatatgctaggcggaattgtatatagagaaggtatgctgggagcatggcgaataaactgggtcgatagtggatatagctggtgttagagactcgtttagataagattttggcgtataacttgcggtagaaatgtaattaaaaagccagtggtccccccaatttccgttggtaggtctagggatatggaacagaatctccgtccatcaccaattaactttagcaaagcgcggagcgagagggaaatgtattcgcctcgcgagagtcgtatacatggataagagtgttggaagcccttttaatccaataaagggcaacccattgtgtgccagggtagagaattgctagaaaaaggtcaagtcagtcagttcccggttttctgaatctaggcggaggagctcaggagaagaatgacgagaattgaagataatttagccaatttttgccaagggttgtggcagacaggaagggtttatctcatatgtggcttttttggagagggtaaattcaatcgaagggggtaaatttgctaatgggtgggagaatccgagatttgattaatttcctctaagaaggggtggaccttttttggaccccatttctatcagtggaaaatcaataattgggacaatttaaattaggattagggtagttccaagttggaaaaggaacgggtgggggagagagagttggccccataaagggttgtaaaagggcgcattttacgagtaccactttggggggaattttatccatacactataaaaggtccaataaaaagacaggacagttttatacgagaaacattttgggttaatagggagttaagatatgcgggtcgtgttttataatatacn

SEQ ID NO: 644319 - DNA, 279 bp, Homo sapiens
tagctgtgagtctgactcttagagtgatcccccagcgtaaattagcatctgccaaagtagagtgccagtcagcacattacagaagaggaagatgatgatcctgatgtttattactttgaagtcagatcatgtggcactgaatacacaacaagagattatcagacgactattacagaacgattgcgtgtactcggaggctcacgcgttctccaagccagtccaagcaccttgaaaagtttcaggcaggcacccagaggagaagcacttgaaaaaatccca

SEQ ID NO: 644320 - DNA, 365 bp, Homo sapiens
gcagaggatttagacttcgtctaacagagctgagtcctggatggcgtcgcgggacactagaacccaggcccgcagctgccttcatattcccttgtaaagtgagagaaagataatctttggctaagtcacagacctatgttttgctacttgcagcctagtatagtctgatttaatataggacctgccctacccttactaggtatcgcctgctttcccatagacaaaccagcatgccgagaaagatctaacttctagatttctctaaagatgtgtgtctgtgaaggacaagtataggactgttccgcttcatactaccatgactatgtgagttcctagcgacttatgaagtctgcggactcactctc

SEQ ID NO: 644321 - DNA, 475 bp, Homo sapiens
  misc_feature (9)..(9): n is a, c, g, or t
  misc_feature (26)..(26): n is a, c, g, or t
  misc_feature (31)..(31): n is a, c, g, or t
  misc_feature (50)..(50): n is a, c, g, or t
  misc_feature (61)..(61): n is a, c, g, or t
  misc_feature (88)..(88): n is a, c, g, or t
  misc_feature (118)..(118): n is a, c, g, or t
  misc_feature (219)..(219): n is a, c, g, or t
gcccgcccntagaaatgcccagccanggagnagccttccaaaattggatnaagccgaattnggactacctccatggatgtactagtangcacacaggcacttgaaaaggccaccaggncctggcgctgacccttaggacccaggaagaattgacttggatcttgagttgagcctggtggtgacaccaacccacttgacacgacacaggtggcgtccccntcacagaggagagccagggtcactttggagagactgtactgagtcctgggaacttcacatccatccacctgtcttgaccagtgaaggagttggaaatgagccccgagtggtgaaatgacagggcccagtgacagtaatggtgtttgggccaggctggggttgaactgggataatagtttgggctatcccatcccattatccccagtgtgggaagagacctcataattttttgaaattaaaaccagctttgggaaat

SEQ ID NO: 644322 - DNA, 357 bp, Homo sapiens
cgccgttttgtaggatgcagaatctagacagtagttaatttgacaggtttcagaatggtagcccagcaaacacccaggttaggcgcctataactctgccaagttgaaagcgctctgcataattggcagtctcttgataggtagtctgacagcatcttttcagtttttggcctaaaggtgactacagagacttcagagaaaaatctttttttttttttttccttgctcaagagtaataatgaggctggagagctagatctgtccttaaagtatttgccaaacaagtgtgaggaggagctatgtttgttactaagagcccatgctaaaaaataaccataaagtgaaaccaggtcgacgc

SEQ ID NO: 644323 - DNA, 232 bp, Homo sapiens
tgaagctgattcagagtatcccgctgtgcacgtgtcatcagtgggtcattaagaacatggcaactcaatgaccacaatgagataccatgtcacacccgttagaatggcaatcattataaagtcaggaaacaactatgctgaagtgtcttagagaaataggaacacttttacactgtatgggagtgtaaattagttcaaccattgtggaaaacagtgatgagacgatagaagg

SEQ ID NO: 644324 - DNA, 172 bp, Homo sapiens
tgtttcttataccacgatattgtgttcatcttttaataaaacacagttaaactttgggaggcaaggcaggcggattgcttgagcccaggagttagagaccagcctgggtacatagcaaaaccccatctctacaaaaaaatacagaaattagccaggtggggtggcacatgcc

SEQ ID NO: 644325 - DNA, 331 bp, Homo sapiens
  misc_feature (90)..(90): n is a, c, g, or t
  misc_feature (141)..(141): n is a, c, g, or t
  misc_feature (151)..(151): n is a, c, g, or t
aaaattgagcttttttattagaaagacaacagtacataatttaccccttgctaaaggtattcaataaaaaagtggagatatttttattcncaggtaattgtcacatacagtctttcttctctacttctgcttcattctctntgtgtcactntagtatgtgtacctcctgggtgctctctgtacatttttctcctctatacaagtctgtgccatggcttctgctgtcattcttctgcttgctctcacagattcctgtgccgttctgtctccttgctgtactacaggattcgtcggctctcggctcctttcctccttctgtcgtctctgcacc

SEQ ID NO: 644326 - DNA, 110 bp, Homo sapiens
tcccaaacgtttaactgaactcctcacacccaattggaccaaggctatctccctatagaagaactaatgttagtataagtaacgtgaaaacattctcctctctgcgtttg

SEQ ID NO: 644327 - DNA, 260 bp, Homo sapiens
ccggggggcaatggactaaactctttccatgccaaactttgaaccaccacccttgaggtgacccaatgcagacctcctgtaccctatacatggtagagattcctgaggggctaacttacaagtttttgtttgtttgtttatttttgtcttgatttactctacaatgttgtataaacaccactattcaatagtaaccaaacttcaaattttgatcttttcctgggtctaggggcaattagttgtatttgtaattctcttga

SEQ ID NO: 644328 - DNA, 479 bp, Homo sapiens
  misc_feature (475)..(475): n is a, c, g, or t
cgcagcggtactggtctgaagtcggaaacaacaagttcggtcggtccatgggtctcgtcgatccaggtagtaagctcttgggcgttcgctactgttgccgaaagaccaacaagctgaatatctttcggagcataaataatcgattcttcccaaacagtgccccgatcagcatcattcatgtaatgacattcatctaagacaacaaaggcacatcgcgcaagttgcgactaacgtcaccaagaatggtgccatacaacatgttgcgaaaaacttcggtagtcattacaaccacaggagcatcacggttgaccgaaagatcacccgtgagcaaaccaactttttcatccccgtacttttgcttcaagtcataaagcttctggttagatagagctttaagcggcgttgtgtaatagcaacgcttgtttgacatcagcgccatctcgacagcgtattccgctatgactgtttttcctgnaccg

SEQ ID NO: 644329 - DNA, 146 bp, Homo sapiens
actgaatggatggcgccatgacaacacaggacagtgaatatgtgattgagacggattctccgacgagactgtccgatacgcccatgaaaagctcaatgccggcagggcttctttgctacgttagtggatgttgtcgtccgagcgga

SEQ ID NO: 644330 - DNA, 403 bp, Homo sapiens
aaatcgagctcggctacctgtaacattcgtgtctacaacatgtgagagggtgtctggctgctctctggctctgtactagactcggtgacaagagtccctcatggagcagattggaaaggacccaaagtgtgaatctgctcaaggaactgcacagcgtgcttgcaaaggcagtgactttcgtgtgagtgtcggatgaaaccatcagccagaacatggggcggtgctgtcgattctaacctggttacttgtctgtgcccccactcgatcgtgtgggctgtaagtagcgcgaattaccagtgtgctagacagtgctctgccctgcactcgccggtgttgcctcgcgcctgtgtctgccgtctagttcccggaagctgtcctggctgctggcctgacccctgagact

SEQ ID NO: 644331 - DNA, 1370 bp, Homo sapiens
gaggcatgaatatcaaatcgctaaggggacaagcattgctgtagtctgcccatccgtcaattccggtcagctgctttctgcataattgaacagacaccatagaggccacgcgcaattatcgaatcaatgatcagccttgcattttgcgtactcctctagtcacacaactcaggcctctctgcgatagaccttttgtctcatcatctagtaccatcagtagggaaagggatgtgaggattgtgaccttacgacgaaaatctgatgaccttgagctcaaatgtcataacttgatatcatcactcgactggacgaacgaccttcgtatgagaatcatttataccgttgctgatcctgtcagaagaccctattaagtgaatcctcattcttctgttgctcttacacgtaccttctattactccataccaataactcacataaggccgagaggtactcataatcgaagcttcaacatatttattaacttcacaggacaaagcagcttaggcaacgtagctaatatgattcttactgaccatcttggggaaaaagaacagccataaaaagctatagcaattccacaaaaagtctattcagtaacacacgttctccaccccggcgtcctctccatgctcgcctaacgagtcagtggtggttgaacgccctcgggggtaagattcccgtgcgcattcaaggtggttcattctggactttggagagtctcctatggtgaatttcggaaaaatggaggtatccaacccatttagggggttcgaaataaaaaacggtgcttacttcgatggaaccacggagggctattaacatttatggtcgagccaaagtcctcacagttcgccataggaattcgtgcctccattgggtgcgtgcacacgtggaaacgcacggtgaaatttccctttacaatcgcggaggcgggtccaaaagttcttatcgaacttaaagatggacagccccaaagttactctttttaatagctaaggagcggatggaaaggaattttgcgggcgaattggacggtgaccaattggttcgggtggaacctacctatgattggccatagggccccaacgtaaggaataatattcattcccttggtcacgttcggcgcttaattctaaagggggtgtgaactccacctttcctttacccctgagatcaagtattaactctgcttgggaacactgggagaatggaggtttccttggaaaagcctgactggaaaaaattccaggacgggcactacatcggtcccagttccattcacaaaaacccctattaagaggataggtggacgatccatagagaggaggatgcttctgaactgtccaggaccggaagaaagctatctttgg

SEQ ID NO: 644332 - DNA, 726 bp, Homo sapiens
agcggggttgagattcagaccttgacagtgtaaccgatagactgggctggggcaacgctgatgaaaggcaaattcctgagagaaaaatcacccagagtaaggagttggcactgtagactagattcagctgcaggaattgtgcactagaaaaatgcagtgtttcttttttttttttttggagacggagtctggtcctgtcgccaggctggcagtgcagtggcaccatctgggctcactgcaacctctctctcccgggtttcacaagattctccgtgactcagcctccgtgagctagcctgggacttacacggcacccaccacgattgcccggcctaattctcacgtagcagacaggcgtttcaccagtgttgaccaggctgtcctcgaactcctgacctcacgtgatctgcccgcctgggcctcccaaagtgctgggattcacaggtgtgagccactgagcccggacaaaatgtggcggtcctaatggcaggcacttgaacccacattgaaccctgagaacctctctgacagggctgcgctgctctgggcactgccacgagctcatgactattccagtgccttctctagcttcctagagagtcgttactgagtggacctgactacctagagagagtactccagaaagctccgtgccgaatcacagcctacctctttaccagtgtccctccaccgatggccgcccctgaggacgaatcctcaacctgg

SEQ ID NO: 644333 - DNA, 1699 bp, Homo sapiens
gctcttcttatcatcactgattgtctgttggtgttccgctaagatgttaatccactattcgccttgttgtgtggggttcgtcacacaggacaccacaatccaggagagtttttatgggggcggcccaacacctcagtgtgatagatcaccctccctgcgaagcgggggtcgcccacgccacctacagtgcggttggtggaccacgcaacaaaatatagcgccctacgggccgttgtttgttttgataactctcgcgtcgtgcgggctcgccgcttgtatctcattaatatttattctccgcgggggtcctcttctaaaaaagggtgtgattacgtccgcagcagggcccctcattctgggggtgttgggcgtgcataatattttttcgtgggtcatctctccgagggggggctttgttctcctcctcgctggcgtggctgctcctctgggatgggtctttttctggctccgggggggactgtttgtgtccaactatttcctgctggtgcctcgcgcggggggggtaaaatattatgtccgcggtgattacacacaggggtttttcttgaccggaagaaagctcttcattaaatagtatgtgtgttttcctctcaccccgtggggcggccacaccacgcttctcgccgggcgcgtgaagaagagaatttctcctcccgcgagagggaagagaaaaaaggggaggagatctctcgcccaccaacaagagaaaattataggcgcccccctaccggggggataactctcggcgatcagagagatgttggggagcgccacacgcccctctattatcgccgacaagaaaattggtgagaagaagagtgagaaggagtccccccccccccccttttgtggggagagagagagagtgtaaaagggcgcccaccccaggcccccccgtctcagaggggatatactgccacagggggggcacaacagagacgtctcgtcctcgcacacttcgcggcgcgcgctgtagatatgtgttctcgagaagagggcgcgcacataatacgacccccacagagagagcgccgagagagcttctacacagttgtagatggtgaggagagggtgggggtgtgagagagagtgtgagagagatagtagatatatggtgagaaaatatagtctctactatcgtgagagagagagaatagtagagagagagataatatcactagaggagagagaatacacctgtatagggggagagcctcgcgacactgttggagaggagaattttgtgtttggcggtgatatctctctatatgggggggagagctctctctctgaatagtcacccactggtgagaccactctcactgtgagagagattttttgcgcgctcttataagcactctgagagacttctctctctgccactactgtgatgtcactgagagagagtgtaaataaactcgctggagattcccgcctcgtgttttctttgtttcctctgcactattttcctcaaaatagcctcttactggagtaccctgttgctggtggagaccctcataggtgatattgccacagggtgcaaatggggtgtcttgtggtgtggcccgcttttatttgaagagttgcccttgcaccccggggaagatttttggcccccggaggttcacccctttgcctgggaaaatttaaagcttatataagccattttaaaagccca

SEQ ID NO: 644334 - DNA, 457 bp, Homo sapiens
cgtacactgggtcgagtctgcaggcggtacagaaagcgtggctggggaggctcaggaaactgacaatcacggcagaaggcgaaggggaagcaggcacgtctggccatgtggagcaggagagacagagagagtgaagtgggagggctgcaaggcttttaaacaaccagatcccacaagcgctcactcaatatcacgagaacagcaagggggaagtcggaccccatgagccaatcacctcccaccaggtccctcccagaacactgggaattacaatttgacatgagatttgggtgtggatacagagctgaaccatgtcaagggtagttcaaccgctgagatcgattgattgatggattgactgagatggagtcctgctctgatacctaggctggagtgcagtggcacaatctcggctcaccgcaacctccgcctcccgggttcacgcgattctcccgcc

SEQ ID NO: 644335 - DNA, 1543 bp, Homo sapiens
  misc_feature (1137)..(1137): n is a, c, g, or t
  misc_feature (1429)..(1429): n is a, c, g, or t
taggtagggggggtgagcttgaacgctttcttaatggggggggggtttataggcctactaggggtgtaaaatttttaactctctcttacagagggttttttcctaggtggtccaaagaagcgtggttcctctttgggactaacgaggttaaatttacaagggggatttagaagggttcgtggtgggcaaatttaaaggtgtgaactaagaaattcatatctctggggacaaccgaggctaatccaccgaggtgctccggtaaagagtttggtgcgcctcttctaaccctatataaatattcttccccatctaatatgtgggctaactataagaagcgggtggtggcttcctttaaaggctgggtcttatagaggatagacctcgagtcgtgggtatatgcggggggatctatatagagctgtgtggggtctctctcccttgggcaagagggtataatcttccatagagtatacaatctcatatatatgtggcacgaaagagtgtacatgagggggggtataggctcctcgtgcgcgatatatattatacgcgcggttggcgcgatatataacgtcttgttacaaatctgtttccccttgtggcgggggaccataatatatctatatattggcgcgcacaagtggttttcaacaatcttctataatatcgggcgcatatataccttataattgggggggtaaatgggtgttgggggcgtaaaaaggtgtgtgtgctgcggatacgtaacaggggtggagatgtggggagatggggtgtgtccacaaggcggctatacgtggggaaagggtttgggcccggggttggggccttatttgttctcacccttgttggagacctacatgtgcgcgggaaacaatgtgggtgccggcgcaatgggtcgcaatcggtacactgtggatccaggacacaggggggcttttgggggtccgcaattggaacccccttggccgacctccacagtttgaacgcgacagacacagcggccaatatggcctttcccaacacgttggtctattggcacggtcccaccgtggaagttaccaatccgccacaaggtttctcccgggcacacaaggggtggcccaccccaagaaaaaggtttatgggtcccggacnaaatgcctgtggcgccacaaaagcgtggcgcgaccattccaactctcaccaacaaacgggggtgccagcccacaacgaaggtgggcggcccagagaaaaggattggtagatcgcgcggaagtgaaaagtgggacacgtccagaaattgcacagcacacttattgacgacgcgccgtcaacactggtctctgacaaggcgcgcacggaacctgggtcgtgcgcagaaatacaaccccacgacagcagagcgtgtacaacacgcgctcaacaaggcggggccccgctggaagangttcccccagaaagagcgcggggacaaagggacagtagacacaggcagagcaatcgacacgcaacgtaacacaccgacaaatacgccggcgatagaacactacgcagtgtccaa

SEQ ID NO: 644336 - DNA, 294 bp, Homo sapiens
gcgtcgacctggggtgacaagcatacaccaccacgggcggctaattttgtatttttagtagagatgaggtttctccatgttggtcaggctggtctcaaactcctgacctcaggtgatctgcccaccttggcttcccaaagtgctgggattacaggcatgagccatggcgctgggccaacatcaaatatttttacagccttttacaattcaccaagcactttaccatccatggtctcaccattatcttatcacaggctgtctgttacttgaataggagagcctccatttggattc

SEQ ID NO: 644337 - DNA, 239 bp, Homo sapiens
cccgtgtttaaattaaaaaacccaggtttggaaaaatgcgattttcccgctagcaaatgaggatgccaggatgtgagcccgtatcattgcaactgccccttcaggccagttttgggaagctcataattgggggctgggggagtggctgtccctctgtaactgcctttaaaacaaaaaccccctttgttttggtcaaaaccattttccggccccatgtgcaataaaaatttgtgaaatga

SEQ ID NO: 644338 - DNA, 412 bp, Homo sapiens
aagatggcgtaccagaagcttgcggctggagtacctccagatcccaccggtcagccgcggcctacaaccactgcctgcgtgcctcaccaccgcccgccgtgcagttgggaattgaatgcaaaacctgtttgaagttgtgactgtcaatgcctggaatgtgaatgctgttgaaacaactgtttgcaaaatgatggggaggatgtgaatgcaacccaacctggctgtgatgtgttgttggggggcccagttggggaattgcaatgtttttgtgatgtggaaacaaggatgttgtgcctgatgatgcgttaactggtgcgaaatggctaaggaaggaaggggctgcttttgccggagggtcggggccaggaaggacttgttgttaatgttaatggttcccttttggggttgggaa

SEQ ID NO: 644339 - DNA, 513 bp, Homo sapiens
acgatggttggcaagttaacccatgatttcacaaataatattggttagaaaaagctaagtttaaaaaaatgaattgacttaaagttgatttcaagaaagctataaatagaacctgggaggttaagtctacagtgagccaggctcacaccgctgcactccagcctggggcaacagagcaagattccatctcaaaaacaaaacaaaacaaaaaatacaaagaaaagaaaagaaaagcagctggaggctgggtgtggtggctcatacctataatcccagcactttgggaggccagggcaggagaatcgcttgagtccaggagtttgaaaccagcttgggtgaaatcccttctctgcagaaacaaacagaaattagccgggtgtggtggtgccccaggtctcagctacttggtggggtgaggcgggaggatcccttgaacccaggaggccaaggctgcagtgagccgagattgtgcccctgcgctccagcctgagtgacggagtgagaccctgtcac

SEQ ID NO: 644340 - DNA, 434 bp, Homo sapiens
  misc_feature (7)..(7): n is a, c, g, or t
  misc_feature (13)..(13): n is a, c, g, or t
  misc_feature (37)..(37): n is a, c, g, or t
  misc_feature (100)..(100): n is a, c, g, or t
  misc_feature (131)..(131): n is a, c, g, or t
  misc_feature (134)..(134): n is a, c, g, or t
  misc_feature (187)..(187): n is a, c, g, or t
  misc_feature (339)..(339): n is a, c, g, or t
  misc_feature (369)..(369): n is a, c, g, or t
  misc_feature (372)..(373): n is a, c, g, or t
ccgggcnaacggncagaaaggcacgggccgtccctcngacacgtcccagaactgaacttcccttccattgaagcgggcgcaaacacccagaatgatgttncgaccctatcccgtagccatttaaaaacttntcngcagcagcaggcttcctgccctagagtttgaccctatcccagaagttcctttnctcattctctttcacctgcccaatcagctgttaatctgaattttcaagagaaaacaagcaaacataactgatcagctgccggtatgttcatcgtgtgaaattgcattccaagtgagctgtgctcagcagtgcttggacacagagctgtcaantgcgctggggtggaggaccgtcacttaacnaanncccaaggcagaggttcgcattgctgtatcacagtattttattcaggtttctgcaaaaaaaa

SEQ ID NO: 644341 - DNA, 136 bp, Homo sapiens
aggaaaagtggcatgatgcaggtctgagtggtgtgtcatggatgacatgctgtcggcgttctcgttgatgcctgtaggtcatctggtcagaggaactgtcagagataaagcactcggtgatctacaaactatggag

SEQ ID NO: 644342 - DNA, 201 bp, Homo sapiens
gggggcccttttgggggccccccgggggctgggccttttaagggggggcccgtcccccccccccttttttttttggggccccccccccccttgggggggggggggggggttttttttttttttttgggaaaatttcccaaaaaaaaataaaaaaggggggttttttttcccattaacgggcccccttggggccccccccta

SEQ ID NO: 644343 - DNA, 393 bp, Homo sapiens
aggtcttagggagctgtcacggaagaaccatgttgctgggcacggtggctcacacctgtaatcccaacacgttgggaggccaaggtgggcagatcacttgaggtcaggagttccaagaccagcctggccaacatggcaaaaccccatctctactaaaatccaaaaattagtcgggtatggcagtgcacgcctgtaatcccagatactcagaaggctgaggcaggagaatcatttgaacctgggaagtggaggttgcagtgagccaagatcgtgtcactgcactctagcctaggtgatacagcgagactcagtctcaaaaaataagggaagaaaaagaaaccaggtgactgttgtgcccgtctcttgtgcccgatctttctccctaagaaccta

SEQ ID NO: 644344 - DNA, 631 bp, Homo sapiens
agcccctttttccgctccctgtgactggcagatggtcttcttgcagaagtaccctcccccgctgatccccccacgaggggaggtgaacgcggccgatgccttcgacattggctccttcgatgagtgaggacacaagaaggaatcaagttacttggacatgtgatcaggatgctctacctgcaacttccccctcgaccgatctctcgtatgctgtgtgtgcatgcatggatggtggcatgagactgtcttctgacaccgatcaactgctgagacatgacctggctggatggctcgcaagaaatgccaagaacaatgcatgcttgggccatgagtgaaggactactgccctgtggcaatggactgcatcatgcatggctacatgtccagatgatgtggcaaccccgttccttgacgccaagtttggcatgctgtgcttggtacttactagccttgttccccaaacctgcctctgattttgtgcggtggcagatgggctgatggctccctgcaagatgcctgcttgaccactggagtgagatccagtcggtggatggagacgcagatcaatggagctgcaggtgcctgctcctcaagatccgctggttggaaacatgttcaatttttgcacgtg

SEQ ID NO: 644345 - DNA, 288 bp, Homo sapiens
gtgacctagaggatcccctgtgcttttatttatcttctgggacagagtttcgctcttgttgccaggctggagtgcaatggcgcaatctcggctcaccacaatctccgcttcccaggttcaagcgattctcccgcctcagcctcccgagtagctgggatcacaggcatgcgccaccacacccagctaattttgtatttttagtagagacggggtttctccatgccggtcaggctggtctcgaactcccgacctcaggtgatctgcccacttcgccgtcccaaagcacag

SEQ ID NO: 644346 - DNA, 303 bp, Homo sapiens
tgattagaggatcccgaatcatatctcttcctctctttacgtcgtcctcctctggcctcaatggcttttctttacgtttctggcttttctggatggtgaagtccttccaggcgtcttatttcttccggtcgtctcatcagatctgggcgcaaaagattggccggaggtccaggataggcatcttccatttcactttccaattggtctttggcatctttcatggtttttttcaacttggttcccttgggtggtttttccatttcatccaaagacttccatcggctgagaatatccgtactcaaa

SEQ ID NO: 644347 - DNA, 347 bp, Homo sapiens
ctagctttggcagtagcttgccaccagccttaccacagatgaaacctgtctccactaacaataaaaacattagccaggcatgatggtgagtgcctgtactcccagactactgggagaggctgaggcaggagactcgcttgaactcaggcggcagaggttgacgtaagccaatatcgtgccactgcactctgtcctgggcgacagcgcaagatttcggtctcaaaaacaacatgaaatcacataaacataaaaacaaaaataataatttaatgcagggcatggtggctcatgccttgtaaatcccagcactttggacgagcgaggcgggcggatcacctggggtcggg

SEQ ID NO: 644348 - DNA, 152 bp, Homo sapiens
cccagcagtagcttagaggagctagtccagcaagccggcagagaatcccccacacgctctgaaggacccaccttcagcttcagcttggctcattcatttgaaaataaaatgtttacatgcaggccgcgcctgtgtccagcgtgaaagtgggt

SEQ ID NO: 644349 - DNA, 873 bp, Homo sapiens
  misc_feature (531)..(531): n is a, c, g, or t
gaccacatggatgtatcctgaaggtgtcttcctacctaggtcgccatgtatttgcctctcccgcattctgcatgccctgtgggcgctaccatggaggttcaatagctggggatgttcccctctgtctccttcaaggctgctctgtctgcagtaatcagagcaggaggagagcagagtcgcctagagatagattaacgaagatgcgggattactggtagagaagatggggcttccgcattggagagccatatgcaggtagagcctgtctatcagacgctgtgcacgcatccaagcacgacatgtcaggataattgtcccagcacgagcacgttgcttggaggtgtacgtaatagaaagctggggggagatggatctgaaagatgaaaccaacagcatgaacgcccccttatcgcacgggctgtcaccttgaaggagggactaggaagtaggagccgagaaccggtgtctcctaactggtgtccattcactatgaacctccaacgcactactaggcaaccttacattttcagncacgagggtggaggcgcacttgtcgcattgtatggtctgacaggatcgtatgctacataatgagacctgggggaatggccccttataattaatccagcgaaggacagtcaaaaacgcgtctacaacgacattagtgtctgcaaacactcacgttctgactcgcaaacaatatagagtagccctatgtgctggataaggcatggggtgcgtcccgttatgcaccatccccgtcgcgcaagtgtattccccatatatgagttgaagctatttgggtagttacaagggaatcgctagaccaacacgaagccgagccttgcgtaaagaaatacgcctgttccaggg

SEQ ID NO: 644350 - DNA, 411 bp, Homo sapiens
  misc_feature (64)..(64): n is a, c, g, or t
ggctatgtcggagagcttgaaaaaaagaatatttgtcgcctacacagtcgtcgtatagcctagntgtatcgccgggatcgtgttttttatactctttttagtgcaggcctctagcgtcaaaaagtacaaaaagcgctgcgacatcatgcagcaaaatctcacctccatccggacggcgcaaatgtactcaggcgaccagaccgtggcgcgccagaaaaacacaggtttatctcgcatgtggatggcctgctcgaagaatacgcctgcatgacgcctgcacgctcggcgctatcgatgacaatgtgctcgtggtctatcagcatggcatgggttctagcgcgctggagccctttgtctcgccaaaaaacaagaccatctatcaggctatctccgaaaagcaaccagaagcca

SEQ ID NO: 644351 - DNA, 757 bp, Homo sapiens
tacacacgtcttttggtggacgacctcctcgtctatgacactcagaggggggggccgtcgcgcacgccaccctcgcgcgaccgacgagctgtcgctgcgcgggggtcttcagcgtgatcgcggcacacactctcgctcatatagtgggtgggtctctcgtcgacacacggcgcgcgacattttttgacgcattctcgtctccgtctggtgggtgagaccgccacccactcttagcgcggcacgcctccttttggtgacgctcatctctctcgggtgggactcattcttgttgctagagaggcgcgttgttgttgcgtgtgtgtgtgcacaaaacaatcatttcttttatctttcaggacagaagagtcggcccgcgagatacgcacggagagagaagttcgctctggagagaggagataggtacagaccgcgcgggcttgttagtcaccaccacccgcgagagatagaactgagggcgcggattcctcccgagattatatcgattagttagcaaagatactctctcccacagaggaactttctttctgtaagaggcgaaggcggctgccaggaggacccatccagcagtggagcgttttgtacgccaccaccccggggtcactcctctctccctgcggtctttagcagaaattactaagtgtttttctccctttttaaaaaacccccccccgcggtagtcccctcaaacaaacttttttttttttttaaaaaagagagggttttttccccactctca

SEQ ID NO: 644352 - DNA, 130 bp, Homo sapiens
gtgcatcctggatttctactccagggtaatttcacctctgctatgccattagattactcaagagaaatctaacagatcagcatctccagcccaatgagccatgtctcaactttttggaaaacttgcgtgg

SEQ ID NO: 644353 - DNA, 505 bp, Homo sapiens
  misc_feature (4)..(4): n is a, c, g, or t
ttanagatccctcaaagtcatctccgcgagctttgtccattgctgcgtgagctgcgatcctttggaggagaagaggcactctgatttttagaattttcagcttttctgctctggtttctccccatctttgtggtttaatctaccctttggtctttgagtgatagtgacgcacagatggggttttggtgttgatgtcctgtttgttagctgtccttctaacagtcaggaccctcagctgcaggtctgttggagtttgctggaggtctactccagaccatgtttgcctgggtatcaccagcagaggctgcagaacagcaaatattgcagaacagcaaatgttgctgcctgatccttcctctgaaagcttcatctcagaggggcacccggctgtatgaggtgccagtagggccctactgggagatgtctcccagttaggctacttgggggtcagggaccccacttgaggaggcagtctgtccatttgtcggatctcaaactctgtgct

SEQ ID NO: 644354 - DNA, 1337 bp, Homo sapiens
  misc_feature (811)..(811): n is a, c, g, or t
tgtcgacccgagactgtggccaaaaaacgcgcacacatctgtttgtggggcacagagaccacatcaccatgtggggcctccgccaaaggggtctcacgttggatggacacccccccccgtgtgtttccaccaacggtacttgtccaaacctggtgtgaggcaccccagggagaattccctgaaggcctttctttcaacaggggagggggaacccttcgcgttctcttttccaatgtgaaagaaatgagacccccccctcgttaaagaaggggaaatttttataaaggggcctttaccaaaaggccccccacaggattttggcacaggaacttctttggggtttgtacacccgtggggaaggggtaaaggaatggcccccccccccccaaaagtgtttctaaggggagctcttttgccgccacagaattaccacatggcgccaaggagacaactttcccggggggcccacacaaattattgtgacccggaggtctttggcttccgggaaaggaactccccgcagagattgggatgccttatatacaccacggtatcctttggggtgcttccacagccacggagttttgaaaggatcgagggccaaccccacccccacttgggggttcaccccacccaacacacggtgtcttgtcttgagaggtttgggaggcctcgctcgatggtaccgaacgcgcttcaaccacagagagcctgtaagagaaacgctaaacacagttcccacggttcccctctcggagggattctcgagcccctgggagactccccactggagagaaaaattctgaaaagnggccacgcctcttggaggaacacacgcccccgagagggagaggttggaagggccccgccttaacgccccctaccacagagtggaggcacaggcttcaaacggggagtccctctgctggcaccccctgagagttcacagagagctggcgaccaagagaccccgggcacagagagggaacaagccgccacaggcccacaggaggtaatgagaggcccctgctgaaacacatcacaaggtcaaaagctggagaggctgagagagtctcgccaccctatccccccgcctgctggaacagaatgtgcgaggagctttaaattttggtgaatgccttggagcacgcacgcaaactccacatgcacaaccactccacaaagagccacccaccccgcccggagatatagtggagatggccaaagtggtgtttgaggagaccacaatgagcacccaagattttgaggcattaagcccgccagaagcagggtaccctttggggagcaggaggcccaataaaaagttcagagttcca

SEQ ID NO: 644355 - DNA, 422 bp, Homo sapiens
tccatcatctgctctattttattttacaaagtggcacataccatcagagtaggcaccagtctgacactgcactcattatgagagacttattcagaaaaaaagaaaaagaaaaaaaagacggggcatggtggctcatgcctgtagcactcccaaatcccagcactttggaggccaaggcgggtggatcacctgaggtcgggagttcgagaccagcctgaccaacatggagaaaccctgtcactgctaaaaatacaaaattaactgggcgtggtggtgcatgcctgtaatcccagctacttagtaggctgaggcaggagaatcgcttgaacccaggaggcagaggttgcggtgagctgagatcgcgccattgcgctccagcctgggcaacaagagtgaaactccatctcaaaaaaaagcaaatc

SEQ ID NO: 644356 - DNA, 221 bp, Homo sapiens
tctacagatcttatccccggctctgggtagctgcgtttatttgcagagccaccaaactcactaccccatatcataatcttccaaatcagtctgagcataactagcttccttacatctttactaagaaacggcaaggctacttacttagcttttttgttatcagcggaggaatggtttagagtggcaaatacatgaaaaaaaaaccaaagtagatactagtt

SEQ ID NO: 644357 - DNA, 87 bp, Homo sapiens
cccgaggacacggctgtgtattactgtgcaagatcgagttgtggaccgatcatccgaaacaactggttcgactcctggggccaagga

SEQ ID NO: 644358 - DNA, 820 bp, Homo sapiens
ggcgcccctccctgcagggatcaggctctccccctcctgtcttctccgcgctgtgcctcgtcatggcggccctcaggcaagtccatccctcataactgctatgagatcggcacacttggcacccttcctgccgggtctccttcctgcaagatcaccgggggcgccctggaaggagtccctgaagatctatgctcctctgtacttgattcgcacgcaattctccggaaacggaaaattagagctattatttacacaaactactccctgagatcctacaatccggcttcatttctaacttgctaatggggccttgtatatggctttcttttgcattcttcaaggaagatacttggaaaattctactcatggactcctggcctttggtgccgtctgccagacatcttatgtggccattctcattgacaagaacaaagcaggagagggctgctcacaatttatatggccaacttgatggagtctcactgtcttccccaggctggagtgatttcagcttcctgaagctctgactcccaggttcacagggatgcttcctgcctgagtctccctgagtaagctggggactaacagggagtgcaccactaaaaaccttgtaaattttgatctacagtcagagacggctttccacaatgttggccggtaagtcttggaatcctgacctcaagtgaactggctgtttcgggctccccaaatggctgcgactcaatggtggtgaccacatgctgtccaacatagggtttgaggctatcataatcagacttatacccttcatgaggactggccctgggggctcacttcgcag

SEQ ID NO: 644359 - DNA, 474 bp, Homo sapiens
cagcgccaggaaacaagcatatgaacagtcaggactctgttacacctatggatcggagcaacagaccgtgactacaatgtgtaccgatggatgaagcactatccacgcacatctaatatccgatactacatgattcactacagctatccgataccagtatacaaaatgtgtcaccctcaaagaatacaaccaaaatcaagatagcaaacaagaacctatataacttttttttttttacaggaaaatactttggaagtatgctgtgtaactgcccattctttataaagaaaatctacggcaagcaaagttatcaacctccaaaaaaatcacacgtagcattactaagcatatccccaaaaaagtgtacaatatgcacactgggcaaaatacaaaataaaaaaaatggtaagcaacaggtgagcttcatatttataagattgtgaaaagaagtcccatttttagcacggtggtata

SEQ ID NO: 644360 - DNA, 258 bp, Homo sapiens
  misc_feature (121)..(121): n is a, c, g, or t
  misc_feature (128)..(128): n is a, c, g, or t
  misc_feature (131)..(131): n is a, c, g, or t
  misc_feature (133)..(133): n is a, c, g, or t
  misc_feature (208)..(208): n is a, c, g, or t
  misc_feature (212)..(212): n is a, c, g, or t
  misc_feature (223)..(223): n is a, c, g, or t
ctgcgctgcgacgtgctctggaaggagaggacggggcacaaaccctgaccatgaccccccacaggcatgctgcaccgctgctgctgctgctagctctgctgctcgctgccagcccaggagngcctttnggntngcccaggctgcgggcaaggggtgcaggcgggttgtcagggggcgtgcgtggaggaggaggatggggggtcgccancgangctcgcggaantgagggctgtctcaggagggaggggcaggagtcgg

SEQ ID NO: 644361 - DNA, 344 bp, Homo sapiens
ctgcatgaaacacatgaaaacatagagcagcagagacaatggggactatatggcgggtggagggtggagggggagcagcagacaaaataactatctgagtactagcctgggtgatgaaatactttatacaacaaacccccgtgacacaagtttacccaaagaacaaaccggcacatgtgcccttgaacctaaaagttagtatacttgagagagagtctcgcactgtcaaccaggctggagtgcaatggtgacaatcttggctcgctagcaaaactaccaactcctgggttcctgcgactcttctgcctcagcctcccgagtcgctggaataacaggagacacaa

SEQ ID NO: 644362 - DNA, 495 bp, Homo sapiens
  misc_feature (29)..(30): n is a, c, g, or t
  misc_feature (55)..(55): n is a, c, g, or t
  misc_feature (65)..(65): n is a, c, g, or t
  misc_feature (67)..(67): n is a, c, g, or t
  misc_feature (390)..(390): n is a, c, g, or t
acggcttcaacggaacttttctagttctnnaagatgcattattagattgtttatntgaagttttncntctttttttgatgtaggcactataaacttccctcttagtactgcttttgctgtatcacataggattaggtgtgttacatttccattatcatttatttcaataaattttttaaattttcttcataatttcttcattggcccactggcactgatattttacccttactgggattctcttgtcatttccttaacatgattattaagtgaaagttcttaaggacaatctcattcactctagggttggtgtgagtaaagtaacatggcagctgatcttctggctaaaaatagtaaccagatacaatattgattgcttctctactagtntgtcttttattcacataaattctgcattatatgtatttactttaaaagacattaaacttgtgtatttccatgtgttgtatagtttccaaagttccgttgaagccg

SEQ ID NO: 644363 - DNA, 356 bp, Homo sapiens
ggctccagagtgcgggattacagggtgagcaggtggcgcagactatacgtgggtaattgaggtatttgttctaggagacacgggtctggccatgttgcccaggacggactggaactccgggggctcaagcaatctgcctgcctcggtctcccaaaatgctgagatctataggcatgagccaccatgggccagccaagaacctctttctggagagcttcttttcttgggttgtttcagacagggtctcgctctgtagtccaggctgtattgcagtggtgcgagcacagctcgaactcctgggctcaagcaatcttctcatctcattctcctgtgtagctgggaccataggtgtgtgc

SEQ ID NO: 644364 - DNA, 861 bp, Homo sapiens
  misc_feature (32)..(32): n is a, c, g, or t
  misc_feature (94)..(95): n is a, c, g, or t
  misc_feature (113)..(114): n is a, c, g, or t
  misc_feature (117)..(117): n is a, c, g, or t
  misc_feature (123)..(123): n is a, c, g, or t
  misc_feature (152)..(152): n is a, c, g, or t
  misc_feature (237)..(237): n is a, c, g, or t
  misc_feature (243)..(245): n is a, c, g, or t
  misc_feature (257)..(257): n is a, c, g, or t
  misc_feature (321)..(321): n is a, c, g, or t
  misc_feature (325)..(325): n is a, c, g, or t
  misc_feature (328)..(329): n is a, c, g, or t
  misc_feature (333)..(333): n is a, c, g, or t
  misc_feature (350)..(350): n is a, c, g, or t
  misc_feature (369)..(369): n is a, c, g, or t
  misc_feature (422)..(422): n is a, c, g, or t
  misc_feature (468)..(468): n is a, c, g, or t
  misc_feature (549)..(549): n is a, c, g, or t
  misc_feature (565)..(565): n is a, c, g, or t
  misc_feature (567)..(567): n is a, c, g, or t
  misc_feature (576)..(577): n is a, c, g, or t
  misc_feature (592)..(592): n is a, c, g, or t
  misc_feature (624)..(624): n is a, c, g, or t
  misc_feature (662)..(662): n is a, c, g, or t
  misc_feature (751)..(751): n is a, c, g, or t
  misc_feature (759)..(759): n is a, c, g, or t
  misc_feature (761)..(761): n is a, c, g, or t
  misc_feature (784)..(784): n is a, c, g, or t
  misc_feature (787)..(787): n is a, c, g, or t
  misc_feature (801)..(801): n is a, c, g, or t
  misc_feature (818)..(818): n is a, c, g, or t
atgtagtgagagggtcgcgaggtgtgagagtnaatggaggtagcagaaggatgatgggggggtggggagagggagaggtggtggtgtggggggnngaggggtagcttgagagnntgnagtggntgtgggggtggaggtgaagttgggggggntggtggtggtggtggtggtgagggtggtgtggagggtggtggggatgtgtgtggtgggggggggaggaggtaacgatgaagggtnaggttnnngggagaaagggntgagggtagtaaggtgtttgggggggggggtgtttttggggagttgtgtggtggaggtggtggntgantanntggntgggatagatgaggggntgggagggttggaggtganggtggagttgggagtggaagagttgatggtggggatggggttgttggtggtgntggtgatggaggagatgagagtgggttagaaggaggagtgagggcngtgaggtgtggaggaaagaaggggtgtggtgggaagagtgaatggtgggggggaggattgggatgatggggcaggggtgcnagaggggagtggaggngnaggaagggnntgagggttgggtggntgtgtagtggtgttgtgggtgggggtggactncgtgttggagggggtggcggtaggggtggagggagagnggggtggggggatggaggtgtgggtgggtttggtggtggagaaggggatggtgggtgtgagggtgtgggtgggggtgttggagagcgangttagggnanaggtggtgggtgggtgtgggatngtnttctcatgcatganacctctaggcatcgggntgggtgcagctctggcagagtcggcaggacctctgcaccagct

SEQ ID NO: 644365 - DNA, 917 bp, Homo sapiens
ggtggactgttccctgtcatcagtatgcagcgattgctctttccgccgttgagggccttgaatggggaggcagtatctgccgctcctggctcctagggcagcgcctagagcacagtgtgattgcatcagtgcgccctttgaggccagggcaatacagcaccgatctctgaagtagcctttgcaaggtctggaaggggtacagtgtcccttcacctcgaaggctgctgagcgggtggtgggccgatgggtcgcctggtctgcagtggaacagtggctggagcagttattcttggaggagtaactaggttgacgagagtctgtgcatctcgatggtagatgggatttaataaaggagatgaagccagctacaagccaggaggaatgggaagcagaattcggcagatataccagcaagtttccaagaagttcacaatcttgaactcatgatctgacactgcacagaattcacgttcatcgtggtacatggagtactcaacaccgaatgtggggtccgccttgtaggccttgtgtacatcctgctgctgactactttgggagaaatgggctggcttcggccgtggcatgaacaggacgtgtgcttgcctctgtggctcgtctagttccaggggtctgttggggacggtatatggtgaagaagtgggactaacggaagaatagaagtgccatgagcgttggtctggagtcgataagaagggagcttgatagggcacgtggggataaggctggcaccttagtggtggcaagtggggacaatcaaggtaaacactgggaaagtgcgagaacacaaggcgtaaagaaggaggagtagtttgcagaggagtttggggtgtaagggacccatagagggaatgtgtggggacggagatgttatatagcgttagacgagggaagtcaga

SEQ ID NO: 644366 - DNA, 1256 bp, Homo sapiens
  misc_feature (385)..(385): n is a, c, g, or t
  misc_feature (515)..(515): n is a, c, g, or t
  misc_feature (557)..(557): n is a, c, g, or t
  misc_feature (1031)..(1031): n is a, c, g, or t
  misc_feature (1256)..(1256): n is a, c, g, or t
atagattatcttactaagtcatttattcattcttcagtgtctagatgacggactaatagatcgctctactggtcatatactccttacaatacataagaaagtaataatctaatagatctgcttgttatctaatctagtagtggtacctcatcagtagtcccgtcaagcggccactatcccgtcgttagtccaatctacttgggggccctagtgtgcgcgatcagcgtagatccaattgtcctgtacttgtcgagaagcgagaaggatatgtgccatctaaagccacatcatgttacacacacatgacaactttctgccagggcatgcaccactgtgcgcgcgtacacaggctcacgcgatacacactacacgacctacagatgcnctcacacgtgcgcagtgtgtgctcactcatgatgcgtatcactccgaatgcgcgtagcacgcgaactgtactattcttgtcttatatgcaagcttgggcaacaagtgtgcaccgtgtctttcgtcgaaanatgcacatccatatactacctcatatttatttagggacgacntcccaaattcgcaacgccactactcgagactcggcgatcccaagtctccttacaattttgagtattaaggtagggatacgaaatacgctcgtgtcgtgaccctcattcttcgctgttgaaacacgaaagcactcaaaagtccaaatctatgaccccccgcatgtttaaagcactccgctttgcacaacagcaaacactcgttgtgttgccccgtgctgctcgaaatacacacgccattacattccttagaagcaccccataccatataccatgaagatgttgagccccacctctattaagggctttgggaaattttgctaatatagaaaccatcactcttttgttatgtggtaccccacagatttggggcacaacgcgtgtctgcatagatgcacgagccaccaagactataagtagagtgcgctcatgccggtggtataaacctccaatggaatagaaatgcggtctccgcanatacgatgcggggtacagagtcctcaaccaccttccttttcgtaaatataccctgaagaattttcaaacccgcgttgggtgtaatgtagatacaatctccaatgttcatatactctcacataaagagggcgcgattttggctcctcttggtcatgctgagccattggataagcgggatacactctgtgtccgagcaaaatgtttctcccaccttgatatactatn

SEQ ID NO: 644367 - DNA, 186 bp, Homo sapiens
  misc_feature (175)..(175): n is a, c, g, or t
tcctgccacgactgactctggttctaatgctggttcagtctcttcaaactgcattttctgccttttaagtatgctttgtaattttctgttgataggtagacatgatacactgggtaaaaggaatggcagtaaacagggctttcatcctgttttcaggtgtgggggataacatcangggatcctcta

SEQ ID NO: 644368 - DNA, 136 bp, Homo sapiens
tgcagtctgttttacactaacagctataaccatcactgcccgtcgtttaacactaacagctataaccatcactgcccttctttgccaccaacagctataaccatccattgcctgccttttaccacaaacagctata

SEQ ID NO: 644369 - DNA, 164 bp, Homo sapiens
ccggtcgtatgtataagagtccaagctctaatcatgtcctggtctttgctgtgaccagcccctatctaggagcccatcaagagttgccacatcaggagttcccattgtggctcagcagtaacaaccccaactagtatccatgaggatgcaggttcgatccctgg

SEQ ID NO: 644370 - DNA, 1274 bp, Homo sapiens
cacttgggccaaagtaggctttctgtacatggagtttgctcaatgtatgaaacgataggatgacttcgggctgcgtatagagaatcttggcctgactcctgttgctctgatccactgtacattgccctacactgtgcagattagagcatggatgtcgtaaaccagggaacggcaataacctgctgtatgacatgacttgaaccagtggcgacggaccggtgtagagatgtttgggacagtattcttcgactatctagtaggtaatgaccttgaaagcgagacctcaatccgttagggacattgattgagattatggcttcccgttaggacctgctgccttttccacttgacatagtggcttatacactatagacactctgactatggcgtaggacgtgctactgttgtgcccacttcggtactaacggactaattgacttgcaactataataccttttcttgaacccggtagagctatgctcctggacgcggtggttcatactgcggtgataaccacgtgcttacaggagtattaagcaagcccatggggactaatctcagggtgtcacgtgttcgccagagtgacccatctgcaggttccgggttttcacagtgcaactgaacttgtgggatctcgcagatccgggcacctagttatgacccctttccctgggaagccttccaagaagttgaattcaccttacgggttgctttgcgaaagcgtcgggttttaccagagaattacccatagagatgcgactgggcagctaattatgaacagggggaacagattcacctgatgtacttttttccgagaacctagagggccactcgggtgcgcctttccaaaatgcaccgcttgatggcaatgtggtccccgtcaaatgttttcaagcgcccattgcctttgatattcaggaggccactttatcgcgtagatatggcccttacatggacattgaggacagggtatacggccacagcaggctatacgcctagaaccaggccgctaataaggagcaatacctgtgtttataccacttgttagaatacccgtataagcgcagtttagatatagtgcgtggtaagacatatatatgggtctcattgtacagaggatagtcgcacagctgcgagaaggagtcggctatatcagtatgtatcgtctctattatgaggtgtattcacctgcggccgatgacctattaatagaacagcaagcagttttgagagagtggcagttaggacatggtgctatcagagttcctacgttt

SEQ ID NO: 644371 - DNA, 631 bp, Homo sapiens
ttcaaatgcagagattgcatttggggccaacacttaagcccacttgtagttgtagtatcaagcggggtatctacttgcaaatatgtggctgaaactacaaaggaacttgttttttgggagcggagggataacttgcgtcctttcagaaaccctcctatcaacatcatagatggtttctaacccaccaggtacgtaccttgaatgcagctccaaatctacactagcaaaccttatctgacgaagacttagtgagccagcacgaaaagtcctagctgcaagaagcttcaaatatacttcttcagggagactctccccagtttcataatgctttgcaatgctcatcaaagtatccctatggtaacaccagttttccatgaactgagaaggtaattcaacggcatcccactcaatccccctaataccggaaactagaccctcatcctgtttggtcagcatatgctgaagtgcatgaccaaattcatggaagaccgtctcaacctcacggaatgtcatgaggcttggtttgttcccaactggtggtgactgattgcacaccatgcgggcaataggcaaccttgcagaggcaccatctcgtgacgtcgacgcggccgcgaatttagtagtagtaggc

SEQ ID NO: 644372 - DNA, 1776 bp, Homo sapiens
  misc_feature (1164)..(1164): n is a, c, g, or t
  misc_feature (1411)..(1411): n is a, c, g, or t
gagttgtcagtgttgcttgttgtcgtgtgactgtgtgtgtcggcgtctatcatcgtgggtgtcacccctcgcggtgtgtgggccctttgtagtgcttgtggagcgccccgcacggtgtgtgaccccaggagcacgcgggtgttgttatccctcgccccgctccctgatttttttttctggcggttctctaagggatcatgcgcagcgccgcctgtgggcgtcggccgaattcgcgggcaccccgaggggggcaccacactcgggcccgggtttggccccaaagggcccacctggcgcgcccctatattcctcgaaaatgcgccgcgccctcatatatggggggcgacccacaacagagaaagaaaaaggtggggtgtgacagccaaccaacgtgtgttctagcaacgagaaaaagaattttcggtatatattaaaaagttgggtgtgaaaacccccccccccgtcgcttaaaatgggctcccacaaaatattatgaggcacaatatattttgtggggagaaaaaagcacccgccctttgctgtgtcacccccaacggggccgcccctcacggggggacccccaacagagtgtggccacattctttggagatgggttcttctacaacaaaggtgttcctccatggtggtgtttttaggaacagaggtggaggattccttcttgccccctggaaattgtcttgccccaacaggagaaaattggtaagtgggaaaaggatttcgccgccacattgtttaagggaaaagatagttgctccccacagagccgctttggagagtttatcccgcttggtagaagagaagaattgggtctcctccacagggggggttattaataaaaaagcatcgtcgccgctccttggtagccctaataagcacttgtctccacactggggcgccaattggggagatctttttttaatccccccccgccggggagcccacacgcacaaaatgtggtggggtgtcccacacatgggggtctcaccaccagagaaaaatggggcccaccagagcccacacatggaggatgtgaggagggcttctcacacgcgtgtggagatgggtctcacagagaagagctcatcccccgcagcatgggtgttatcacaccttggggcttcttatcggcttctctcgtttttntctcgtcttgttttttgggtgtgtgtataacgtataaaaaatatactgcccccaccccatcttcatcgagatatctcgcgagaagacccctctcttctatatgggctctacgcgcacccccacacacaacggggtttcccccccccacattttctcgcgagaagagaaagagatggagatgtgagagaattcacatcgagcccccccgagagaaggtgccacagagccacacatgagactctgaganaagaaagttgggtccacatataaatgtgagttccacagcacacagccccttggagaaaagacacacatatgaaaaaggggcttgtccccactctaattgtaatcctcctcccacatcgaatgttcttcgttatgagaaaagtataaaaatgctcgaaagaaagccccacagtttgaaattgggaaagctcactggaggcttcactggtggaaaggcacgtaagtttctgggaaaagcccctcggggaacgaagacaccggtggctataaattggacgagctgatggatatgagaccccccctcccagaatctgttttaagttcaagaccttccaatagtggcccaattaaaagtgctaatttgtg

SEQ ID NO: 644373 - DNA, 279 bp, Homo sapiens
tccgggacccagaaggaaagcagacagcctgccaaacagagccggagagcacatctgtctcactttccctattaaactgacaacaaggattactagtgaaaacatccactaccctacagcgctaaggagccaatacgagctcgagatgggactgtgtgattgtaaactggcgccatgtttccgacacttggtattctaagagtttctcttgaagaagttatgagatattccttcaaagaatcatgtgtaaagaagaatattacctgccatagtaaaata

SEQ ID NO: 644374 - DNA, 152 bp, Homo sapiens
ggacaacagagtgagactttgtctcaaaacaaaacaaaaaaagtattgaagcggcacttatgtcgcaacaagggtgtgtttatttatctatagaggcttgtaattgataaggaaaaaaggggaaaataggcaccacttccaaacataagcag

SEQ ID NO: 644375 - DNA, 386 bp, Homo sapiens
ccccctttactttagggggcggggaaagggtttttaatttttttttaatagaaaaatggggccccccggtttggaataaggaaactttggtttaggcccccaaggttaatcccaattccaaattttccctttaaggttccttttcctgggtccccattttttaaggtggaaaggctccccggttaacttgatggggttggttaacccaatgaaagccttatggtccctctggggaaagggggtttaggggtgcctggggggttaaatattttgggcctggtttggttttggttggtttccctagaaaaaggggcaaaactttttatttttttcccttaaccttttttaaaggggaatttggggagggcttttccggccttccccca

SEQ ID NO: 644376 - DNA, 342 bp, Homo sapiens
gtactctgaggatccgatcacgtgcattgtgctgggcccacccaagtctgaatccatggagggggagggtgtctgagagtactcccaccacaaaaccaaaacaacaggctcagatttcttttttgattggcactcctgttgtcacccatgatctggtgagatcaggattgcggtgccaactgcccagagagaggtcaggaggtagactgcctcctacagttggatgggacaggatacctgggagtcctggctgccaattcagcccccaccctgatggagtgtgatggaggggactgagactcaggctgcttctggataagatgccccacaatggcacgggat

SEQ ID NO: 644377 - DNA, 395 bp, Homo sapiens
atcaccaccctcatttcctctccctatagctccaagatgcatagctgagctaccaaacttcactgatactcaactgctctgcaggctcccgtctctctgtcattgtccttggtccccctccagttggaatcccttccatcaacctgttgaaactctacctgcaccccgtcctctctggagaatggtctcaatagccaccaccactctccacctcaggctcccctgacatccaagctgtctatgacaatcagcaccctctgcctggcagatcctatgtcaacccagctcctgtccactccaccagactgcaggtcctcaggacagggactgtgtcttactcccacccccaaagcccaggcagggcctgtgggctttgggggtgggctgaagagcgg

SEQ ID NO: 644378 - DNA, 143 bp, Homo sapiens
gcgtaataagctggttggctgggtatgtagtgaatgtgtgaaagtatgctgggaagtgaggaatggcaatgttagtgaaaatggttacgagtcgtgggcaagaaagcgagtcgtgggctagaaaaggagtcgtgggcaaaaaa

SEQ ID NO: 644379 - DNA, 286 bp, Homo sapiens
tcagtaccggcaagccataggtatggtggtaggcacgtaccaggtggtcgctcgccgccttgctcgccgagtaagggctgttaggctcgtactgatgagtttcggtgaacgccgggtcttccttggccagggagccatagacttcatcagtcgacacatgcaggaagcggaaagactgctgtgcatcagcgtccagtcctttccagtaggcgcgcaccgcctccagcaggcggaaggtaccgacgacgttagtctcgataaaatcttccgggccatgaatggagcg

SEQ ID NO: 644380 - DNA, 485 bp, Homo sapiens
ctactccagaggctgaggtgggaggatggctcgagcccaggagttcgaggttagcctgggcagcatagggagacctctcttctaaacaaataaaataaaaatttacctaccaaggactcttgcattcatcactgtagttgagatctctccccaggcttcacgaattagtcaaaactctacctgataacactattttgatgtctaaattgatctcaaagtgaatatgttcaaaatggaacacagaaaaatctatttgaatttatgaaagagaccagtggtccatataaataggcagctgatcttgacaaagaagaaaaggcaattcagtggagaaagtattattttttcaacaaatagtggtgaaacactgggacatccagatgcagaaatataaatctagacacagatttacacctttcagaaaaattagcatgaattgaatgatagacctaaaaatacaacacaatactataaaacttctagga

SEQ ID NO: 644381 - DNA, 238 bp, Homo sapiens
tgggtctcgtgtatccggggtactctgttgcaacttgtcactacctctctgggagcctcgccatcaccaggtccaaacgacagactcatccaaaaatgcaacacactcagaggccaaaccaataggcacacagatatcataactctcctgatgttctctggccgtccctcgtgcttccttccattctaaccacgccaagttctttcctgccttgccatctttgtctctcacaacgcta

SEQ ID NO: 644382 - DNA, 432 bp, Homo sapiens
  misc_feature (48)..(48): n is a, c, g, or t
  misc_feature (56)..(56): n is a, c, g, or t
  misc_feature (259)..(259): n is a, c, g, or t
  misc_feature (368)..(368): n is a, c, g, or t
  misc_feature (392)..(392): n is a, c, g, or t
gctcgtgactctaaggatcccagtcgaggagactctcttgtgcaggtngttcttangcccttcagaaaatgacaacgtggtcagttttcctcttcccctggtgactaagctgttcctttagagcccaaagatttttttccagacccatgagcaaatcttcacaccccatcccccggcgcgatggcttgcatacctgtcattcatttctgcctgtgctaacaagtttctgcgcgctgccctccagctgacaaactggatngccacaaacagccgggagcaaagtgctttttaatctggagacttccgggggtacaggagcctgccaggtgcctctgagcacagtgtccaagttgaactgctgggaaggncacactgttccatgcggggctggntcctctcagcacccccgagagtctccgtcgaactgggtac

SEQ ID NO: 644383 - DNA, 748 bp, Homo sapiens
  misc_feature (402)..(402): n is a, c, g, or t
gtgcaagtttgcaacatgttgcaggttcttgagtataagccaggtggaaatgtgggctcatatgataacttgttttttcggggactaccgaactgtgtttcaaagcacctggggattttttttttttttttgactgtaaccgaaagtcaaagatacttaagactcagttacttttctgtttttagaattggtcttgtcagcaagtagagtttactctggagatgtgagccttacattttctaatctctttggcgttcatttcttttgtttgaggctgtgattcaaagtaggaaacatgctggaaccaactctttttcagaacctggcccgcatctcaggtgctgcttgcttaattgcgtaataaaggacctctgtggtagaagcctggaaactgctgtggcntctcttatgccaatgtctgcttgttccctttccctcaaagaaataatacatctcttgctgacactcagtgtaatggaggttcataattcaaaaaccaattatttggggcaactattggatgaattttctttggcatccttttgttggctgattttcctgttagctgtgtgtactgttttctaaagaaacatggtaagtggttgtctgttggaaattgaattgtaattgaatagattctgagatttgacgactgaaaccaggcaacaccatgtactccccatttttgttgtctgttaaattctaaagaggtttttaagtatctttgactttcggttacagtaaaaaa

SEQ ID NO: 644384 - DNA, 1570 bp, Homo sapiens
gcaaatggcggatgacgccggtgcagcgtggggggcccgggggccctggtggccctgggatggggaaccgcggctgcgcttccgcggcagcgtttcggcacgtggcactccggggcccggggctcgcggccgtggacgggggccggggccgacgggacagcggagcactcgccggcccgcccacgccgacggcactacgcgcgtggctgcccgctcccgcccgctcgcgcccgcttgcgcccccggcccctgccacgccctcccgctcgcctgagacgcgacgcactcctcctctcctctcctccccctgcactactccccgcgccctcccacgcactccatccgcctccccctctctcccctgccccgcgccctcgtccctccacgcgccactgagcgaccacacacgcaaccccactcactgcccaccgcccaccacagccacaccacccacagaactgcacgacacccaacccaccaacccagacgcctccacccggcccacctacacagactccgccctcacctcccccccacccaacacacacccgcccccaacgccctccccacctccgcccctgctcccacccatgcatcaccacacgcccgctccaaacacccccacccacctaccaccccacccacacctcccctcacctccacccaaccaccacatcacaccccagcacacccacactacccccacaccccatcccctcgcccccacacacaacatctccagccaacaaagaacacacacacaccatcaggacgcagcacaacgaaaacaagcataaaacacagaaccaagcctaccaccacactcgaccgcaccacggcgcacacggccacgaacaatcaccctagcacacccacaccacggcggccaccctcccgcccctcccggacacccactccaccacccccccacacacacgcaccccccccgcgccacagacctcaccctccccttactcacacaccacacctgccttcacccacatccaccaccccacaccactcaccaccctcgcaacagccaccagccacaccccccccaccccatcgtccaaccactattacgccaccacacctaccccaacacaccaaaaccaacaccactccacacccaccgacaccaccacccgctcccccaccaccccccaaacccacacccacccacaaacacccacttacaccaacatctccaaacaacaccaaaccaaaccaactccaccgtctccaccatcacgccacaatcccccacgacccacaacgacccacgcctccaaccacacacacaaacccaccccccccaccccccgcacaacaacacccaacaccacacactaccacccccactaacccacacactactcacttacaatacacccacccgaaaacacaacacaaacatcagacaaaccaattcaccacccacaccacaatacaccacctcaccctcatcactcacaacactacacaatacacaaacaatccaccacaccaacccaacccccccatacccacacgaccccaccaccaccgcatcacaacctctacctacata

SEQ ID NO: 644385 - DNA, 327 bp, Homo sapiens
taattcataatagtataaagttttgttatatcagtgatttgttggctgaagcctaggtgttggcagtatggtcacttctgaggtcagtcctgagtttgtcagagttaggcagaaaactcagacagcagcctcaaggaggctggaggtttatttttcaaacaagaagaaagatttcagaattttgcaggaggaataaaagaagtctaggtactgttaaggccttggaagaaagtacagagaaaaatacagtgatgcttttcattgttgtttttattgcttttttgttgttactaactgataaatcatagtttgtcgagtagttaattg

SEQ ID NO: 644386 - DNA, 209 bp, Homo sapiens
aatgcatacagcactgagacgtatatcatctgtaggcaattcattttcttctaacagtagtaatattaatgcatattcatgattagaagaaggcttcgcttggaagcgaaaagtcctaatagtagaagaaccctccataaacctggagtgactatagtggatgccccccaccctaacagacatttgaagaacccgtatgcatctcggaa

SEQ ID NO: 644387 - DNA, 673 bp, Homo sapiens
  misc_feature (327)..(327): n is a, c, g, or t
ggcagtgtcaggattaaacccgtggatgtcgtcagatttcgttgttttacatctaaatcttcagctattgtctgcacatacttaagactcagttacttttctgtttttagaattggtcttgtcagcaagtagagtttactctggagatgtgagccttacattttctaatctctttggcgttcatttcttttgtttgaggctgtgattcaaagtaggaaacatgctggaaccaactctttttcagaacctggcccgcatctcaggtgctgcttgcttaattgcgtaataaaggacctctgtggtagaagcctggaaactgctgtggcntctcttatgccaatgtctgcttgttccctttccctcaaagaaataatacatctcttgctgacactcagtgtaatggaggttcataattcaaaaaccaattatttggggcaactattggatgaattttctttggcatccttttgttggctgattttcctgttagctgtgtgtactgttttctaaagaaacatggtaagtggttgtctgttggaaattgaattgtaattgaatagattctgagatttgacgactgaaaccaggcaacaccatgtactccccatttttgttgtctgttaaattctaaagaggtttttaagtatctttgactttcggttacagtaaaaaa

SEQ ID NO: 644388 - DNA, 231 bp, Homo sapiens
cacgggagagcgcacaaccgtccgatcccggcctcgcttccggtgcgtgaccggccgacacctgtacaggaccagcactcccaggggccgagcgcgtgccttccccgtgcggcccgtgcgcagccgcgctctgcccctccgtccccagggtgcaggcgcgcaccgcccaacccccacctcccggtgtatgcagtggtgatgcctaaaggaatgtcacgcagcaaaaaaaaa

SEQ ID NO: 644389 - DNA, 201 bp, Homo sapiens
tggtattatctcctccacttgcgacctggggcctaggcgcccctccgcgtgtataaccagttagcctacgacggcaaggattacatcgccctgaacgaggacctgatctcctggaccgcggcggacaccgcggctcagatcacccagcgcaaggtgggaggcggcccgtgatggcgaagcaggacatgagcctacgctgga

SEQ ID NO: 644390 - DNA, 511 bp, Homo sapiens
  misc_feature (150)..(150): n is a, c, g, or t
accgcatatcgtatgatgtatatatggagtgctcaatcatagtgagaattaaagagaagtcagtgtatggcattttaataagaacaaatagtcgtctaaggggatggtggcgcatatatgttccttgccatatgctttctacttcttgtncttattatgaaattatgaatttgaagcctctgaaatggtgatcagtcttcaacatctttcaaaaacaaaattactattgcctccatattgccttttttagataactttaaagttaggattttaaaatatttgtaactggctaaattttaaagtcgtgacaaataattacttaggttcagaaatatacacacacttactctttagccagtttctttcaaggtttactgtcccatcagatatctagccattttcctttgcaaattacataccttcttaagagtgtatttttaagattattacttacgctatatgatgatatagttttgcaaaattatttatagcttcatatgatgttttgtaa

SEQ ID NO: 644391 - DNA, 187 bp, Homo sapiens
cctgccacacgccagcagatattgtagtttagtagagatggggttttgccatgttggccagggtggtcttgagctcctgagctcaagtgatccacctgccttggcctcccaaagtgctgggattacagttgtgagccaccgcgctctgccatttagttttagagacagcgtcttgcttgtgtctgcc

SEQ ID NO: 644392 - DNA, 850 bp, Homo sapiens
  misc_feature (291)..(291): n is a, c, g, or t
tcttgataaatcacaacaacacctttttaataatttttcagaaagaaaaatttaaaaaaatgctggcttgaccccaaccaaccagggaatattagcaacttcctccttcccccgaggttttcaacttacacatcaactgctcccgtctgctacgaaataaccccactgcgtcacacgaaagcagttgtgaaccacactattgtacagcgtgcacacaattataattctcccctctggtgccgtaattccttcctccgcctctccccctctcttgaacgcagcggtagtctntctaacacttcctccccgagcgagagtctcactcttgtctcccgcagaatactactcaacaggaggttttcaacatcttctatacttgcaggtacacacattctcgctgcaataaatagttctgactagtgataaaatttcttgttgtagttgtcacccgcgcacccgcaggggtctcaccactcctcgctgattttccccccccaccctcgtggaatgggatcacgttgaggtgggtgcggaaatatcccccgcggtttcgcgagtggagatatacaccacacgcgtccctctctgctacacaagcacggtgtgtaacccccctcttgttttcataattagaaccaccacgattatgtgtctagggcgtgcgtaggttggggaccccgaaggtccaccccaccctgtcgatggctcgggtgcaaggatcatgcgtttgacacccctgcaggctgggtaggcattcccacggggatcgcgagtaatgcctcacgcgtctacatgctcgccctccaggatgcattacagaggaagaattgttttcgccccattcaaaaca

SEQ ID NO: 644393 - DNA, 298 bp, Homo sapiens
atgactcaccgtaccttatgtggtgcacattttctgtcagtgcatagtttcgcagtaggttgataccatgcagaaagactaccctgggcttcctgtctatccttctgggccactcacatgggaggcgccatcgccatcctcacggccgcaaagaggccgggccattatcgccggcatggtactcattatcgcctctggttctatgcaaatctctaaatctgcaacacactttcaaggtccattctagagaaagttgctcaaccattgtgctagccaaaacttgtcccttcgggcccca

SEQ ID NO: 644394 - DNA, 1050 bp, Homo sapiens
agcaaatatgtctgcatcaaaagcagttacgtttgcatagcagtaaataatcaggcagctgtaaacccccattatttctaggcactatgcagaatcgaaccacatccctgcagaatccagaaattctccgctgccacctagtcacaccccagtcctaaagtaaggtcggactaaataagctatcgggcccataccccgaaaaatgttggcttatacaccttcccgtactaagttaatcccctggacccaacccgtcatctactctaccatctttgcaggcacactcatcacagcgctaagctcgcactgactaggagacctgagtaggcctagaactaaacctgctagctctagatccagatactaaccacaaaacataaaccctcgttccaacagaagctgccatcacggtatatcctcacgcaagcaagcgcaatccataatccttctaatagctatcctcttccaccaataatactctccgagacaatgaaccataagcaatactaccaatcaactactcatcctcaatcatcataacggctatagcaaataaaactaggaatagccccataccactcctgagtcacagaggtcaccaaaggaaaccactctgaacatccggacctgaattatacatcacgatgacaccaacttagccacaatactcgacacatataccaaatactctccctcactacaccgttcgcccttatcactcagatcgcgccaagaccaatccatcacagcaggacaaaagaacgagaaaataaacgcaaaacaacgacagcgaaacaactaagacaaccgcgcgcagaatcgaaccaacataggatgggaaaaagacagcagacccgggacacactagaaagaacagagacaacaaaaagcaggaaaatacagccaagaagaccgagtgcaacagcaacaatcaacgaccaacacagaacaaagaataggccacgacaacgaaacgggcaaaagcgatagcagcacccgcagcaggaaacacacaacgacagagccacgcggcagtcgcactgcacaccc

SEQ ID NO: 644395 - DNA, 662 bp, Homo sapiens
  misc_feature (9)..(9): n is a, c, g, or t
  misc_feature (13)..(14): n is a, c, g, or t
  misc_feature (49)..(49): n is a, c, g, or t
agagctgtnagtnntctcttacaaactgaaataatcatctcagctatanatttatttgaggacactacatttataggatgttcaggatctcattggaaaggaaaagcaacctctggggggttttgttaatttttgtttgggaataaaaatttcatttggggttggccttttggggaagagggggtctctggcctctcggaaacttaaaggcccccaatccaaaaaaaaatttacctttcttttttacacccccctccaagaaaaaatttggtgggggcccccccctggggtgttttctttggggagagaacaccgggggggcccttctttaaaaaggggggggaattatttttaaaaaggccgggtaaaaaaaaaaaaacccttttttttttcttttgtgggggagagaggattttttttccccacccccccccctcttttttaaaaaggagacaacacaaaatttttttttttttttgtctcccgccgttaagtttattttttctcctccccggggttgtatttttttttttggggggggccccctccatgtttggggtttttcctcgcccccgcgccccacaaaaaaaaaattccttttttggttgttttcccccccccgaaggaagagggtgggtttttatttaccccccccccccggt

SEQ ID NO: 644396 - DNA, 112 bp, Homo sapiens
gagtatcccgaccatgtaacagatctttgttgcacacaaactgttgcatagaaaagaacatgttcagaagccatggggcaagcacatgcggggacggtctacaaatgcgtga

SEQ ID NO: 644397 - DNA, 1729 bp, Homo sapiens
  misc_feature (897)..(897): n is a, c, g, or t
cgccgcccttttattatttctctgaaaatcatggcccaaactttattggcataaatcgatcaggaattgaacactgggtaaaagccacgcttggatagttcacagagagaaagaaacagtacgattctaaaatcaatattttcatgttaacccactgacttcagaagaagagtggtacccctgaaaagaccccatgttcccttctttgggtgaagaatcttaagtggggtggcgttcaactaatataaccaagaagactgtgtaaggggcccttgagcgggtttgaaatcgtgtgcgagctaccatctcacaaacgctatttagagaaggtgggtgcatagagcgtcatgaccgctattcactcgcccaagacagagggacggggacacacgctttctttgtctgtcggacgaacgcaccctgaatagcaacacaactctactgggactatatccttagctcaatgaggagagcgcgaaagggtcgtgaagtttgcagctatgtgggcactagttctcccaccatttaaaacacccccgtgtgtgtgggcgccccccttttttctatcactctaccaatcagagagagagacccccagaaggcgcgcgtgtgcctcttccccctcctatgtattacaaatccctatgtggtgtctaaaacagagaagtccctccgtgggcgcggggcgtatctatcccccccaaggagagcggaaagccgctgttgtatgtccccactttgtggtaccccccccaaaatcatcatccccgttaatactcgaagttgagcaatacccgcttttattatgttggaagcccctttatactattttctcccagaaggaaagaccccccccacaatatgagaaggtgtggtcccagtaattatccccacccnaaccccgttgtggtgataacaccaggccggggggacacggcggcaacgacccaagagaatatttctcgtggggcggatgaaccaacgggcggggcaacattatagtatggcgcccccccaaatgtagcagtgtgcaaaaatcatattttcccagcagacacaagtacgacatccccaaacagaagagtatggagaaagcgcgtcttccgaacgaagacgctattccccgcttggagtaattgtgtcggtccgcccaaccaactacactcttgccgtagtacgacaccagcccacacaaggcagtacatattatatacccccctgcttgtcgaaactacacacgcggggcgtcatcatacaaccgcccaacgatacggacagagggcccccccccctaatattaagatacacagcgccacggtgagctggggggagggcggccaccatccacagcaaaacaggcgggctataccaaagttgcgtggctggtggtttctcccaaccaagcgggtgggagcacacgcccaagaacagtggtcgctccacactctagtaaagaggcgggtacttaatcaatctcgccgacaacacagagtcgagaaaaggcacaatgatgccccccccgcccagaaaagaaagatagattaatctgttctcccctcgtagactattctcactacccaaacagcgtaagaaaccgaagcaaaaacaagtcaataaaaacgttgctctacagaaactatcttcataagacggccccccaaaacaagggtggtgtgttgccaacacaccccctctctatcatcaacgatatgactacacgtgtacacaa

SEQ ID NO: 644398 - DNA, 330 bp, Homo sapiens
ttcatatcgagggcttcatgccctggttcagactatactacaaagcaacagtcaccaaaaccatatggtactggcacaaagacagacatatagatcagtggaacaggatagaaagcccagaattcaacccatgcacctacagcaaactaatccatggcagaggaggcagaatatttatctggtacaaaacccaaagctgtgtgcaatgggttccgggaagaggtgcattcgatcccagtacgtttcgggttcaaagctatcaaacaggtgctcgctgccctccttgagcaagcagctgatgttgagtgggatgaaggcgctcgacatgaa

SEQ ID NO: 644399 - DNA, 155 bp, Homo sapiens
ccccattccccactgtgaggtgaaaacgtgcttgtcctaacacaaagacaaatggatcttctattcccagaggaccatgggacaccaaaacctccctcttcagaatggaggtagacagataaaaatgagaggggcttgagtgtcacagaccaatc

SEQ ID NO: 644400 - DNA, 137 bp, Homo sapiens
actgatatgcatgtcgttgtggcggatgtactcagcgagtagagcaggaccagcctccctctgtgttactggtaggcaccttcttaaacatgttgtaaatgagatcgacgaaggcccaaaagagaagggaagaacgg

SEQ ID NO: 644401 - DNA, 187 bp, Homo sapiens
  misc_feature (126)..(126): n is a, c, g, or t
  misc_feature (153)..(153): n is a, c, g, or t
ggtcactttctacacatagactaaagcttgaaacagcgttgtggttttttccctgggcaaatgattattttattgtctgactttttattttctactatggttcctttagtcagaaaagtaactttntgtgcatatatctgaagtggtttttcnagctatgacactctttaggtgtagaacattgaca

SEQ ID NO: 644402 - DNA, 490 bp, Homo sapiens
cgtgggccccactgggcacaccatgacagccagcaaaaacctggggggcgcgaccccccgccggttgccccctggcccccgccgatggggtccgcccggcaggggttaggggcttcactattcccgtgaccaattcttgtggcggtaggaagaaatggttgctgctgtaatgttccgaccgcaccgctggcgttgccataacgaggggccacccataggaagccccccgtagggggtcatcagcctcccacgtgcgtgttgttccgggcggcgccaccttctgaagacagttgtccacatagtcctggtgccccaggagcatcgtcttgccgtccagaacacgtgttgtgccacgacacagccgcaaagcttagggagtcccaaagtgatagccccccccctttgtacaatgcaacggttattatgaaactaccccagggccccacccccccgggccaaccgggggaaccccccctctcccacaaaacaa

SEQ ID NO: 644403 - DNA, 1338 bp, Homo sapiens
  misc_feature (812)..(812): n is a, c, g, or t
  misc_feature (856)..(856): n is a, c, g, or t
agtttcatattactctaaatgcattacaaatatgcttaacctctaaatatttcatcactgaagaaatcccagccctacaacgttggaacagtaaaatattagtccaaggatccagtgagagacacagaagtgctagaagccactcctcatgaactaaggagaaaaagaacagacaagggaacaccccagacatggtatcagagatccacatgacaggcccaatgtgcctcattgagaacactaatgggcgactgatggcgaatccagaagctctgaagatcctttctgccattacgcagcctgtggtggtggtggcgactgtgggccgctagcgcacaggaaaatcctacctgattaacaagctggctcagaagaaaaagggcttctctctgggctccacagtgcagtctcacactaaaggaatctggatgtggtgtatgccccatcccaagaagccaggccacatcctagttctgctggacaccaagggtctgggagatgtagagaagggtgacaaccagaatgactcctggatcttcgccctggccgtcctcctgaacagcacttccatgtacaatagcatgggaaccattaaccagcaggccatggaccaactgcagtatcctttgtgacccagaacagcaccaaggtcagagggcacctgtattcataaaccagctgcctgactgtgaatcctgatgaatcaagctcaaaaggagaaaacataaaatacataaagtacagaggagtgatcccatatatccactttagacttgacacttaggttaagaacaaaggaaaatggaaggttngggaatgtgttgaactaatatgggatgaggtccatgttcatttngtcacatttctttagttagctactcagctatgtgacagagctgacacatcgagtccaaccaaaatcttcacctgatgagaatgagaatgaggattcagctgactttgcgagcttcttcccagactttgtgttgacactgagagatttctagcattacagaaagcgcttttggacaaaactgtgataaaataaactaaatggaggacttttttttattggaatagtgtcatttgtttcatacatattgatcaaatgcttactatgaatagactgaagatacagatataaatgaaatagatatggttcctgtcctaatgttgcttggggttaaaatggatgcaaacattcaattaacacaggtctatgtaatctagtacaagaactctcaaatgttggtatgcatacgtatcttctgaggatcttaccaaagacaaaagtctaattcaatagatcttggacagggtctaagagtctgtatttct

SEQ ID NO: 644404 - DNA, 428 bp, Homo sapiens
  misc_feature (1)..(1): n is a, c, g, or t
ntcaggctttccggttaggaagataatttggtcacttgtgtctgtggccactcttagaattttctcttttgagggaacctgtgactggttggcttttgcattctatggagggagatggggttaaagactgtggcaacacacaccctccagaagagctgggaccagagactgtcagcacagaaaggacaatgtcttttttagtagctgtggcagacttgagttgctgtaatttatacaaattgtttagaatggtttttaagactaagaagggaaatatacttattgcacaagacttttataattactatacttaaattatgctctatgtggggactgagaagtgtatttctacgttgcttatatctgatcacttttgtatttgttgatttaaagcctgtgggtcttttttttaatcactcttaatatca

SEQ ID NO: 644405 - DNA, 860 bp, Homo sapiens
  misc_feature (388)..(388): n is a, c, g, or t
tgggaagttaaagtatttattggatgtgtttaacctggggtactttccccacagatcatattagggagtttgggtagggtgaagtttataactcgtggtgcataggtgggttagaagaacagtaaatagggctcaagagggggaggaaaacaaaaaaaaaaaaaaacactctcgagagcgctctcttatgtgtgtggggtgtggggaaaaagagaggtagtaaataaaaatgggcgccacatgtggcgccaataacgctgtgtgttcccatggcccccaggcttttctcttgtggtccacaaaaggtggagaaaaatctctctggcgcggggtccctccctatatataggagagaggctcgcgatatattatattctcgcgagaatanagcgccccaggtgagacacaccccgctgccgcgtatttaacagtagaaatccgccgggaggacaaccacgacacccccacgcaggggagcacccacccacaaacacacccggccgcaaccaacacaccaacaacccgcgaggcacacctacacacactcacgtgtcaagagccccacgagacaggagacaccatcatccaggagacaacccacccaccacaaaccaccacacgagagagaaacgaaacaaaaatacggcagagcgagctgagccgaacaaaacaaaaaacaaaaaaacaacagcacacacggccatccaaccgaaataggaagacgaagagataaagaggaaagcggcgggacgagcactcatccaaaacaccgaacgctagacacccaaacacactttactcaataacacgcaggaccaacagaacatacaacaccagggcaaacacccaaacaacacaca

SEQ ID NO: 644406 - DNA, 1074 bp, Homo sapiens
agtttcatattactctaaatgcattacaaatatgcttaacctctaaatatttcatcactgaagaaatcccagccctacaacgttggaacagtaaaatattagtccaaggatccagtgagagacacagaagtgctagaagccactcctcatgaactaaggagaaaaagaacagacaagggaacaccccagacatggtatcagagatccacatgacaggcccaatgtgcctcattgagaacactaatgggcgactgatggcgaatccagaagctctgaagatcctttctgccattacgcagcctgtggtggtggtggcgactgtgggccgctagcgcacaggaaaatcctacctgattaacaagctggctcagaagaaaaagggcttctctctgggctccacagtgcagtctcacactaaaggaatctggatgtggtgtatgccccatcccaagaagccaggccacatcctagttctgctggacaccaagggtctgggagatgtagagaagggtgacaaccagaatgactcctggatcttcgccctggccgtcctcctgaacagcacttccatgtacaatagcatgggaaccattaaccagcaggccatggaccaactgcactatgtgacagagctgacacatcgagtccaaccaaaatcttcacctgatgagaatgagaatgaggattcagctgactttgcgagcttcttcccagactttgtgttgacactgagagatttctagcattacagaaagcgcttttggacaaaactgtgataaaataaactaaatggaggacttttttttattggaatagtgtcatttgtttcatacatattgatcaaatgcttactatgaatagactgaagatacagatataaatgaaatagatatggttcctgtcctaatgttgcttggggttaaaatggatgcaaacattcaattaacacaggtctatgtaatctagtacaagaactctcaaatgttggtatgcatacgtatcttctgaggatcttaccaaagacaaaagtctaattcaatagatcttggacagggtctaagagtctgtatttct

SEQ ID NO: 644407 - DNA, 315 bp, Homo sapiens
cttcctctgataatggaatgtgagagacacttcctatatagagagagttcaagcgtgtgagaataaaataatctcattcccagagtcagaggagaagagacatgtaccttgaaccatcgtccatccactcaagctagccagagggtgggagccataaggaatgcgtggggtagcagatggagtaatggtcacgaggataccatgacccactcccaaagctcatacttgcaaggttccctttctcttcttccgtcaggtccttcctttatgtctggttgttgcaccatctgcttggttggctgaatcgggacatga

SEQ ID NO: 644408 - DNA, 861 bp, Homo sapiens
  misc_feature (1)..(1): n is a, c, g, or t
  misc_feature (67)..(67): n is a, c, g, or t
  misc_feature (88)..(88): n is a, c, g, or t
  misc_feature (113)..(113): n is a, c, g, or t
  misc_feature (116)..(116): n is a, c, g, or t
  misc_feature (120)..(121): n is a, c, g, or t
  misc_feature (124)..(124): n is a, c, g, or t
  misc_feature (140)..(140): n is a, c, g, or t
  misc_feature (149)..(149): n is a, c, g, or t
  misc_feature (154)..(154): n is a, c, g, or t
  misc_feature (171)..(171): n is a, c, g, or t
  misc_feature (194)..(194): n is a, c, g, or t
  misc_feature (201)..(201): n is a, c, g, or t
  misc_feature (221)..(221): n is a, c, g, or t
  misc_feature (224)..(225): n is a, c, g, or t
  misc_feature (245)..(246): n is a, c, g, or t
  misc_feature (252)..(252): n is a, c, g, or t
  misc_feature (270)..(270): n is a, c, g, or t
  misc_feature (278)..(279): n is a, c, g, or t
  misc_feature (281)..(282): n is a, c, g, or t
  misc_feature (289)..(289): n is a, c, g, or t
  misc_feature (292)..(293): n is a, c, g, or t
  misc_feature (317)..(319): n is a, c, g, or t
  misc_feature (337)..(337): n is a, c, g, or t
  misc_feature (343)..(343): n is a, c, g, or t
  misc_feature (354)..(354): n is a, c, g, or t
  misc_feature (361)..(361): n is a, c, g, or t
  misc_feature (387)..(387): n is a, c, g, or t
  misc_feature (395)..(395): n is a, c, g, or t
  misc_feature (402)..(404): n is a, c, g, or t
  misc_feature (415)..(415): n is a, c, g, or t
  misc_feature (429)..(430): n is a, c, g, or t
  misc_feature (434)..(434): n is a, c, g, or t
  misc_feature (454)..(455): n is a, c, g, or t
  misc_feature (457)..(458): n is a, c, g, or t
  misc_feature (493)..(493): n is a, c, g, or t
  misc_feature (495)..(495): n is a, c, g, or t
  misc_feature (504)..(504): n is a, c, g, or t
  misc_feature (556)..(557): n is a, c, g, or t
  misc_feature (590)..(590): n is a, c, g, or t
  misc_feature (603)..(604): n is a, c, g, or t
  misc_feature (608)..(608): n is a, c, g, or t
  misc_feature (616)..(616): n is a, c, g, or t
  misc_feature (622)..(622): n is a, c, g, or t
  misc_feature (635)..(635): n is a, c, g, or t
  misc_feature (645)..(645): n is a, c, g, or t
  misc_feature (685)..(685): n is a, c, g, or t
  misc_feature (699)..(699): n is a, c, g, or t
  misc_feature (744)..(744): n is a, c, g, or t
  misc_feature (752)..(752): n is a, c, g, or t
  misc_feature (758)..(758): n is a, c, g, or t
  misc_feature (760)..(760): n is a, c, g, or t
  misc_feature (776)..(776): n is a, c, g, or t
  misc_feature (798)..(798): n is a, c, g, or t
  misc_feature (804)..(804): n is a, c, g, or t
  misc_feature (846)..(846): n is a, c, g, or t
nttttattattttatttttgatcaacataaaataattatacatctctatgggttacatagggatgtnttgatacatacaatacaaccntactgaattgtttatcacatctaanggntttnnggnagggtgtttaagttcntctatatanaagantatgttgccagcaaatngggacaatttgacttccaccttnccaattngaagaggctttatttctttntcnngcctaatcaccggcataagnnggtatnggatacccactagatacnaggctatnngnnctatgcnagnngctataagaatagaaatatgaaannnaaatacctaccacaaggnatttcngtcccaggggncagcccnagggcagagagctagctatgagaganattggggnggggacnnnggggccagggnacacggagaacagnnccgngaattcacattcacaggggnngnnggggggaaggggcaacgggtaggtacggggcattncnaggccattnggcgttggttaggctttgagtagacagataagaaaataaacgggttttcagnngggagaacggtatacccacagtatgcgggcggngggactcgaaggnngtcnaccaaagngctttnggaccaggggganccaggggagngggggagctcgcggagagggggagcgggagggcaagaggngtaacctggaagtnctggctggcaaggttttggagcaggctcatataagggtggttggnaggtgcanttcttnanggtacggctgccaaancagttcttcacaaataaaagtnagatanagatttttccagacaaataaaagctgacttgtctcacaaganatcctaaaggaagct

SEQ ID NO: 644409 - DNA, 141 bp, Homo sapiens
tgccacataccagacgctgtgacagaatcttcatacacattgctcccagatgagcaccaaagggagacacagcagatacgattctgtggacttgagaacccaatctatacaaatattttcaactctaagtccccaagagaa

SEQ ID NO: 644410 - DNA, 351 bp, Homo sapiens
gagcggagtacggcccggggaccgcagtggagagtgagcgggctttccccgcgggaccagccgggcgctcgccctggctgggcaggttactcactataaacaatatgcaccaacacaagcaaagttattctactttgaatgccgtgaaaagaagacagaaaactccaaattacggaaggtgaactatgaggaaacagtatttatgggttgcagtaccattcttaataaagtacttaaacaggtacagtaggtaaccaaagagaaaatcctggaagccacaagatgtctacaaagaaccatttccaagatgcatgtctttaatgaaaagggatggaaactacattcttgaga

SEQ ID NO: 644411 - DNA, 658 bp, Homo sapiens
cgagagcgttgagttccagaacctggctacgcttaagccttccaacaaggcttttgagaagaagttccgctttgattataccacatgagagggccctgcggcgcactctgcaggaggacctggtgaaggacgtgctgagcaacgcacacatccagaacgagttggagcgggaatttgagcggatgcgggaggatcgggaggtgctcagggtcatcttcccaactggagacagcaaggtcgtcctcccctgtaacctgctgcggatgatctggaatgctcagaaaatcttccacatcaaaaaaaaacaaaaaacaaacaaaaacaaataaaaaaaacaaacaaaaaaaaacccacgccttccctccgacctgcaccccatcaaagtggtggagggagtcaaggaattgagcaagaagctggtgattgtgaatggggatgacccactaagtcgacaggcccaggaaaatgccacgctgctcttcaacatccacctgcggtccacgttgtgttcccgccgcatggcagaggagtttcggctcagtggggaggccttcgactggctgcttggggagattgagtccaggttccaacaagccattgcgcatcccggggaaatggtgggggtctggctggcagtcccttggagaactgcaccaga

SEQ ID NO: 644412 - DNA, 1429 bp, Homo sapiens
agcggggctgctgcgtgatgtcggtgtgagcgagcggcgcctgaacacacggcggctgccgagcgcctgacccgggcctgcgccagagcctgcacctgagctcctgtgggccccacgaccgctgctacgtgtggcccatgctgcccagttgctcacattgagtgcggctgtgctcctgcaattcttcgcgtgtccaaggccttgccggggctcatggtgtcattgcttggctcccttccttgcttcggccgtgcgtccacctcctgcattgccttgagatcacacggccgcccgacctgcgcgacacaagcccatggcccgaagacgtggttgaaacgcgggcgggtcctccgaggctccccaagggatagcctgcctgccaggaacccgaagggtggctggcggccccccagcggggcgcttgacatcccggcgggaagacccaaaaaaattcagtgagaatggtcaacctgtggaaagaaacaccacgaaaagtgaaaaaagggacaggaatttacagcgcgatgccgcccgaagaacattaagccctcccggatcccaaggcccacgtttttaaaagggaaaaggaagaatcatcctaaacagccgtttgtaagagatgcaacagattgacttgaagcgcaagaatattgttgataaggacatactttagtctgggaaaaagaaattttatgagaagaggaatcaaagtaggaataacccgttgagagggttccaagcgatttgcggcacgtcaccaataggattggagagagtatagctatgtgcacgacacatttggtcacagattagaagaacgaacagaagtaaacaagtggccatcgagggtggattccatttttcaagagattcaaagagcaagcacaagaaggataacacatggctatggggaatgagcaaaaatgggtaagacatgacgaagttcaatttcaaaaagttccagtttagattataggttgaagactacgttgagaaagttagttgggggttgcataggattaaggttaagcgcaaaccgcacgatattaggagagtataaccgggagttggagcacattatgaggagagagaaagtatggcaagagagtatagagggagaggtaaagagatatgggaggataaagaagactcaacacaaagacacaaagcacgtaacactccagtggaacagataacaagcaaggagaacgaatagcgcacggagaacagcaggaatcaatagagacaaaaaagccacggtacaagaagaaggagggcgacaagacgacatgagaaggacaaacaccaccaagagaccggaacgcaatgcgccagcagaacaacccggaccgagccgtcaagacaggtagaccacgggacaaacacaagacaaccggacggaagacgtagaaaacagacacgcgccgag

SEQ ID NO: 644413 - DNA, 709 bp, Homo sapiens
ggagaactagtctcgagttttttttattttatatttaacggtttagagggggaatgctggacaattgtaatgggtttggaaacttgtcatataagtaatgctagggtgagtggtaggaagttttccataggaggtgtataatgggcctagccggaaccgggggtatgctgtaccgaaattcataaaaccagggaggttaagaagtagggtcttggtagccaaaatcatgttcgtgtcagagttcacggggaaagtgcgtcatactagtggtccctagcgaaccatctgtcgtcgcgcagagcggtcgtcatcataagatcaagcgaaggcggagagcaactagcagcgcatcatagaacgacactagcggcagaaagagcggcacgccgaagacagcaacagataacgaaaaagtgaatctagaaaagaaagccccgtggtaagaacacataaagattataagcagcagacgaaggcaccccaactctttacgggaagcaaggaggaacaacaacagacgagccagactctcgacaaacagagcaaacctagatagacataaagccctggggtgcgcaaagaatatccacacctccctactactcttacttgcgcgcccaaacaaggagtacagctgcaagtggcgagcgacgaaagcttaaccaccagagaggcggctgagtcccaatagcacagaacgcgacgcaaa

SEQ ID NO: 644414 - DNA, 368 bp, Homo sapiens
aaccacagagtctcgtccgtcgccaaggtgtagtgcaaatgttgcagcatggctcactgcagctttgaactcccaggctcaagcgatcctcccatctcagcctcctgagtagctgggactacaggcacaggccaccaaacactggctcaatgtttaaattttatgtagacgatggcggggggggcgggggtctccctatgttgcccaggctggtctcgagctcctgacctcaagtgatcctcctgccccagcaattccaaagtgctgggattacaggtgtgagccactgcctgggctggccgtaagggtttgtaactggtttcatagaagagccctggagcagcacagtagaaatgagccctatcgga

SEQ ID NO: 644415 - DNA, 297 bp, Homo sapiens
ttataagtctgacagtctctttgagaaattatattcagatcaacactccctcgtgttcacgtctgtttgtcaccctgccaactccttgcccacctgaatactaggacccactgagtccagtctgcagcacccacctattccaacaagaacatacctacctactacagcaaggatacacccacctcctccaacaaggacccacctcttaatccttcctaaacaatccatcaagtgccaaccaaacatttaaataagtgagcctatggggggggggcatcctcattctaaccgtcgacg

SEQ ID NO: 644416 - DNA, 348 bp, Homo sapiens
  misc_feature (280)..(280): n is a, c, g, or t
  misc_feature (285)..(285): n is a, c, g, or t
  misc_feature (313)..(313): n is a, c, g, or t
  misc_feature (322)..(322): n is a, c, g, or t
ggtctcactccgttgctcaggctagaatgaagtggagcaatcacggctcactgcacctcagtctcctgggctcaagcaatcctcccgtgtagctgggcctacaggcatgcaccactaatttgtttgactttttgtaaagacagggtttcaccacattgtgcaggctggtctcaaaactcctgagctcaagtgacccacctgccgtcttcacaaagaaggaagaaaagaaggagtggaggaagactctggaaccctggaagctgtatgccacagtgggctnatggntcttgtgtgaataggccatttatttganctcttcagnaacactgttctaaccggctgaaactt

SEQ ID NO: 644417 - DNA, 125 bp, Homo sapiens
tctcgcctggggcacatgagcaggccggcgagcgcctgcgctggcgctggccgtacgacatctgtcatgggcggctggccggcgcgaccgcctgcgggcgcaccgcgaccttgcccggggctcct

SEQ ID NO: 644418 - DNA, 247 bp, Homo sapiens
atagtgacccctggaaagatttattaaagaattaaatttggggaacctttaaaattagctcccccattagattttttttttcttaagcataagactgaacttaaatgtgttaattttagtagaaccaggcccggctcccaaaaggaacccagattgtagagattaccataaattgttcttgttctaaaaaaaaaattttttcatttctgtcgggcttggaaaactagtaaaaattatgtttaagata

SEQ ID NO: 644419 - DNA, 289 bp, Homo sapiens
  misc_feature (168)..(168): n is a, c, g, or t
acaccacctggtccacaccacctgagtccatgtgtccttcgggaaaagggggagtgagagtgggaaaaagggagagttcaggacacctggtccccagctccccattgcctggggcagcacgccctcaactttctcgcttgtgccctacccctacttccagtgtgccanaatagccattaacctcgtacttggaacgtgttatgtaggcctactctgggtgtccagtgtttcctggttcaacgcctgggaaatgccagcggaggaaacgggggtctaggctacatgcgac

SEQ ID NO: 644420 - DNA, 166 bp, Homo sapiens
  misc_feature (153)..(153): n is a, c, g, or t
ccccagccgccccaaccaccttttggtgccacacttctcaggctggccgccctggttggggcagccgagagcctaaaaaacattggtgaaggggccttggagttgtgaccgccggggccgaaacaggaacgtacgggtaaacgtgtgttttcnggaaaaaaaaaaa

SEQ ID NO: 644421 - DNA, 93 bp, Homo sapiens
cccaacccgaattgaggggggctttgccaaaacccgaaatggtaatgtgaagttaaaagcaaagagtggcccccagtaaaccccccgggcaga

SEQ ID NO: 644422 - DNA, 174 bp, Homo sapiens
  misc_feature (6)..(6): n is a, c, g, or t
  misc_feature (74)..(74): n is a, c, g, or t
  misc_feature (114)..(114): n is a, c, g, or t
  misc_feature (144)..(144): n is a, c, g, or t
  misc_feature (148)..(148): n is a, c, g, or t
ctaaancttcttagcatgttaataacttatgtattatatagttttagaaattcttaaagtgctattttaaaacnccagcctgggtgacagagtgagattccgtctcaaaaaganaaaaaaaaagaatatatatatatgtatgtntgtntgtatgtaaacacacacactaatttg

SEQ ID NO: 644423 - DNA, 1804 bp, Homo sapiens
gcactggactgagaaccttcaccaaaaaaatgtctgcccagagacagatgaggtccttcagctccagtgctgattggttcttttccaaaggcccatctaatcctaccacgcacggaaatatccacaggtttttattctttctgccaggtacatcagatccatcaggtccgagctgtgttgactaccactacttttcccttcgtctcaattatgtcttggaagaaggctttgcggatccccggagaccttcgggtagcaactgtcaccttgatgctggcgatgctgagctccccactggctgagggcagagactctcccgaggatttcgtgtaccagtttaagggcatgtgctacttcaccaacgggacggagcgcgtgcgtcttgtgaccagatacatctataaccgagaggagtacgcgcgcttcgacagcgacgtgggggtgtatcgggcggtgacgccgctggggcggcctgacgccgagtactggaacagccagaaggacatcctggagaggacccgggcggagttggacacggtgtgcagacacaactacgaggtggcgtaccgcgggatcctgcagaggagagtggagcccacagtgaccatctccccatccaggacagaggccctcaaccaccacaacctgctggtctgctcggtgacagatttctatccaggccagatcaaagtccggtggtttcggaatgatcaggaggagacagccggcgttgtgtccaccccccttattaggaacggtgactggaccttccagatcctggtgatgctggaaatgactccccagcgtggagatgtctacacctgccacgtggagcaccccagcctccagagccccatcaccgtggagtggcgggctcagtctgaatctgcccagagcaagatgctgagtggcgttggaggcttcgtgctggggctgatcttccttgggctgggccttatcatccgtcaaaggagtcagaaagggcttctgcactgactcctgagactgttttaactaggactggttatcactcttctgtgatgcctgcttgtccctgcccagaattcccagctgcctgtgtcagcttgtccccctgagatcaaagtcctacagtggctgtcacgcaaccaccaggtcatctcctttcatccccaccccaaggcgctggctgtgactctgcttcctgcactgacccagagcctctgcctgtgcatggccagctgcgtctactcaggtcccaaggggtttctgtttctattctctcctcagactgctcaagagaagcacatgaaaaacattacctgacttcagagcttttttacataattaaacatgatcctgagttatctgtattctgaactttcttaattgagaagaggcaagaaatcactgcagaatgaaggaacatcccttgaggtgacccagccaacctgtggccagaaggagggttgtaccttgaaaagacactgaaagcattttggtgtgtgaagtaagggtgggcagaggaggtagaaaatcaattcaattgtcgcatcattcatggttctttaatattgatgctcagtgcattggccttagaatatcccagcctctcttctggtttgctgagtgctgtgtaagtaagcatggtggaattgtttggggacatatatagtgatccttggtcactggtgtttcaaacattctggaaagtcacatcgatcaagaatattttttatttttaagaaagcataaccagcaataaaaatactatttttgagtctaaatgatagaagcccaaatatattttgttcatggtaaaaaa

SEQ ID NO: 644424 - DNA, 330 bp, Homo sapiens
cgcctgctcacagcagaagtgttgtgtggaaacaaaatgagtatctctttctggctaccctggagtgtgtaacgctctgccaggcagccctcctcctctgctcatggagggcagcccctgtgatgtccttgcatggagcctggtgaattactaaacatgaacagttgcatcctctgtgtcgtgacttgtcatgtgccctggtgagggtgggagtcaggagacaagacagcgcagagagggctggttagccggaaaaggcctcgggcttggcaaatggaagaacttgagtgagagttcagtctgcagtcctctgctcacagacatctgaaa

SEQ ID NO: 644425 - DNA, 1370 bp, Homo sapiens
gcactggactgagaaccttcaccaaaaaaatgtctgcccagagacagatgaggtccttcagctccagtgctgattggttcttttccaaaggcccatctaatcctaccacgcacggaaatatccacaggtttttattctttctgccaggtacatcagatccatcaggtccgagctgtgttgactaccactacttttcccttcgtctcaattatgtcttggaagaaggctttgcggatccccggagaccttcgggtagcaactgtcaccttgatgctggcgatgctgagctccccactggctgagggcagagactctcccgaggatttcgtgtaccagtttaagggcatgtgctacttcaccaacgggacggagcgcgtgcgtcttgtgaccagatacatctataaccgagaggagtacgcgcgcttcgacagcgacgtgggggtgtatcgggcggtgacgccgctggggcggcctgacgccgagtactggaacagccagaaggacatcctggagaggacccgggcggagttggacacggtgtgcagacacaactacgaggtggcgtaccgcgggatcctgcagaggagagtggagcccacagtgaccatctccccatccaggacagaggccctcaaccaccacaacctgctggtctgctcggtgacagatttctatccaggccagatcaaagtccggtggtttcggaatgatcaggaggagacagccggcgttgtgtccaccccccttattaggaacggtgactggaccttccagatcctggtgatgctggaaatgactccccagcgtggagatgtctacacctgccacgtggagcaccccagcctccagagccccatcaccgtggagtggcgggctcagtctgaatctgcccagagcaagatgctgagtggcgttggaggcttcgtgctggggctgatcttccttgggctgggccttatcatccgtcaaaggagtcagaaaggacctcaagggcctccaccagcagggcttctgcactgactcctgagactgttttaactaggactggttatcactcttctgtgatgcctgcttgtccctgcccagaattcccagctgcctgtgtcagcttgtccccctgagatcaaagtcctacagtggctgtcacgcaaccaccaggtcatctcctttcatccccaccccaaggcgctggctgtgactctgcttcctgcactgacccagagcctctgcctgtgcatggccagctgcgtctactcaggtcccaaggggtttctgtttctattctctcctcagactgctcaagagaagcacatgaaaaacattacctgacttcagagcttttttacataattaaacatgatcctgagtta

SEQ ID NO: 644426 - DNA, 137 bp, Homo sapiens
acgcctattaaaaaattctcataatcactaatcactagagagatgccaatcaaaaccacaatgagataccccctgataatagagtggcggtacttgaaagtccaaaattaccagatgctggcacggttgtggagaaa

SEQ ID NO: 644427 - DNA, 934 bp, Homo sapiens
cggtaccccacgaagcctccaatcccactcagcatcttgttctgggcagattcagactgagcccgccactacacggtgatgggccttatcatccgtcaaaggagtcagaaagggcttctgcactgactcctgagactgttttaactaggactggttatcactcttctgtgatgcctgcttgtccctgcccagaattcccagctgcctgtgtcagcttgtccccctgagatcaaagtcctacagtggctgtcacgcaaccaccaggtcatctcctttcatccccaccccaaggcgctggctgtgactctgcttcctgcactgacccagagcctctgcctgtgcatggccagctgcgtctactcaggtcccaaggggtttctgtttctattctctcctcagactgctcaagagaagcacatgaaaaacattacctgacttcagagcttttttacataattaaacatgatcctgagttatctgtattctgaactttcttaattgagaagaggcaagaaatcactgcagaatgaaggaacatcccttgaggtgacccagccaacctgtggccagaaggagggttgtaccttgaaaagacactgaaagcattttggtgtgtgaagtaagggtgggcagaggaggtagaaaatcaattcaattgtcgcatcattcatggttctttaatattgatgctcagtgcattggccttagaatatcccagcctctcttctggtttgctgagtgctgtgtaagtaagcatggtggaattgtttggggacatatatagtgatccttggtcactggtgtttcaaacattctggaaagtcacatcgatcaagaatattttttatttttaagaaagcataaccagcaataaaaatactatttttgagtctaaatgatagaagcccaaatatattttgttcatggtaaaaaa

SEQ ID NO: 644428 - DNA, 402 bp, Homo sapiens
  misc_feature (23)..(23): n is a, c, g, or t
  misc_feature (29)..(29): n is a, c, g, or t
  misc_feature (51)..(51): n is a, c, g, or t
  misc_feature (86)..(86): n is a, c, g, or t
  misc_feature (196)..(196): n is a, c, g, or t
  misc_feature (304)..(304): n is a, c, g, or t
  misc_feature (399)..(399): n is a, c, g, or t
  misc_feature (401)..(402): n is a, c, g, or t
ataaaagccctgtgaaccccttnaaaccnactggtcccccccatgggtganatcctcaatgtgaccaatgggcatgggcatcccanaccggggaaagtggggcactgctgtgggtgctgatgctggttatagactgcaggcctggctcagggctcccccagtttccccctgcactggggcaaggaggctatgtganagtttcataaagtgtgtaaattcctggaccactgtgacagacatagctgtcccattgtcactgagatccccgtgtccctcagagacccctcattccctgttccttggnaacctctaacctgttctctacctctatagttttgtcattaaaggaccctttgaaagtacttattccagcctgcgcaacatggtaaaaccccatcncnn

SEQ ID NO: 644429 - DNA, 901 bp, Homo sapiens
  misc_feature (881)..(881): n is a, c, g, or t
gaaggaaggggcggttggtgcgggctccattgtgcgtgtttaaaggtgccatgaggggtgacagaggccgtgttcgtggtgggcgcttaggttccaggaggagggcccaggaggcagggttcagcgcctccatttgttaatcacacagttatcctcatattgagcattgcatatgtcttgtgtgataaatgagcctctattcccccacgggatcaatgacacacgactacctgtattgtaccattgttgctcgtttcatgtgaagtgggcttgtctgagaagaagggatatcagtgaccttgtctgcacaatgtactggctgagagagggccatttcttaattaacattcctcctagcggtgggatcgatatccatagttgagaccaaaatggctgcatattgactgacacctcctgaatgtagttgcgtcacttcgccagggggtagcaaattgtagtagacgtcgcaacaacgtttgcatacgaaaattgtttccggagcaagggatcgtggactcccatgataaaatacccggggtgacaagaatgaacctcaccacggaacatccaaaggtgtggtttagaacacttgagttgtggctgaatcatcgtccagcatggagtgtctttgtcccagaccggttcttgtgaaatggcttgtttggcgttgcccgcttgcgtagtggaatccatagaggatcctgagtgaggaaaaggcccataatagtaagtccactaagggaattcctttccatgaaaaggttccttaagccaattgcattgtgccaaaaggtacaatccctgggttattgacaaagtcgaggtccgtatccttgactaggcgttacaatcatggcagacgaatttgcgtccatttaccnaggcatggctgcccatccca

SEQ ID NO: 644430 - DNA, 1665 bp, Homo sapiens
ttccaggcccctgcagccatggatgtctggaggcgtccttcccttatctgtcccctgactccaggcccctgaggcctggtggtgggaagatgtgctgcattgactcagcgtaaggcacgtcgctggtggtgttctcccgtgcgatgcaccttccggaaggactgggcatgctctgagcgcactatctctggtgcacgagatcctgtcatatgcatcgtgcgatggtgatactacagtggcggagcagacccatgagcattatacgcatcaatctatgacgagggcatcttcacaagcgatgataatagtcatgcgacatatttgtcttcacatgttggtcctaaggtggtgatgtccaggagcccaaggcatggccattcattgtcttgtcgtattcgccttttgtacgtaagatcccccagtgtcccagctttgtacgttaaagtagagtctccaagtgcgagacacagtgattatgcctcaccaagcaaggggtagagcgctcaagataggaactacagagaccgagaccaacgtcccacgtttggaacacgtcattgacacatcattcgcgcaacgagtattcccctcccacccagctgagggcgtggacgtgaccgtcggccccgcattcgttggacgaagagaagaccaaccctgtttagacaaccaattgggtcgagagaatgcaacaaaaaaaccggttggggcgcatgataggaggctaggtaggggaccatggagcgtccggcactagcacgttccttcccgggtgaggcacttgaaaccccattgtcgggttcattggggacccctccagtttacgaatatttccatttacacacaattaactttacctagcaaagggggggtatacaatggaggagaaaggatcaaaacaaaggaaacgccactatacaccaccatttcgtacccacgtccaaagattagcgaacagtattctagagccgactatattgccaaccagggcagtggatccttatacaccccgcggaggaaaaagcaatggccaccaaggacaaacattacaacaccttggaggtcgatcggaacgatatggccgagtcggggaacaacaacccaggatagggtgactcccgtagggcataccgatagagtgggcccccagacaggaatatgttagcaccaccccaagacaaccgatgatacaatagacacccaccaaggaggaacgattcgcaaaaacagttgggcactacaacaatagcacgggggagcacccccacacatacgtatacagcatctccacacgccataaggggcgaacaaagcacagccaacaaagtatgcaagatgcatagacgccttaaaggccaggcatttgcctaacgcaacgagaggaaaagagttgggagcggtttgaggccagtgagtaacaaacaaagaaacacaggaccatcactggagcaagagagcgccaagacatccattcgacgtgagaacagccatcaacgaccggcgcctagccaccgcgaaacccaggacctccattgaggcacgacgcgacgcaacaattgccacgccatcctaggactagtagggataggacccacagtgcaaccacaggacagaggatcaggccgaccgccaggagcacacacacaccgacggcgcacgggggcg

SEQ ID NO: 644431 - DNA, 1174 bp, Homo sapiens
  misc_feature (5)..(5): n is a, c, g, or t
ctcangcaagctgtgcagtggtggctactgcctgtaggtattttccagtgactgaaagaggctgctagtggtcgggattagatatcatctgatgtcctaaaaagactgaacccttcatattccccagaagaataacagctgttccccacctcccacacatctgcatcaagctgaagttctgtgtcctcgtgagctgatttcacctttgcacagatcttgggggaggtgatgacaatacaccctggacctcaactttctctgtctgaagctgcagggggcccctgaagggtgggggagatggcaggcccaccaggataccctgtgctgatcaatcctcttctctcttctccagggcttctgcactgactcctgagactgttttaactaggactggttatcactcttctgtgatgcctgcttgtccctgcccagaattcccagctgcctgtgtcagcttgtccccctgagatcaaagtcctacagtggctgtcacgcaaccaccaggtcatctcctttcatccccaccccaaggcgctggctgtgactctgcttcctgcactgacccagagcctctgcctgtgcatggccagctgcgtctactcaggtcccaaggggtttctgtttctattctctcctcagactgctcaagagaagcacatgaaaaacattacctgacttcagagcttttttacataattaaacatgatcctgagttatctgtattctgaactttcttaattgagaagaggcaagaaatcactgcagaatgaaggaacatcccttgaggtgacccagccaacctgtggccagaaggagggttgtaccttgaaaagacactgaaagcattttggtgtgtgaagtaagggtgggcagaggaggtagaaaatcaattcaattgtcgcatcattcatggttctttaatattgatgctcagtgcattggccttagaatatcccagcctctcttctggtttgctgagtgctgtgtaagtaagcatggtggaattgtttggggacatatatagtgatccttggtcactggtgtttcaaacattctggaaagtcacatcgatcaagaatattttttatttttaagaaagcataaccagcaataaaaatactatttttgagtctaaatgatagaagcccaaatatattttgttcatggtaaaaaa

SEQ ID NO: 644432 - DNA, 352 bp, Homo sapiens
  misc_feature (65)..(65): n is a, c, g, or t
atcacaggatctccggaatgtgtggtgttatggcaggcaccccggaggagctagccagaagattngaagaacaagctcgagtgcagcaaatacagaacgaaatgctgcaagctcaacaaaagagcattgaagagctgaagtctatggtggccgctctgcttggtcactcaacaaagtccaagagcatggacgcttcccctagcaaaactacgaaaggcaaggggaaagaaaaaatggctgaacactcagcttctgacgatgctgtggattctgaacctgaaatcgtagtatcctcggctgaagaacctgaagctggagatcgaaagagaaacgttcataacaccacacaatt

SEQ ID NO: 644433 - DNA, 201 bp, Homo sapiens
attccctaagagaaaggaagtaagccccccaatctccctagctttccccctaggggcaaattttggactgtagaccaggaaggaaatccccaagtacataagttttactgagttatggagccccatatcagagttcagggaccctgaggcaactggaagttgtggggtaaagttttgaaaaagagagagctcctgccccca

SEQ ID NO: 644434 - DNA, 1027 bp, Homo sapiens
gcactggactgagaaccttcaccaaaaaaatgtctgcccagagacagatgaggtccttcagctccagtgctgattggttcttttccaaaggcccatctaatcctaccacgcacggaaatatccacaggtttttattctttctgccaggtacatcagatccatcaggtccgagctgtgttgactaccactacttttcccttcgtctcaattatgtcttggaagaaggctttgcggatccccggagaccttcgggtagcaactgtcaccttgatgctggcgatgctgagctccccactggctgagggcagagactctcccgaggatttcgtgtaccagtttaagggcatgtgctacttcaccaacgggacggagcgcgtgcgtcttgtgaccagatacatctataaccgagaggagtacgcgcgcttcgacagcgacgtgggggtgtatcgggcggtgacgccgctggggcggcctgacgccgagtactggaacagccagaaggacatcctggagaggacccgggcggagttggacacggtgtgcagacacaactacgaggtggcgtaccgcgggatcctgcagaggagagtggagcccacagtgaccatctccccatccaggacagaggccctcaaccaccacaacctgctggtctgctcggtgacagatttctatccaggccagatcaaagtccggtggtttcggaatgatcaggaggagacagccggcgttgtgtccaccccccttattaggaacggtgactggaccttccagatcctggtgatgctggaaatgactccccagcgtggagatgtctacacctgccacgtggagcaccccagcctccagagccccatcaccgtggagtggcggtcctgcacttgactccctggaaactattttaactggggatgtggtttcactttttctgaacgctgtttgttcctggccaaaatttccagtgcctgtgtcaagctgttccctgaaatcaaagtccaaaggggggttacgcaccacaggtatttct

SEQ ID NO: 644435 - DNA, 736 bp, Homo sapiens
gggcggacctttgtcgaggtacctcaacgctgtgaccgagagcgagaaggcactgacagagcaaccactttgaactgagcctgcgcactgagagccacgcaggggcctggtgctctggagatggaaggccacaggagcgggcagactatgtggcactggccattgtggacgtggcacctgcaaactgagctacaactgggctcccagcccgtggtgctgcgttccaccagtgaccctgtcaacaacaaccgctggttgcgggtcgtggacacatagggagcagagggaaggttccctgcaaggtgggcaatgaggcccctgtgaccggtcctccccgcgtgggcgccacagcagactaggacactgatgtgagccctgtgagattggagggcactgcctggagctgcccgtgggccagaaatgccaaggcctacaggacagtgctttgtgggctgcttgcgggaacgtggtgagtgggaccaggaaacccgatgaaactgatggaggacgcacgtcaacaaagccagagaatgtggacctgacaccaaacccagtgagcttggcaaccagagaccccgtgccacgctgtaattattttatattatagtacaacttgtcgcaagagatatgattttcttgcctgatgttggccgagggactgtgaccggcctcacttccgtcaggaccgcggatgcagaaaaacaagctagagatgaaaggaagtggaccgtgaagg

SEQ ID NO: 644436 - DNA, 1190 bp, Homo sapiens
cggacgtttctgcggactctagtggcgaaatcatgcccctaggagctcaaagatggtttgtactcgggcagtttggagggcttttcccgatgtctgtggacttagaatcgttcccttctacgacctagggccgtgcatctattccccgtccaaaagtgcagatctcaggaaaagcggcttttcttgccaactgacttcccgtcgagaaattattttataaaaactaagtggaacctcgggatgtaaatcaaccttccttccgtgttgattggccgtggctttagtggcccttgccctacggataagttctcccatgcttagtctcttgtgtctcagcgtgtgttccacctcttgagattcgaaaagtccctaacagtggaatgttccatcgtcagttcacatctcaggtcatgctgcatctgttcattcccccacatcccgcatagggcgtcttggctctgctgagctctgcctttcctggcatctgtacccacagagctcctgctcgtcctgtgctcattggcctcagtgctggcgttctctcacgctgcagggttactcacaacgggagttgtctggtgtgtctgatatgctgtctgccgtacatgaccctggtcttccaatgatgataagtcatcattcgaaaataaacacttgagcgctggactgttgagagcgttctcttgtacgatagatatgaaagcatcgatgcctcgagttaatcgtggtaacttcgtgaactcttccttaaatatgacgaagaggcaggaaatcactgcagaatgaaggaacatcccttgaggtgacccagccaacctgtggccagaaggagggttgtaccttgaaaagacactgaaagcattttggtgtgtgaagtaagggtgggcagaggaggtagaaaatcaattcaattgtcgcatcattcatggttctttaatattgatgctcagtgcattggccttagaatatcccagcctctcttctggtttgctgagtgctgtgtaagtaagcatggtggaattgtttggggacatatatagtgatccttggtcactggtgtttcaaacattctggaaagtcacatcgatcaagaatattttttatttttaagaaagcataaccagcaataaaaatactatttttgagtctaaatgatagaagcccaaatatattttgttcatggtaaaaaa

SEQ ID NO: 644437 - DNA, 722 bp, Homo sapiens
  misc_feature (51)..(51): n is a, c, g, or t
  misc_feature (72)..(72): n is a, c, g, or t
taaagttctaagttctcattctggttgtaaaggcccatcacaaagaagttngtccagttgctacaccctccncgacataaatgcaaagccttggcaagtcagctcgtacgactgtctcagtcacaagcatcatacttatttcagctctgagaattagcttactctgcttcccacttccgtcttatgcataacatggttttttattggtctaagttctacctttattcccatgcccaagtatggcacctcactgattctggttttgactctgaactctcatttggaatttggaatatccctgttcattctcatgtatcaatatgtaatgtttccaactgtctgtcctgccttttaaggtggatctttaagaaaggacctgtggctttttctctaccatccagccctgcccctgttgtgctgtgtttagaagggttgctagtctgatgactaatcattttaacagatctgcctaatttttgtgctcttctcaggtttattctttttaatgagcaagatactgtgcttgactctccttggaaatataatatttgcttgctgttgaaagccctgtttctttgccttccagcttttgaatttgtcgacttggacagtttgctaaggggtcaattccttaccatttgggcataaaggaaaatgcatctccatgcttcatttgcttcatctcagcttggttttataataaacagaaatagggaaacttt

SEQ ID NO: 644438 - DNA, 399 bp, Homo sapiens
atgatgatgatgatagatgaatgatcaacgagtatatgaatgatagaaggaatgaatagataaatcacccgtgtaaatgaatggaatgagtggatgaatagaatggaatgagtggattgaatcaatctgagtggaatggaacggaatggaaaggaatggaattgaagggaatggaatggaatgggatggaatggaatggaatggaatggaacggaatggaatggaatggaataaacccgagtagaatgcaatggaagggaatgattcgaatgtaatggaatgcattgaatggaatcaacacgagtagaatggatgaatgcatgattggagtgaatggaatcaaccccagtggaatgtaatgtacaggaatggaatggaatggagtagaatgaacacgag

SEQ ID NO: 644439 - DNA, 1365 bp, Homo sapiens
  misc_feature (404)..(404): n is a, c, g, or t
gcggatgctatgacggctgtaagttgggtgaatctacaccgtgggatccgagttaacccttgttctttgtctgtgtcctcagttgtgaccattcatccgcgaaattacgagaaatgagcgttgtggcagaggtgaaagagtgtagtcaaaagtgcatcgtccgtgcaaatggttcgacatcataatagagcagttcttcctcgatgtcgaccatcagaagcacgtacctagtgcgtaccaccaagatggagaccagatgttccatcagatgacctagaaatcgtatgacgtacctgaatcactggtacgttgtatcgggcggctcgacttggcctgctggctgtctacaagaagacatacacaagtcaccttgtgaaggataccgttcaaccgtggagcatcgntccatttggagacatggggcgagagcatagatgcagtcagagaaggatcgtaaccaagggtcagagcaggtattcaacaccacttcagttgcatgtgtagtaaaacgtctggtatatttgggatggcaggtagtttgaacggaagtaagggaatttcgtggttcgaattgagaaggttatacaagaaaatgattcgtggtgcgatgggttggtgagtacgctaggagcaattccaaagaatattcatccgtggagattgggagaagaggacatatggggttgtaatcatgcaaaagaagttggaacttaaagaggggagtggtggcctgggaactttcccgttggtttgaattcgtaagggtaggttctaaaataggtacgtcttaacttagggtggttgccaaggtgaaatgggtgggattatcacacgttggggataggtgggattgttcgtgtgggaacatagagcactaactttttgggtcccgttatgacgggacactttcctacgttggagtagtgccaaggtttgtgggaggcttcaaaggcataggacttttttccaaaaacctaagagtgaaaaagttgacttaggaataacggagagtaatggacaccacttgaattaaaggattgtaaacgttgttggggcatttgtcaccgatgagaggcgcaatatacggttcccgggacagcaccaacctgcggggttatatgaacggcgacatttttgacagctggatctctcaaaaggagagcttgtttgacgagatttttcaacactgggtgcctgtcccacaacacttattaagtaggcacacacatgttgtggctcggtgacgcgacatactttttccaccagttgcgtcggcaacaacaacaccaccagctgtccatactccgcgagacactaacacaaaatcaacacagacgcggggaccgaaaaaatcacttcgagtag

SEQ ID NO: 644440 - DNA, 146 bp, Homo sapiens
aggcagtatggactaacacccatgttggccaggttggtgtctgcactcttgacctcaggagatcgaactgccttgtctcccaaagtactgtgcattacatggcataagccatcacagccagccttctcgagccaatctcaaactct

SEQ ID NO: 644441 - DNA, 334 bp, Homo sapiens
atttttttttttataaaaaaaaccgcgggggggggtcctccccctttatcccccccttttggggggtgggggggggggttccccctgggtggggggtgggccccctttcccccccagggggaacccccctttttttttaaaaaaaaattttccccgggggggggggggggcccttttttcccccgtttccccccccccgggggggggggggggggaatttttttttaccccggggggggggggtcccttaaattaaatttttccctttccccccccccgggggcccccgggggggatttttttttcctttttaaaaaattttttttttgcccca

SEQ ID NO: 644442 - DNA, 267 bp, Homo sapiens
gtcgtgcttggtggtctcgctggcggccgcaccgagtgcgccctgaccgatgacgtacagccggaccttgccgtccgccgtctggccggctttgccgccttcgatgccgacggccttgcgcagtttcttggcgatgtcgacggcgccgctgttgttgaagtcgaggcgcagcgtcacgacgtagggtttgccggcctgcggctcggcttgcgtgggatcgggcacgaccttgacgttggagacgccggccgcgatgcgtctcagctc

SEQ ID NO: 644443 - DNA, 288 bp, Homo sapiens
agttgtaaatgatgggaagtgttagaggaagcagggttattagtttttctttgcagtgtatagtgagaattggcggtaaaattccgggtcctgggcttttcttagacgagaggttttcatggactgagtcagtctcctggctagtaatagatctgttaatattttctgtttcttcacaattcagtcttgttaggtcgtgtgtttctaaaatttgtccaattcatctatgatattcattctgttgttcatagtactctcataatcgccggtcacgagatgggtaccgag

SEQ ID NO: 644444 - DNA, 252 bp, Homo sapiens
ggagggagagactctgttacggctctgaggcagggaagctcttgcatgttagggaaactgagaggatttaaggatggggttgtcagggtgtatctagtgagggcagagcaagccagaagagtaagcagagagcagtttgagcaggacttgtagaccttcttgggatgtctgacttcatcctcagaccatgtcgccagttgagagctataagcagggtgagagggacaagccagttgccgcatggtatgtaca

SEQ ID NO: 644445 - DNA, 284 bp, Homo sapiens
gctcgaccactttgggaggccagggcaggcagattgtttgagttcaggactttgagacaagtctgggcaacgtggcaaaaccctggctctacaaaaaaattttaaaaattagctgggtgtggtgatgtacacctgtggtctcagctactcaggaggctgaggtgggaggactgcttgcccctgagaggtcagggctgcagtgagctgtaatcatatcactgctctccagccagggcaacagagcaagccccgtttcaaaaaaagggaaagaaagaaagtcgacg

SEQ ID NO: 644446 - DNA, 528 bp, Homo sapiens
agcgatcagaggatcgccctcggatgcaaggtcggaagaggtgacaagtaattgggggtaataatataccttccgatcatgggcgcaagaacgcactataggagatgtgtgatcctaccacattcctttactcgtacgtgcaattgaagattcaaggatcacgttccaggggaaactgatatgaaggttgcaatgaatgtgtatgagtaatcatcaggtgccggataccttgtgagattgagtcgctgcatgggcgcgtaggctctttcttcacaaaaatcggacaacatcagtccagaagaagagtatacagatggcctgccttctcatggtgtcggtggcacgtgtcttcgccaacacgggccggcgttgtcgaagtctcagtacagccctgctatagaagggcatggcaacaacatacatggcttggccaaagccatcaaccagatggctgcagctttgtttacaattcacaaaggaagcatagaagaccgtcttaaagaatttctgacacttggcctccagagg

SEQ ID NO: 644447 - DNA, 216 bp, Homo sapiens
acttacaatgctctaagatagcaatttccaaagacagagatggtgaacgcatgctcaggcagtggaatcatcaacctctataaagcacaatgtactgaatgtcctgaagctattggggaacataaaaagatgaaaagggcaatgcagtatagtgggaaacatctgggctgggagatgcctgtgtttcttcctagctccgcaggcatacagcacatg

SEQ ID NO: 644448 - DNA, 434 bp, Homo sapiens
tcgtttgttctgtggtggtttttttaaaaaccgcaccaatcagaacgggggccctttttgttcagccccccccgggccgcccaatccggaagaagatgatggaaatccttacccccgagggcgcggccaatacctttaaaaaagtgggccattaatttattcccgcccgccttgggaaagacatagaaaaggcctgcccctctttttttcccccccccgatgtttttggttgaaaaggaaaaaagcttaaaaagccccagtttttattggggaagcccctggggcttcctggggaaggccggagtttttggaaaacccccgggggccagaccggggctaaaatttaaccagcttatgggttttaaccccccggcccagaatttgttttaaggtccggcctccaaaaggggccaaaaaaaagggccttttgttga

SEQ ID NO: 644449 - DNA, 742 bp, Homo sapiens
taagtggttgagaaagtcagtgatctttttactacatcatgtctccccttcagatttcccttgctgtcattctgcttttgagagagatactctcaaaacagagatataaagtgtcaacactgacactgtgaccacaagtcagccctctgaggcaaggggaaccagaaaggcttggaaagggagattggagagggtgaggggctgaacactgacagttactgcagctgtctgtagtgctccctcttccagttctgtctcatttggagtcattgtttaaatttcagtccacactgagcttcttacaggaattaggcacagttcaggcccaggattgtaaacaactctcttccatgtgtctcttccttcctggagaggtgtggtgtggaacgatgatttatacccaaccttatccattcccagttaggcttaggatttactctttcatttttcaggcaaatgttgaacatctggtgcacacgatgaaaacaactgtgaacaggggctggtgttcaggtacctcatccatggttggtcctaatgaagaagaaaatagcttgggtcaacccatgaatggcatggtgggaaaccctgaggaatctgtagatttacgggagggagcagcctaatcctggaatcctggcggagtacacattgccggcatgacaaggcgacacggggatgggaccaccaaagtcacggctggccccctgcggcatgacatgccaggaaataacaggtcttc

SEQ ID NO: 644450 - DNA, 469 bp, Homo sapiens
aaatatttctttcttcaataatcaactttactgtataaagcttttaatttttaaaaacgttttgactgttttgtaataacactagcttaaaacaccaacacattatacagctgtataaaatattttctttctttgtatccttattctattagctttattttctatttgtaaaatattttatttcatttattttttactttttaaacttctttgttaaaaacaaagatacacatacattagcctaggcctgcatagggttgggatcatcaatctcgctgtctcccacctccgcatcttgtcccactggaaggtcttcaggggcaatggcacacagggagctgtcatttcctaggataacaatgccttcctctggaatccctcctgaaggacctgcctgaggctcttttacagttaactttgttttcaaaaaatatatatcagtagaaggagtacatgctaaaataacagt

SEQ ID NO: 644451 - DNA, 174 bp, Homo sapiens
cgacaggaagatggctggtgttgtttgagctcaggagtggggctggtctatcagcatcctgcttatccttgcactgcagctcctcgctgtgtttgagacagctgcatgcctcagcagagacagatgcctggggatccacttcttgccatggacgtgggctgcgggctagtcggg

SEQ ID NO: 644452 - DNA, 231 bp, Homo sapiens
ctatccgtcttaaaagcaacgggttaaaaaatccaagttgtgtttttggtggtgcaataattataaatgtgccagtcaatgccaaccagtgtctgataggcttcctgtgcatgtccaatttcctctgtgacacggtgtggtgccagagcttctgaatcttcttgaatcgctcttggcataaatgtaaaggatttccccgtctgagtccctggtcggtctccccatagtcat

SEQ ID NO: 644453 - DNA, 249 bp, Homo sapiens
tgcgacttttactacagagacaacctatataaccttgcgtctgggaaaacccggtgtcatcttctttacagcaggaaaaccgattgttgatttttcttgggagaaaaacacgcgatgaatgtttttatgcattagtatacctctctacctgttctcgcaccgagactagaggtttatacaatcgactctagagcccagaagacagacacagaggctagctaccggccatggtttccacagagaccagga

SEQ ID NO: 644454 - DNA, 175 bp, Homo sapiens
gcctcattgtacccattctaatcgcaatggcattcctaatgcttaccgaacgaaaaatttctaggctatatacaactacgcaaaggcccccaaacgttgtaggcccctacgggcctactacaaccctttggtgacgccataaaaactctttcacacaagagcgcctaaaacccgc

SEQ ID NO: 644455 - DNA, 146 bp, Homo sapiens
cacgaggggaattatccaccatttttagacattatcaggtggggtggtcatcttgtgacgaaagatgcatcatccagcatataccatatgtagtttatttacaatggaacctctttctgtgacgtcaaatactctcgtgacagcgt

SEQ ID NO: 644456 - DNA, 269 bp, Homo sapiens
aagagacacgcacgaatggtggcatgcccagcctcacactatgcactgtgactcctcctcaccgagacatatactcggcaccctctgagcttggatacaactccaggcatgtgaccttggaatggtctcaggcccgtgagataataccagaaccaccctcacacaggtaactgtggcccaacaggtaatacccaaagacagcgacatgtataataactcaacatgagtcagctataactgtgagcagacaatggtgatacagcgaccca

SEQ ID NO: 644457 - DNA, 325 bp, Homo sapiens
cgccttcatcatagttaatattctaatcatttatggaattaatttggaggtactatattatgaccaaatatggaaatgcttgattcttactgccagaagaaatagaatagagaataaagtttgagaagatctgaaaaatcatttatgtcttgggttcattttttttaagtaggtgtacataacatctgacagttaaaaggtaagattagacctaggcattttagtttttatgtgcattgtaataactaatagaaaactgatagaaatatagatgtgtaatatttggtaactctctctttaccagtttgtcactcaagccctatca

SEQ ID NO: 644458 - DNA, 648 bp, Homo sapiens
  misc_feature (10)..(10): n is a, c, g, or t
  misc_feature (66)..(66): n is a, c, g, or t
  misc_feature (73)..(73): n is a, c, g, or t
  misc_feature (102)..(102): n is a, c, g, or t
  misc_feature (107)..(107): n is a, c, g, or t
  misc_feature (165)..(165): n is a, c, g, or t
  misc_feature (170)..(170): n is a, c, g, or t
  misc_feature (181)..(181): n is a, c, g, or t
  misc_feature (232)..(232): n is a, c, g, or t
  misc_feature (262)..(262): n is a, c, g, or t
  misc_feature (267)..(267): n is a, c, g, or t
  misc_feature (344)..(344): n is a, c, g, or t
  misc_feature (405)..(405): n is a, c, g, or t
  misc_feature (426)..(426): n is a, c, g, or t
  misc_feature (460)..(460): n is a, c, g, or t
  misc_feature (504)..(504): n is a, c, g, or t
  misc_feature (508)..(509): n is a, c, g, or t
  misc_feature (530)..(530): n is a, c, g, or t
  misc_feature (547)..(547): n is a, c, g, or t
  misc_feature (555)..(555): n is a, c, g, or t
  misc_feature (564)..(564): n is a, c, g, or t
  misc_feature (579)..(579): n is a, c, g, or t
  misc_feature (639)..(639): n is a, c, g, or t
aaatattagntggtttgagtttcttaaatctggcaccagatcatgaatttgaaagtgttaatgttnaagtgtngatgtaaaaatgtctattaacaaaactgnttaanactgtttgagaatcaggacaaaataattgttttttttttacagatacttttctgaatnaattntctacagactntctcccattaagaattagttgggtggattgatgaggcaaaaaataaattcnttttaaaaaacaaaactggagtttatttanaaaanatgcaaagggagaattttaagcaggtgttactgcagaactgctcagaagtgaataaagctgagtgaaagaatatacntttacttctacaaatataggtccttcctccagactttctggaagaaatacattttcagggngtggactataaaatggcatanaatgtagagatagaaaaaaagaagtttgcaaatnttttatatttccagctgttgagatagtatttttgagggttgttnttanntctagcggcgaaaacagagcnagctattaagcagccanaaagctanatttattgnatacatgatcatttnctcttttagcacgctctttgttcttctctttcagaagttgtagatgtatatttagtttgnttatatgta

SEQ ID NO: 644459 - DNA, 372 bp, Homo sapiens
gcgggagctgggtgtaggaagaaatagttacaagtagttgtgagaaaaacagttccggtacaatactgacatctaagggactatgtctacctccaagtgcacataataagttgattattacctaccaaaagccgcgttccatttttcctgaagctttctgttacagcaataaatagttatgtagtattacacaaagtagatcttaacaactgtaggaagtggcaagtggtggttggggggaatcctacgctctcattagctttctgtcaccaattaaagaaggagcagccatgtgtagctgggtaacacaaggtcaactgcagtcacctccatcactgtggaatgtgctacgtagttaataactagtaaaag

SEQ ID NO: 644460 - DNA, 256 bp, Homo sapiens
tcctctagagggatatgaagcaccgccaggccctttgagttttaagctgtggctcgtagtgtactggcgagcagttttgatgatttaacagatgagaacaagcactgagcatagcgcaaacatctaatcaccagacttggactcttagctatcgtgagctcagatatgttaaatcaacaaaactgctcgccagaccattacgagccacagttaaaaactcaaaggacctggcggggctcaatatccccctagagga

SEQ ID NO: 644461 - DNA, 615 bp, Homo sapiens
  misc_feature (45)..(45): n is a, c, g, or t
  misc_feature (97)..(97): n is a, c, g, or t
  misc_feature (106)..(107): n is a, c, g, or t
  misc_feature (110)..(110): n is a, c, g, or t
  misc_feature (112)..(114): n is a, c, g, or t
  misc_feature (147)..(147): n is a, c, g, or t
  misc_feature (149)..(149): n is a, c, g, or t
  misc_feature (231)..(231): n is a, c, g, or t
  misc_feature (240)..(240): n is a, c, g, or t
  misc_feature (247)..(247): n is a, c, g, or t
  misc_feature (253)..(254): n is a, c, g, or t
  misc_feature (256)..(256): n is a, c, g, or t
  misc_feature (260)..(260): n is a, c, g, or t
  misc_feature (264)..(265): n is a, c, g, or t
  misc_feature (267)..(267): n is a, c, g, or t
  misc_feature (312)..(312): n is a, c, g, or t
  misc_feature (314)..(314): n is a, c, g, or t
  misc_feature (353)..(353): n is a, c, g, or t
  misc_feature (407)..(407): n is a, c, g, or t
  misc_feature (552)..(552): n is a, c, g, or t
  misc_feature (602)..(602): n is a, c, g, or t
atcagattaaatgttttaactaattgctccactagtcaaaatatncatttccttttatgagagaggcctttaaaaactgcccccttttctgaatggnagggatatnngantnnncttctgggcaaataatctcagtatgacaagatntntctgtattattcaatttcccgagcgtccaaattttagtatcattctaatatctttccatcatgaaaccaagaaccagaatanggtggtgtntttcggnaggggnngncgcntctnntntggggggtgcgaaagctataacccttctttacctaactatccacnantgcgagacagacatgtgtgggttatccctgagttttgtntctcactcctgagcaaaatgaactacaatatggctgtattaggcctcctttgtnttcaaaaagattcacaaaattttgtgaatattattttaaattatagtaattgcttctgggaccaaaaggacattaactttttaatgtgacaaaaatgcaccattacaatctgctacagttcatcgataagcatgatatacttgcntctgatttgttacatgtttattaactacaaaatttaaagagaagattacntggacagacattc

SEQ ID NO: 644462 - DNA, 185 bp, Homo sapiens
aggcatgcagcttgggttgctgcagagctctccactaaaaagtaacaggagaatagacacgtgccaaaaaaaaaaaaaaggtataattggggtttcaaaattaaaaggggcaggggggtctccccgggtccgaatcccccggttttaaaagaaaaggggtctaataatccaaaatttcccccttt

SEQ ID NO: 644463 - DNA, 174 bp, Homo sapiens
ttgcctattcgtacttatctctccattcaaaatggactagctgtgaggaaatctttactagtatagagcatgccattgtcttcaatccttgatcttagatccacgggaaatatcatcgatgactccatccctgtacatctatagtctgatggagtagagatccaatcttccggg

SEQ ID NO: 644464 - DNA, 808 bp, Homo sapiens
gtatgtttattttttaagtctcagtttaaattacctagctgtctactgcttctgtgttgtctttttcctattaaaacgtcttcctttatttttcgttaagagaaagtggaacatttaggttaaatgtcttgaaattttaccacttaacaacattacgatgctcttaaaatatatccagtcagaactgtattttgaaagatccccttgcaaatgatgatatcagggttaaagattgacgtgtgtatggtttctgaagtttgcgtcctgaaaactatgtttgagcactgaaaggttacaaatgcctaataggcatttgagactgagcaaggctattgtgttatcgtcatgaaatgcggtgtggccgagttatttgaatagaaaatattttaaagtatcaaaagcagatcttagtttaagggagtttggaaaaggaattatatttctctttttcctgattctgtaactcaagcaagtcttgatggagttaaaataatctgcttttattctggtgagccgtgctagctaatataagtatggaccaggtaatagttgtcatctttactattagttaaatgacttagatattatgaggattacacactaattttatacgggttgtactttaattgggggacctaaattgataggggggtggaaatggaaaaaatgaagacagcggcagtttttgtgtgatttaaaatttttttgggtcatatgggcgaaaacctgggggtttaacgggaccaattggccaatattttaggtgaaagaatgttggggccaaaacatgaaatttggagcgaatggg

SEQ ID NO: 644465 - DNA, 87 bp, Homo sapiens
cggcacgaggggaaatggaaaacattgcagtttggtcttaatttccacatgaatatcaagtgtaatttttaataaattatttggaga

SEQ ID NO: 644466 - DNA, 1602 bp, Homo sapiens
  misc_feature (1152)..(1152): n is a, c, g, or t
  misc_feature (1163)..(1163): n is a, c, g, or t
cgtgcttttgtgtgagtgttgtccgcaccaggcggtgttgcttctccggcgggtgtagattctcccccgccagcgtgttggtttagtgataagagacgtgtggtgttattttcttccccctctacagagtgttggccgccccagcggttgtggcccccctttcttaccgagggcttcctcttctggggagttgtgggaaccccctcctgtgcgcccctcttctctttgagggggttctgtttatcacaaacagcgggggcggcggcccacacatcgctcctaccagggtggcccgagtacttttgtgtttggggcccactaatatcccaccaccaacggagaattttttgtgctccttcgacagcagtttgttttgcgcccagcttttttgctgttgcgtcctgctttgtttgcgagtcactagagtctcccctgcggccacaccgagagtttgttgttcttccctcgtgcggaaatttctcttcgccgaacgagaggtgttgatagccccccccttctcaacacgccttttatttgggggagaaaataatacgcccccctctggggggtgttggttggtgggccacgagaaatgtaaaacacgaccggcggggtgccgccaccggggattttgtgagtgaggaggcccccacccctcttcaacggagagttgtgggcgcttgtgttccttataagttgggctgttcccccccttttttctttcggcccccccacaatgacacggtcacgtcgacataccccgctctagtgtcactagcgtgtctctcccctctgctgtgggccttcggggggacacccaacgacttcgggtgctcaaaagagtgaatttgggagacaccctcggggcctcagaactcggccacaaaggctctgatatagagtctctcacaccacacactctgggcgccacacacacacaggcgttattttctcgagacacacccgcgtgtgagactcgttgtctctctctccacacggattggagtttcccctctctctgtgtgtctcttctctgagagaggcccacacagcgagtttggtctcacaggccacatcgtatatataggggagttttctctccaccgcagagaggggcacaaaacacacctcttaaacacacgcgctatagantcgtgtgtggnggagacactgatcacttcacacacgcgccccctcgtgggctgttcacaggccgctatacaccgcgctatatctcgggctctgtgtgggctggcccacacacagggcgcccacagcacttcacaagaattctgggagattttatagagaggggagaaagaatccacattgtatagagatgagaacttgagaagcacacagagaagttatatcacagtatccaccgcacgcacaaggcacagagaaccacccccacgtgcacacctcccctcggcctcggtttcgctgagtggccacgaactctcgtttgctcggctaacaccggagcacacacctcggtggcgaagtgtggcacaggtgagccacattggcacacacacgcctagaaagtttatcggcacgagctttaccaaataaaaaaaaaactggcttttttgacca

SEQ ID NO: 644467 - DNA, 214 bp, Homo sapiens
ccctacgtttgttattgcactatcttatcttgcttctaaatctcatggcttctcaccatttacaaatgcctccctaacccactcattcagtgagacactgaattcttgctaaaaaggggatacttcagttagaatgtatatggtgagtttgagagtttggaactcaggtttagatgtaaacattgccctcctgactgctctctagtccagtgat

SEQ ID NO: 644468 - DNA, 406 bp, Homo sapiens
atggactgaaataggctctgttacatggtgcattactagattagtgcctatatatatcatatttatatcatatttgaaaaccaaaacaaacataaagttgcaagtttacagagtgtgtgacttgactagtattcatgattaggcacaaaagcatgtgctccataaccttgtattggtttaaaccttaaaagcaaaaacaacttgatagtctattaaaaaagaaaaatcccaagtagatcttagaagttaacatctgacaaggttttgacctttagtattgtcagatatttgattgaacgtcagtcctttagaaagatacattcattagaatattttagtaatgtctgtgtgtatgtgtctctctctctctctctctctctatctctctctctctctctactctcta

SEQ ID NO: 644469 - DNA, 475 bp, Homo sapiens
tgggggctcaaagtgtttttattctgccccagcaaaaaagtgcaatgctgaaaaggggaaacttctgtgctgattatgctgaaaaaggcaaaaccccttgttggtggaaaggcggcgtgggccactcaccttggcaagaaaacaaaagtgtgctggtgaagcaggaaagtacatagcactccgtgtacttccataccgcctcaagtgcatctctgcaagcttatcccaagtgtgctgcctcatctgatctcaccacaggaatcacagcacacattctcagatacaggaaaaggaggtcaggggctggggttcaaagtctccccacagcagttaggtgggggtcaaagatgtgcaagtgagcattgtctcttcttccgtgcccccagattgatgggcccttaccaaggccaaggaaagcttaaggtgggtcatcaatcccgtggctttccttaacacatcagcaggcgtgcaacag

SEQ ID NO: 644470 - DNA, 222 bp, Homo sapiens
cactcgtggtcacagattgacgcatgtatacgcattgtggagcgggattgctcagctgaagccgcggctctaaagccggctgcagagccagatgagcgggcagccgccttgtggaacagagccacgtggtgctcagcaccaagcaccagcacgaattcccttagcaccagcacgaattcccttagcaccagcacgaattccagcaccagcacgaattccctt

SEQ ID NO: 644471 - DNA, 810 bp, Homo sapiens
  misc_feature (516)..(516): n is a, c, g, or t
attttattttttatttatttatttttgagatggagtcttgctttgtcgcccaggctgagtgcagtgggtgatctcagctcactgcaacctccacctcccgggttcacgccattctcctgcctcagcctcctgagtagctgggactacaggcacctgccacacgcctggtaacttttttttatatttgagtagaaatggggtttcaccatgttagccaggatggtctcaatctcctgaccttgtgatccgcctgcttggctcccaaagtgctgggattacaggcgtgagcccattgcgcctggcagaccattttagaatgtgggaaattttagtggagaaaaaatgcagtgtaaatatgcttagtttaattcagtgtgggatgcaaaaaactacctagcgaaaatttgggaggaaaaaactttaatttttatttaacctttttccctttccaagggaaaaggaaaaaattttttaatttctgtttggggggacaccacccaaataattttttctccnttttgaaaccatcgtctgtgtgcgggtggggggcgttctttcccccccacaacaggttttttttttttctctccccccccgcccccgaacaaaaacaatttttttttggtcgggagggcgcggcggggcggcggccccccccctttttttttaatcacaaacaccacgctttttttttctcatcacaggcatcaccagcgatattaatcatatctatcctagaggttatcatatgcttatgcattcactacatcgctctctcatcctcgtatatcttccccccaccacacacca

SEQ ID NO: 644472 - DNA, 1797 bp, Homo sapiens
tctggtttgctacttttgttgttgttttggttcttcatcacatatatataattacaacaaaacacgagagattgacctagaatgctttatcttcggcgtgttatgtctgcttatcgattgctgtgttctagacgattgcgtctggtgagttacccttgctcgcgtcggtgacctccctcaattcatccttgtgtgtctgttagtttctttcgagttgtctacgttgttggtctcttcgtattggtatgttcgctgttgtcgcgacttatcatggattcgctgctgtctttctcttatttacgttcatgtgtttcgcctgtgtctgcggcgcgttgtatcgttcttcctctgtgtatgtgtatctctatttgtcggctgtctgtccgtggtgctctgccgtcggcccgttctgcttcggttcctcgtgtgtccctctgtttgctctttatgtctttccgttgtgtggttccctcgtttggtctctctcgtcttacttttcctctgttgcggttgctctgtgtctcttctgttgcctcgtgtcgcttcttgtctgtgtgtgctccgcggtgctgtgtgctgttctttgttgtcttagtgcgtgccccatctgcttttgttcgccctctcctctctcgtgcggtcgtgtctgtttctgtgtgttactgttcccatctgtgctgtttccgctctgcatttgctggttctcttctggtctttgttgcgttttgcttcctgctgctttgctccccctctcgtgtcttgtctctttgtgtgtcttcatcttggctctcgtatcttcccttcaatgagtggatatggtcctcggaccctttttgtgatgcttcgttgctcctcccgtgtctttgtcatgcttctgtcgtcttactgtggtgctttgcgttcattgtattggcgggtgtctaagttgtctccctgtttctgagttcttcgggtcccctgtgcgttctccattcatgggttgtgttctgttgccgaccgcatgtggattcggtgttccctcctgtgtttgtgtctgccccttttgttccctcttcttatgtgtctcttctccctgcttcgtgtgatctttctgggcgtccttccctttgtttgtccccgtttagttgccttgcggctccatgtctcttctgtttggtgcatcttcgcgcgtggccttcgcatcttccgcctgctgtcccctgatcgtcttgtgttgggtttttggtctgatgacgattgggcattgggcatggcagggttgcttgctatcgcctgcccggtgcgtggtcccccctttttggcccccgagatctccctcgggcatccgcgcggcttcaggtggacccatcttgcaatggcaccctgcatgttgtggtccattactggcctctgctctggctctgaggtctcgctgatgctgcgtgcttgtggttctatccccatctgcccatggatcggtggccatggccaggtgggctgggcagcatcagtcaaggagtgctggtctgggtgctctatcagtgtgcccctccatcctggccctatcatgtgtacccccgtcccaggctggccagcacccacagcccacgtctctgtcagtagcctgcctgcactcgcccagccgcatgccaccctcgtgccagtcgcgctgcctgatgtggtgtcgcgccttctcccccccggggctgggttggcgcaccctcccctcccgtctactcattccccggggtgtttcattgccgagttttgaatgtgatttaaagaaaccaagggactatgcttattttttgctttcct

SEQ ID NO: 644473 - DNA, 206 bp, Homo sapiens
  misc_feature (162)..(162): n is a, c, g, or t
agaggccgagtgtggaggtagtggtgatgtgcttggagctcagtgctccttaggaggtctaggacccacctcgaatcttctgggctatgcgagccaggaagagaggcaggtgccttggtgggtggcattagatgctccagccctgcctggaactaccttggnggtcgggccacagccaagaagagtgctgttttgcctgtgctaag

SEQ ID NO: 644474 - DNA, 366 bp, Homo sapiens
tactaccaagggaaacttcttagctgaatttagtgttatttaattttatacttttaagctgagtttgaaaatacacctgagataatagggacaggcaggatggttaaggacatttttcaatacagtagctcagtcagcagctctgtctgaccttgggcatatttaccttttttgttcctgcagatgtttatctcacgtaggtcataattaactgtccatagtcagtaattacacttattttttcccataagatataagaattaagtttagcctaataataaagtaagaatgaagatcaacctaccagttgctctagtcttcctgagtgactcgtttcattctaagaaacctgatactgtgtcgacg

SEQ ID NO: 644475 - DNA, 625 bp, Homo sapiens
gcatttaagatgaggcttctgctgcttctcctagtggcggcgtctgcggatggtccggagcgaggcctcggccaaatctgggcggtgtgccaggcaagagattaaacgatgcagtacgccacggggccgctgctcaagtcccagatttgtgtccctgaggtaatagcgcgggtgtttcgacggagtacatggcggggttattaagccaggcggtacccagacatccgcattgaaggagagaattacctccctcaacaatatataggaccacatagcatctttccgtgtcagtcttcaaaagctagtatcacctaggcttaactactgtgtgggcaaggatccttttgctttcttgtgcattgcaagctcctagcatcttggcagttggggcccaagaaaaatcaagcgttaatgcatggtatagactgggttcctttctgtgaggcaacattgacttggagaacccagctgtactgtccaaccaggtttccattttgagactacacttttacattgactgtaccctgtgtggtcctacaagctggaatctggtccacctttccatccatgccaaaaattgggttcaattcctggaccatgagtgacctccatgggcctttggtcc

SEQ ID NO: 644476 - DNA, 323 bp, Homo sapiens
  misc_feature (196)..(196): n is a, c, g, or t
  misc_feature (199)..(199): n is a, c, g, or t
  misc_feature (230)..(230): n is a, c, g, or t
agtgttgggatacaaggtgtgagccactgtgcaggacaaatttttgtgttattgaaaaaaaatgtttaagagctacagtcgtgacacacaaatttaatgtgcaatcaatattttgtccatcactatgaagtctagacaatcagcaaaaattaagcattgatttatatacagcatttgtcaatttccacgatgtaantancagttgggccaggcatggtggctcacacctngtaatcctagcactttgggaggccgaggcaggcagatcacaaggtcaggggttcgagaccagcctgaccaatatggtgaaacctcgcttctac

SEQ ID NO: 644477 - DNA, 1447 bp, Homo sapiens
  misc_feature (775)..(775): n is a, c, g, or t
  misc_feature (786)..(786): n is a, c, g, or t
ggatggcggcagagggggaccagctcagcctgcctccccaagggacctcagacggccctgaggacacgccccgggagagcacggagcaaggccaggacacagaggtgaaagccagcgatcctcacagcatgccagagctgcccaggacagccaaacaaccccgcagtcccgccccccaggtaagaaagatggatctctcgacaacatggcctcgatccttcccagcgtcccttagagaacgcatgagcgtctgcacgacaggctgatggcctttgtgagacacgcgcacgccgggtccaccgcaagagagggccaaagctcctgcattctcaggctgggacatcagcacaccatccatgctcccaggcccactgcctcgattcctcgagagctcatccaggagttccaagggctcacctggcctcacctctcaagacagcttgggggtgtcatgtcaattggccaccgaccaggactcctactccacccagcagcacggcaggaggagctggagcagttcagcagccccagcgtgaagaatgaagccctcctatgatcctgggcaaggcgtcggcaccggctgagctttgccagtttcaggcagcagtgttccacgctttcctctccaacaatcgcaagctgtacaagaaggtggtggagctggcgcaggacaagggctcgtactttggccagcctggtgcaggactacaaggtgtacagcctggagatgatggcgcgccagacctccagcacggagatgctgcaggagattcgnaccatgatganccagctcaagagctacctgctgcagagcaccgagctcaaggccctggtggaccccgccctgcactctgaggaggcagctcgaagcaattgtagagtctgccttgtacaaatgtgtcctgaagccccttgaaggaagccaatcaaactcaattgccctgtgcaattcaaggaattccaacgcaggcaagggattgggttccggtttgcaaggaagcttcagggaagaaaccaagtaagggatccttgggccacaacaaccattgacctaggtgtgaccaccagcgtgccggaggtgcccatgatggagaagatcctgcaagaagttcaccagcatgcacaaggcctactcacctgagaagaagatctccatcctgctcaagacctgcaaactcatctacgactccatggccctcggaacccaggaagccctatggggcggatgacttcctgcctgtgctcatgtatgtgcttggcccgcagcaaactcacggagatgcttctcaatgtggagtacatgatggagctcatggaccccgccctgcagctgggggagggttcctactatctgaccaccactacggggccctggagcacatcaagagctacgacaagatcacggtgaaccggcagtgagtgtggaggtgcaggatccatcacgtgg

SEQ ID NO: 644478 - DNA, 639 bp, Homo sapiens
ccatgctgttctttcacgatggaactcgggaagaagcagatcaagtataggaaccagttggctcggctggtctcatcgggaacaggtggctctgtatgtgtacctggcacgacgtatcctaggattacccctacgttggtggactcaatttgtgaaaatgccaggcgctacgcgaagctctttgctgatgccgtacaacagctgctgcctcagtacaaagagagggaagtggattcataaagatttcctgtacgtttatattgaccatcggctaatgatcgagcagcggagtcgtgactctgagatgcctcgaagcccccagaaccagtaccctgctgaactcatgcgcagatttgagccgtattttcaaggccctagcagcagcaagcctcgtgtgatccgggaagtgcgggctgactctgtggggaagttggtaactgtgcgtggaatcgtcactcgtgtctctgaagtcaaacccaagatggtggtggccacttacacttgtgaccagtgtggggcagagacctaccagccgatccagtctcccactttcatgcctctgatcatgtgcccaagccaggagtgccaaaccaaccgctcaggagggcggctgtatctgcagacacggggcccagattc

SEQ ID NO: 644479 - DNA, 268 bp, Homo sapiens
ctgtcatgctgccccagtgagatagtgagtggtcaccaggcttgcaaatgaacttcaggtgttcgagaccagccaggccaacatggtgaaaccccgtctctactaaaaatacaaaaaaaaatgagccgggcatggtagcaggtgtctgttatcccagttaggaggctgaggcaagagaatctcttgaacctgagaggcggaggttgcagtgagccaagatcgcgccattgcactccagcctgggggacaagagtgagacttagtctca

SEQ ID NO: 644480 - DNA, 138 bp, Homo sapiens
  misc_feature (100)..(101): n is a, c, g, or t
gggggtggccctggaggtcctggagcagaagctaggttcccgcagagctccgctgcacgccgctggcgatcgggctgggtcccattttccacgaaaaagnntgcttcggccgcggaggtgctggagcctttgcgctca

SEQ ID NO: 644481 - DNA, 151 bp, Homo sapiens
gcactgtctgtcatagccatatacggtcgcgtgtgcgctgtaggctctacgcctatacgtgctaccaaacggtgtccagctttgacatcaccctgtgatcgccgtcagcggtgtcatttggcacataagttggcggtgtacccatagccat

SEQ ID NO: 644482 - DNA, 911 bp, Homo sapiens
  misc_feature (7)..(7): n is a, c, g, or t
  misc_feature (118)..(118): n is a, c, g, or t
  misc_feature (135)..(136): n is a, c, g, or t
  misc_feature (139)..(139): n is a, c, g, or t
  misc_feature (141)..(141): n is a, c, g, or t
  misc_feature (147)..(147): n is a, c, g, or t
  misc_feature (151)..(151): n is a, c, g, or t
  misc_feature (153)..(155): n is a, c, g, or t
  misc_feature (168)..(169): n is a, c, g, or t
  misc_feature (174)..(174): n is a, c, g, or t
  misc_feature (176)..(176): n is a, c, g, or t
  misc_feature (182)..(182): n is a, c, g, or t
  misc_feature (200)..(200): n is a, c, g, or t
  misc_feature (202)..(202): n is a, c, g, or t
  misc_feature (209)..(209): n is a, c, g, or t
  misc_feature (217)..(217): n is a, c, g, or t
  misc_feature (219)..(219): n is a, c, g, or t
  misc_feature (223)..(223): n is a, c, g, or t
  misc_feature (229)..(230): n is a, c, g, or t
  misc_feature (232)..(232): n is a, c, g, or t
  misc_feature (234)..(235): n is a, c, g, or t
  misc_feature (242)..(242): n is a, c, g, or t
  misc_feature (251)..(251): n is a, c, g, or t
  misc_feature (255)..(255): n is a, c, g, or t
  misc_feature (259)..(260): n is a, c, g, or t
  misc_feature (266)..(266): n is a, c, g, or t
  misc_feature (270)..(270): n is a, c, g, or t
  misc_feature (277)..(277): n is a, c, g, or t
  misc_feature (279)..(279): n is a, c, g, or t
  misc_feature (289)..(289): n is a, c, g, or t
  misc_feature (291)..(296): n is a, c, g, or t
  misc_feature (306)..(306): n is a, c, g, or t
  misc_feature (310)..(310): n is a, c, g, or t
  misc_feature (316)..(316): n is a, c, g, or t
  misc_feature (330)..(330): n is a, c, g, or t
  misc_feature (344)..(344): n is a, c, g, or t
  misc_feature (363)..(363): n is a, c, g, or t
  misc_feature (375)..(375): n is a, c, g, or t
  misc_feature (386)..(387): n is a, c, g, or t
  misc_feature (391)..(392): n is a, c, g, or t
  misc_feature (396)..(396): n is a, c, g, or t
  misc_feature (407)..(407): n is a, c, g, or t
  misc_feature (409)..(409): n is a, c, g, or t
  misc_feature (414)..(414): n is a, c, g, or t
  misc_feature (423)..(423): n is a, c, g, or t
  misc_feature (430)..(430): n is a, c, g, or t
  misc_feature (435)..(436): n is a, c, g, or t
  misc_feature (444)..(445): n is a, c, g, or t
  misc_feature (450)..(452): n is a, c, g, or t
  misc_feature (456)..(456): n is a, c, g, or t
  misc_feature (458)..(458): n is a, c, g, or t
  misc_feature (464)..(464): n is a, c, g, or t
  misc_feature (473)..(473): n is a, c, g, or t
  misc_feature (475)..(476): n is a, c, g, or t
  misc_feature (516)..(516): n is a, c, g, or t
  misc_feature (779)..(779): n is a, c, g, or t
  misc_feature (789)..(789): n is a, c, g, or t
  misc_feature (837)..(838): n is a, c, g, or t
  misc_feature (843)..(844): n is a, c, g, or t
  misc_feature (875)..(875): n is a, c, g, or t
  misc_feature (886)..(886): n is a, c, g, or t
  misc_feature (897)..(897): n is a, c, g, or t
  misc_feature (907)..(907): n is a, c, g, or t
ggggtgnccctgctgctcctcagaatcctggtgccttgaagttctctgtgcatctgtccatcctccctatggccctggccagagctcagcatgggcaggggttctgggtaggacggtnactgtctttctcctggnntgntnttcccngccntnnnccctgccccaggnngcccncngcctcncctgctgctgcccctatngntctgagnagccatgncntgcngggccnngngnnactgtcnttcccctcntccncccnngccccngccngcgctcntnccctgtcctntnnnnnnaacccaaagngaanagaggnaaggcctcctgtcnacagcagcttcctnagtttccaactgccttagnaggcccctgctngtgctaagggnnggcnncttnatgggcatgtncntgctngagcggtanggtttgntcccnnctctgctnngtttnnncagntnagggtntagccctgntnngaacagaaaagtgtgtagaccttcttcctgctagggctgnactgtcctgggtgttgggcccttctggtggacaaggctgtgccaaccctgtacagaatcgagtgctgtagcctggccagaccccagagcccttgtgccatctttcttcctggccagagtgatggggttccagccatggggaagcaacccaatcctctgtctccttgctccaatggaggcagaagagcccaggacccaagcgtcttggcaggggtgctgtgaatgtccagtggtcccagctccccaacctggccctgccccagnctgtgtagcntcgttcctgcatgtggatgctgcatgtctggtctggggcttggatgtnngcacnngcacccagctgccgtgtcaccttctggtagnaataaagaacntcttaatgccncaaaaaaaanaaca

SEQ ID NO: 644483 - DNA, 914 bp, Homo sapiens
  misc_feature (7)..(7): n is a, c, g, or t
  misc_feature (118)..(118): n is a, c, g, or t
  misc_feature (135)..(136): n is a, c, g, or t
  misc_feature (139)..(139): n is a, c, g, or t
  misc_feature (141)..(141): n is a, c, g, or t
  misc_feature (147)..(147): n is a, c, g, or t
  misc_feature (151)..(151): n is a, c, g, or t
  misc_feature (153)..(155): n is a, c, g, or t
  misc_feature (168)..(169): n is a, c, g, or t
  misc_feature (174)..(174): n is a, c, g, or t
  misc_feature (176)..(176): n is a, c, g, or t
  misc_feature (182)..(182): n is a, c, g, or t
  misc_feature (200)..(200): n is a, c, g, or t
  misc_feature (202)..(202): n is a, c, g, or t
  misc_feature (209)..(209): n is a, c, g, or t
  misc_feature (217)..(217): n is a, c, g, or t
  misc_feature (219)..(219): n is a, c, g, or t
  misc_feature (223)..(223): n is a, c, g, or t
  misc_feature (229)..(230): n is a, c, g, or t
  misc_feature (232)..(232): n is a, c, g, or t
  misc_feature (234)..(235): n is a, c, g, or t
  misc_feature (242)..(242): n is a, c, g, or t
  misc_feature (251)..(251): n is a, c, g, or t
  misc_feature (255)..(255): n is a, c, g, or t
  misc_feature (259)..(260): n is a, c, g, or t
  misc_feature (266)..(266): n is a, c, g, or t
  misc_feature (270)..(270): n is a, c, g, or t
  misc_feature (277)..(277): n is a, c, g, or t
  misc_feature (279)..(279): n is a, c, g, or t
  misc_feature (289)..(289): n is a, c, g, or t
  misc_feature (291)..(296): n is a, c, g, or t
  misc_feature (306)..(306): n is a, c, g, or t
  misc_feature (310)..(310): n is a, c, g, or t
  misc_feature (316)..(316): n is a, c, g, or t
  misc_feature (327)..(327): n is a, c, g, or t
  misc_feature (355)..(355): n is a, c, g, or t
  misc_feature (357)..(357): n is a, c, g, or t
  misc_feature (378)..(378): n is a, c, g, or t
  misc_feature (389)..(390): n is a, c, g, or t
  misc_feature (394)..(395): n is a, c, g, or t
  misc_feature (399)..(399): n is a, c, g, or t
  misc_feature (410)..(410): n is a, c, g, or t
  misc_feature (412)..(412): n is a, c, g, or t
  misc_feature (417)..(417): n is a, c, g, or t
  misc_feature (426)..(426): n is a, c, g, or t
  misc_feature (433)..(433): n is a, c, g, or t
  misc_feature (438)..(439): n is a, c, g, or t
  misc_feature (447)..(448): n is a, c, g, or t
  misc_feature (453)..(455): n is a, c, g, or t
  misc_feature (459)..(459): n is a, c, g, or t
  misc_feature (461)..(461): n is a, c, g, or t
  misc_feature (467)..(467): n is a, c, g, or t
  misc_feature (476)..(476): n is a, c, g, or t
  misc_feature (478)..(479): n is a, c, g, or t
  misc_feature (519)..(519): n is a, c, g, or t
  misc_feature (782)..(782): n is a, c, g, or t
  misc_feature (792)..(792): n is a, c, g, or t
  misc_feature (840)..(841): n is a, c, g, or t
  misc_feature (846)..(847): n is a, c, g, or t
  misc_feature (878)..(878): n is a, c, g, or t
  misc_feature (889)..(889): n is a, c, g, or t
  misc_feature (900)..(900): n is a, c, g, or t
  misc_feature (910)..(910): n is a, c, g, or t
ggggtgnccctgctgctcctcagaatcctggtgccttgaagttctctgtgcatctgtccatcctccctatggccctggccagagctcagcatgggcaggggttctgggtaggacggtnactgtctttctcctggnntgntnttcccngccntnnnccctgccccaggnngcccncngcctcncctgctgctgcccctatngntctgagnagccatgncntgcngggccnngngnnactgtcnttcccctcntccncccnngccccngccngcgctcntnccctgtcctntnnnnnnaacccaaagngaanagaggnaaggcctaacntgtatcccgaaacttcctcagtattcancntgccttcggcgaccactgctngtgctaagggnnggcnncttnatgggcatgtncntgctngagcggtanggtttgntcccnnctctgctnngtttnnncagntnagggtntagccctgntnngaacagaaaagtgtgtagaccttcttcctgctagggctgnactgtcctgggtgttgggcccttctggtggacaaggctgtgccaaccctgtacagaatcgagtgctgtagcctggccagaccccagagcccttgtgccatctttcttcctggccagagtgatggggttccagccatggggaagcaacccaatcctctgtctccttgctccaatggaggcagaagagcccaggacccaagcgtcttggcaggggtgctgtgaatgtccagtggtcccagctccccaacctggccctgccccagnctgtgtagcntcgttcctgcatgtggatgctgcatgtctggtctggggcttggatgtnngcacnngcacccagctgccgtgtcaccttctggtagnaataaagaacntcttaatgccncaaaaaaaanaaca

SEQ ID NO: 644484 - DNA, 267 bp, Homo sapiens
cgacgttcgagctcggacccctcctcagcagacgcagctcagaggtcggcagcccctgcccacgagctctagtcgtccctgcatggccttatgctggaacggctctggaatcttttccctttctttctgagttggctgtgtcggggtggtctttgggaagcactatcatccaagggtccctcactccgtggctctctctctgcccttccaggctgagcagcgtgttatgtcccgggtacactctctggagctgcgtctgctgaggag

SEQ ID NO: 644485 - DNA, 553 bp, Homo sapiens
  misc_feature (277)..(277): n is a, c, g, or t
  misc_feature (301)..(301): n is a, c, g, or t
  misc_feature (317)..(317): n is a, c, g, or t
  misc_feature (380)..(380): n is a, c, g, or t
  misc_feature (388)..(388): n is a, c, g, or t
  misc_feature (412)..(412): n is a, c, g, or t
  misc_feature (468)..(468): n is a, c, g, or t
  misc_feature (484)..(484): n is a, c, g, or t
  misc_feature (546)..(546): n is a, c, g, or t
tgaaactgggcccatctgtatacaggctcaaatttacgtttttaaaggaagaatctatgcagctgaggcttattgcaggaaatacttcatttgtatgtaaatattattgtaaataaataggaggctgtatatttttgaagttgttgatccgcactgaaatagaagtctctaggatctgcatataaacaataaatgtttcctagaaattagtggttttgtttgggaattagatttacattctctcccaggtaacatagttctctcaatgtaaacttgnaacctgaaaccctacttaatttanagaaagaaatgctganaaatagttcccttgattcttatgctgcattaagatcaattatttacagatagcctctgagatncaagtaangaatatttagacccaaatccttgnctatagaaacagattacccaaatgacaaatgttctcataatgacttcattttaacntgtccctaccagacantgcagaactgggagaagaatgtttttccaattgatgctgattctaacttggacttgaagcgngggactg

SEQ ID NO: 644486 - DNA, 103 bp, Homo sapiens
gtggggcagaggtggtgaagctggggatgctctgggggaactcagtgagctcccgcgcggtctctgtgccctcctccacctggtagtggcgggggggagagaa

SEQ ID NO: 644487 - DNA, 173 bp, Homo sapiens
  misc_feature (25)..(25): n is a, c, g, or t
  misc_feature (32)..(32): n is a, c, g, or t
  misc_feature (101)..(101): n is a, c, g, or t
  misc_feature (108)..(108): n is a, c, g, or t
  misc_feature (111)..(111): n is a, c, g, or t
gacatgatgacagaaccactaaaanaccctgnaaatcatcaccagaactagaagacaccgcaacaagctcaaagagacggcccagggtcacgtgcccaganagtatangtnaaggaggagctgttagcagttggcaagctcacacaaacctcaggggagagcacgcacaccga

SEQ ID NO: 644488 - DNA, 1117 bp, Homo sapiens
gagcgggaggggaagggagcgcacgccggtcggcgcggagtgccggctctgcgcttcgtggccgccccctcccgccaccccggtgtcgcacccgtgcagcttgacttcggctgtctccgcatgctcctcacagacggagacgcagctcactcaggctgcccggcggtatttgtttgggtcggctggcgtcagggattctgcagtggcctgtggtccggcgtcgtcctggccactggtgcagccccctgtggcaggcagagctcacgctcctgtaccccggctggtccggggtttgggcgccgctgtcaacggcggctccgccaggactgcgcagacctgggcccgtcaggccctattgccccgaagcggacttgcagttattgacgggcaccttgctttactttcttgcccggggctcacaagttggtagcggaggcctacgagccgcagtgttccaaagcaggctgtgggcaattcccccagaagcgtaattttcactgaagcaaggtggtagcataaatcttaccagctgataattattccacttggatacttagacctaatgcgtagggccaagaagcttggggacaaagctggacgatggttcccatacagactgcatgcataggaggcaataaggaagtgcgaaagccgcagtaatatacaccaagcgaatctacggaaaggaaaaggacataatggagacaaccagcaaatagtgcatggcatacaccttcacaaaagcagtgcactatctactgagggaaaaattcctgcataagtgatggtaccccatatggggaattaggactataccttggtagaaacccaggtaacgaaaagcgaaaaaacgtgtgggtaaattgcgttgtatgagcaagtacgagctttaactagcaacccagcacaagagtacccaaaggggtgggtactttaatttggaaaagcaacaatgctctcaggagaacaaacgcagcagatacagaaagatacgacgacaagaaaagacaagattagagaacgacaattccagcagaagaaaacacactgaaaagcgctcaccggcgacgtgtagcatacgacgaaccgcagcacctaagtgacaacgatgtaggca

SEQ ID NO: 644489 - DNA, 418 bp, Homo sapiens
ttatataatgtctcagcaattttgcttcatcagcaggagtgaatgggtgtggggatggtggcacagatagcctcgctacaaagtattgtgagtcaagggtctatattcatatgtgagcttgaaatgaagagtcagtgtaagtcaaggcagagaaactgttcaaaaagtcgtctcttgagttgctacgtgagaagatttcaagctataaaagtagagttatggcattgtgaactttacagactactgagtggtttacaacaatgctcccatatatgtaaagtgggagaacccttgtctataccaagacactttatgtttaaaccatctacttccaggttttctacttcaaagtaaatatttatataggttgaacatccctaatccaaaaatctgaaattctctaaaatctgaaactttc

SEQ ID NO: 644490 - DNA, 902 bp, Homo sapiens
  misc_feature (900)..(900): n is a, c, g, or t
gctaggaggtgtgggcctcgggtgaggggagacccagctcttagacctgggagcccagacagaggtggatctgcccaccttgcagctccaaggtagattcttcttgtggctccagatgctctggcgaatgcaggagggggaggctcttttctcctttgcaccccagcaatctggagtgcaagaccgtttgcgggagggggcttagtcggctgtttcgaagaggcagcctcccctcccttttatccatcaagccccctatttcctggtgggggcacagtgactgccaaggccagtaagcacctcacttaacccttctctccctgaggaggtgcatgctcctctcccagaggtgcctttggctgagagtggatccctggttcctagtagccctatagggaaacatttggaggttgggtgggtttggaaccctgtacaacctttaggtcctccctgttcagaccttccacgtgcaggcttttcttactttctccgcgggtgccctacagaggactcctgctgccttgtaccagttgggaaaaagcaaaattcagagcagttcctttttctgggtccctcgccttggccacatcggaggaaacgtcgactcgccagggctcccgggagaaatcccgaggtcagtccctcccattctggggcacccctggagcagctagctccctgcctagcggtggcaaactccagagccccaaggagcagaacggggattccctgtgcgcaggctcctggtgcagctcctgagcacaaaggccacaccctcacagaccaggcctggtgagagagccgggcttcttcagaagtactggatactgaggtgccaagcaaggaagaatattgaagagacactgtttttagttgcagcttttgaaacacgcaagaagntt

SEQ ID NO: 644491 - DNA, 719 bp, Homo sapiens
  misc_feature (257)..(257): n is a, c, g, or t
  misc_feature (694)..(696): n is a, c, g, or t
caccaccatgcccagctaattttgtatttttagtagagacagggtttcaccatatggtcaggctggtttcgaactcctgacctcgtgatctgcccgcctcggcctcccaaagtggtgggattacaggcgtgagccagcgcacccggcaacaataacatttaataggcatgtctcattctaatgatatataccttctacctagtgggcacttgtacatatttattttttattttatttattcattttttttgagacanagtctcactctgtcaccaagttggagtgcagtggcacaatctcagctcactgcaacctccgccttccaggttgaagtgattctccagcctcagcctcccgagtagctgggactccaggcacgtaccaccatacccagataatttttgcatttttagtagagacggggtttcaccatgttggctaggatggtctccatctcctgacctcgtgatccgcccaccttggcctcccaaagtgctgggattacaggcatgagccaccacagctggccgtaaatattttttgaatttgaatctgttttggaagccaaatatgttttggaagccaaacaattaagagaagtaaaattttaaccctagtaggtttcgcagattcatccccagatatgtttttgtttggcttgtgttattaacaaataaatgagtgtctttcaaannnaaacaaaaagggggggggggttg

SEQ ID NO: 644492 - DNA, 550 bp, Homo sapiens
gactcctagagtatcacaagctctggaaaaggggacgataggctcacttcgcaaggccgtgcctcgggtaagcataacacttgcaagggtgtgcaaggtccaacatcagtagtaagggggaagtctgcagtcctgaggtcagtgctgtgtttctcgttttctgctttgtcctgagatttcgttacaagtacacagtagatgaatttcctgtgaaactaatgaggcttaagcatcaagggaccctagttgcctgcgagggaccctaacaaagtgtgcacaaagctgttacactagcgcccttttgtaatgggcaaaagtcagctgttttgactgtagatctaaccttgtgcctttccacttaaactgtccttccatcagactttgcatcaggtggcactggcgtggatacagccagtgtgggctaaagataagctgagtagataaactaactttgcttcaatagggtttgcagtcacatttctctgtaagttactgagagccatccagtgtagaaagggcttccaggcataatcccctttttcaaagcctt

SEQ ID NO: 644493 - DNA, 265 bp, Homo sapiens
acaaggccacttgtaccagcagcgtgagtcagcaagatagcagaagcaggaagagagccggccagaagacacctaccctggccggaagacacgtacccctgaagatcgagaaacaggccatctgggtaccacatagcagttacatcagactgggacaattcctgtttacggaagactataaaaccctgccccctactcatttggtgacgccattttagccttagcctcctcacccaggcgctcattaaaacagcaggttgctcca

SEQ ID NO: 644494 - DNA, 477 bp, Homo sapiens
actgctttctggccaggtatggtggctcatgcctgtaatcccagcaatttggaaggctgaggtggggagatcacctgagcccaggagttcaagacctacctgggcaacacatcgagaccccctctctctacaaaaaagtaaaaaaattggctgagtgtgatggcatgcacctgtgggctcagctgctccggagcctgaggtgggaggattgcttgagctggggaggctgaggctgcagggagctgtgatcacgccactgcactccagcctgggcaacagagaccctatctcaaaacaaaaacctactgcttgcttaacatttataagcgaagccattgtggtggcacacacctgtagtcctagctgcttggggggttgaggtgggaagatggcttgagctcaggaggtcaaggatgcactgagccatgataaaacccccgaactacagcctgggcaatagagacacagtctccaaaa

SEQ ID NO: 644495 - DNA, 138 bp, Homo sapiens
gagcccatgagtggctagggaaaatgggaagagaattggcatggctggccatcattgtttgttgcttggatagatcatatagctaatgagtttagcaggggagctgttttttgaagatgatgaacctaaatgttgaag

SEQ ID NO: 644496 - DNA, 444 bp, Homo sapiens
cgaataggaggggtttgaaaagaagttgattaatgggtataaaaatatataatagaaggaataagatctagtgttcattatcacagaaagtgactacaacaatttgttgtatatatatatatatttaatttcaatagtttttagggaacaggtggtattttgttacatggataagttccttagtggtgatctctgaaattttggcgtacccatcatcaaagcagtttacccaatgtatagtcttttatctctcaccccctcccaccttccccctgagcccccaaagtccactgtttcattcttgtgcctttgcatcatcatagcttagctcccacttacgagtgagaacatgcaatgttttggttttccattcctgagttacttcatttagaataatggtctccaactccatccaggttgctatgaatgccattattttaattc

SEQ ID NO: 644497 - DNA, 300 bp, Homo sapiens
  misc_feature (4)..(4): n is a, c, g, or t
  misc_feature (12)..(12): n is a, c, g, or t
aaantgtggagngctaagtcccttgcagtggagagtgtgcatcctgggagcagtcagtgcttccccagctgttcctgggtaaggtgaagagacatctaactgggtagctgggcacaagctgagccttcctcagaggtgacagtggtctacagacattctggcttcctttgaggacaactgtcactttagcatgtagagtactcttaccgaccccatgtgaccttccagctctatgatgttccatgattgatttgctgttgacattcccatgtgaagagagatatatcacgctgctgacga

SEQ ID NO: 644498 - DNA, 108 bp, Homo sapiens
gtcattgacagtgaggtcccacccctcatctctcctggccatatagtttgtgccttgtcttgaagtggggttgctccccttgccaacctcacactgctatgtattgcc

SEQ ID NO: 644499 - DNA, 789 bp, Homo sapiens
tgcccatccatcctgtcacgtcgggctaggaggggccaagccgatgagccacccgggccacagttcctgtgcctgccttccccaccccagcagtggccgctccccatcccctccctctgtgcgtcccgtatgatgacaggttgtttactggggtggggtggcgatatggtgctgtgagcgcgtgctctcagagcataaaggacgttcagggcccaagttgggagaatgctgaccaaaggtgtagccagatatttcatgaggttcccggatgatgcatagactgggccacgaaagagacgggtctggcggcctgggtcactcgtgcactctcatccgtgtggtctggcctctgtctccacttcagctcccgtccatgtctggttttggagagcaggggctgtactgcgagcacctctagtggccagggcagtcgcgagatacctgtctgcttccactctgcgttttgcacctctcctggagctcgatgcctttactacacggctttgtgcgctgctccttgcggggcgcgggtcagctttcccagggccatgccagaggtggccatctatgctagggctgtggaagctgatcggctgtgccggcaagcatgtgatgctgctggtgcgtgtcgggttggggtcgcgcgtggtgtgcgagcgccttacgctgttctggcttggggccctttcccaggcacggtttcggccctgtccccttggcctgccgccccccttgtggtccaaggctccccgggatcttaggctcttctagccatttgtcctgccggta

SEQ ID NO: 644500 - DNA, 1168 bp, Homo sapiens
ctttagtgttaagctaaggcattgattcatgtatctgtccttataatgaattaataaactattttccaaaaaaaaaaaaaaaaaaaaaaaaaaaaaaaaaaaaaaaaaagaaaaaaaaaaaaaaaaaaaaaaaaaaaaaaaaaaaaaaaacaaaaaaaaaaaaaaagagaggggggcggcggaggcgacagaatacaccactacaagggagcgggcgcggcccgaaatcgacagcgagcacgtaccccaaagaagcaggagacaaaagagagaggaggcgcgcgacacaacaagagagggaggaagcagttcgtatataaacagaaccgcagagagagggggcgggggcgaaataacacaaaaaagagagaaagggggcgagaacaagaggcggcaaaaaggagaggaacaaacagcgagagagaaggagaggcgcctccaacaataaaaggcgggggggaggggaggaaaacaaaaagagagagggagacaacccaccacacaacaaaaagaaaaaaaactccaaccacgcccacgcagcagggaatcaaaaccaaacaaaaaaaaaaaaacaagagatgagacggcatgccagcgagagagagagaaacaaaacaagaagaaagaacaagacaataaaggaagcaagcaaaaacgcgaagaaacacaaaataaacaagaaagcagagacgagcgacaacgcgctgaggaataaacaaaaacgaacacagcaccgacacatccactaccactactcaccgacgcgagacgaggcacgcaccaagaggatagacaagagaacacaaaaccaaacgaaacatacgaaaaaccaaacagaaccagacatacaaaaaaacgaaagaaaaacgaagaacacagacacagacacagaaaccgagcaaccagaacccaacaaccaacacagccagagtaagcaaaagatgaaggagtaaaaagagaggaacagagagagaaagcagcagaagacgcgcaaccaaggacacaagcaagataaaagcgggagaaggaagaaccaagaagaaagaacagaaagagaataagaagacaccgcaacggaaaggaagcaccagaagagagcacatacaaacgacaagagagacacaacaacacaaacgacaaacagcaaacaacacaaaaaaacacaaaa

SEQ ID NO: 644501 - DNA, 334 bp, Homo sapiens
  misc_feature (23)..(23): n is a, c, g, or t
  misc_feature (60)..(60): n is a, c, g, or t
  misc_feature (76)..(76): n is a, c, g, or t
tgtggtggtcctcccatcccacnatcccaggatccacccatggatatggtgtgtggtctncttggtgacctttcanacctgaaattgtgtagatggggtatggtggtctccatccaccatcccaggatcaccatggatatggtgtgtggtctcttggtgacctttcatacctgaaattgtgtagatggggtatggtggtctccatccaccatcccaggatcaccatggatatggtgtgtggtctcttggtgacctttcatacctgaaattgtgtagatggggtatggtggtctccatccaccatccaggatcaccatggatacagctgcatgca

SEQ ID NO: 644502 - DNA, 780 bp, Homo sapiens
agcctcgtactcctaccatttatccgacatgataagtgccagagcgagctagcagcagcccgtactacgtgggcgccgcagctcccggggccctacggccgcccgccaccaggatagctggaatggccttagtacatagaggcttattagacttgtttcaaggcgggcttatgcatcagacgcactcaagggagcagtatgtatggtatatagatatatagggtactaccaactcctgcgtggcagttatggaaggtaaacgagcaaaggtgctaggagaatgccgaaggtgccgagaaccaccccttcagttgtaggcctattacagcagatggtgagcgacttgttggaatgccggcaagcgacaggctgtacaccaacccaaacaatacatatttatagctaccaagcgtctcattggccggcgctatgatgatcctgacgtacagaaagacattaaaaatgttccctttaaaattgtccgtgccctaccaataggtagatgcctagggttgaggctcatgggcacattgtattctaccgcagtcagattggagcatattgtagtagactgcaagatgccacaggagacttgcagagacattacttggaggcgcaccagcaacaaaatgcttgtgattcacagtcccaggctaattacaatgactcggcagagacaggccataaagctgcggccgatttctggctgactgtgctacgggtgaaattaaccaagtgtagtctagctatgctagacaatgacagcagtttggttactag

SEQ ID NO: 644503 - DNA, 453 bp, Homo sapiens
  misc_feature (71)..(71): n is a, c, g, or t
  misc_feature (138)..(138): n is a, c, g, or t
ttacagcgttctcagtgtcaacagccagcagaaaataagctgtccgattagttggcacccatgctcagagncagatcaagagagaggtgagtgaacctttcgggagcagagaaccgaggcgagcaaggttgtggtaantcaccatgtgcagctgatcaggcgacaaggtatcgcaggtccgctgggccgtgggaggtggtgcgtaaattgggcgtcaccccaaagcgcatggagatccccctatattaaatggctagccacagaggcaagaatattggacacgatggcaatgggccccaggcccccgaaatggggttaattttataaaattttaatgccaaataaagaattgcgccgggaagggtttcccccttgctaagaaaacgggaaaggttaatccgaaaaaaaaaggggaattagggttgggggaaattaccaaggggaaaagggcta

SEQ ID NO: 644504 - DNA, 563 bp, Homo sapiens
acatttcctctagacgccatgtgatagtttgtaaatgttaaaccagaatttagtagtatgcacctgtcacagcagcgggaagctttgtgctttgtggaagtaaggaatagcaaatgaacttgaaaacaaatgaggagacacaaatattaggttaacagccagctggatgcctatgtgaattaatcatttgctttccacccacggtgattgaggttgacatgaaatctgaggaacatgtagaaatcatgtggtgattacatagactctggcagggttgcaaaagaacatccatgagtgggtgaagttgcatctcaagaggtcagtgcacagaaataggaaagttctgaggtttgcataatagatatcaaaggagatataaaatactaactaggaaaaaagtcaaatgtcaacagaatgctatacttccttaccatgtacatagggagatagcaaagaacataaataacaatggcatatgtgcacatcatacacagagcttctcttaaaatgatctaacagctcattgcccaattactaacgtgtaagtgatgtagtaaaatgtg

SEQ ID NO: 644505 - DNA, 331 bp, Homo sapiens
  misc_feature (79)..(79): n is a, c, g, or t
  misc_feature (107)..(108): n is a, c, g, or t
gggggggggggggtttttagggttttttagggttgtttttttccccccgggggggggggcccccccagtttgggggtgncggggaaaggaaattaaaatttgtttgnnaattggcccacccccccccccaacaagaggggggtcccatttttggggtttggagggggaagggtttccttcaagccccccgggtcccgaaaaaaggttggattttttttttacaaagggttttatgattaaaaaaatttcccggcctttaaggggccattaactgggaagggaaaaaaatttatggggggcaagggaaaaaaagggggtttttacccctgga

SEQ ID NO: 644506 - DNA, 594 bp, Homo sapiens
attgatttagactacggaaaagcaatgaaataaaaagttggtttatgaaaagagaaacaaaatcgaaaaacttcagctaaactaagaaaaaagtgaagacccaaataaaatcagaaatgaaaaggagacaaaacaagtgagaccaagtgagaccataaacacaaagaatcattagagactattattaacatctatatgccaacaaattggaaaacctggaagaaatggataaattcctggacacatacaacctatcaagattgaaccatgaagaaacagaaaaactcaacaaaccaataagaaatagccagattgaagccgtaataaaaagtctcccattaaagaaaagctcaggacctgatggcttcactggtgaattctaccagacattcaaagaataccaattctgctcatactcttccagaaaactgaaggagagggaatacttcccaactcattctacacagccagcattaccctgattccaaaaccagtcaaggacacaacaaaaaaagaaaactatgggccagtatcactaatgaacatagacgtaaaaatactagaaggtctaaatgcaatcaggggatcctctag

SEQ ID NO: 644507 - DNA, 131 bp, Homo sapiens
cataatggagatgcatacaaagtacaaagggagaactaacaggtactggaatctgccaaggggaaatagtacaagctttagtctgaaacttgtctcaaggactagaaagagcatacaaggaagatccccag

SEQ ID NO: 644508 - DNA, 660 bp, Homo sapiens
  misc_feature (503)..(503): n is a, c, g, or t
tcctcctccccagacatggtgtgcacgtacgcgggcttctgctacatgctggcgctgtctgctcactgccgcgctcatctatctgtcggccatttggccagcattactagactagtgtcgagtgagctgatagacgtgatgtactaatgaatccgtataggaccaggtgtaactagccgtgaatcccctagatagtcccagaggtacctcatccacagctgtgtctgtctgatgtcagtgtgatcgtatgtggcagcaagaaggtggccttatcactgggatctcagatatgcccgctctgggggatatcatatctggacggtatactagagtaggacgcaagtgagtgagtgagcccatggactcatatagagcctactaagcatcatagaattgcaagatattgctacgcatattgtcaagaaaggaaggactggtgcaagttaagctatttaatctgctagcagttttattatactagctatatggcatgatctatgttntggggagcgcttagaataagacacagaagaattggtcgagttagagtgcatgcgaaaagcgacaaagtgagagggattctatccagcaagatcctgtccaagagtagcctgtggaaatctgatcagttactttaaaaaatgatcgttattctaaatg

SEQ ID NO: 644509 - DNA, 390 bp, Homo sapiens
  misc_feature (3)..(3): n is a, c, g, or t
  misc_feature (21)..(21): n is a, c, g, or t
  misc_feature (38)..(38): n is a, c, g, or t
gangaattactttgcctaaancccctgtttaattcctnccaactggactcataaaagtacggacacggtgggttgcgagatctctgtgtagtcatgaccccgcaattatacttgacgagagcggtgatgatgaacgggcggtatggaaacctgtccttctttggtgtcaattgagcacactgagaagagattcagaatggcctgtatctcaacctgatggtactgtttttctgctctgatctttaggaaagagtgaagctttcccgtgcattcccgccacttccttgcagttttctttttatacttttcggttaactaatgtatttattaatttatttgagatggagtctggttctgttcatcacggccatggcgcggtatcgggccact

SEQ ID NO: 644510 - DNA, 186 bp, Homo sapiens
  misc_feature (70)..(71): n is a, c, g, or t
ggatacgtgggtgagaaaggtcctggtccgcgccagagcccagcgggcctcgttggccatgcctcggaannttgaggaattcaaggacttcctcttcacagcccgacgaaaggatgccaaatctgttcaagatcaagaaaattatggccaacgtgaagtttaaagttcgatgcagcagataccttt

SEQ ID NO: 644511 - DNA, 703 bp, Homo sapiens
caggggagaggcacagtcgcgatggacgtgtcctcatgatccgggccacaagacacatctcacggacgccagggatccacacggtgttcgaactgaagcgcatcgatcgcagggcatcctcaagcggcgtcctgacgagcagtggatgtacacgggtgaccaacctcttggttgatggcaagaccactgggcgagtgtggcttcaccaggggcaaacagcacggcacaggccccagccacagtggggctgttcttccgggcagagtgacactttgaggccctgtgcatcgagccgttttccagcccggcagagctgccgatgtgatgaagccccaggactcgggaagcagtgccaatgaacaagccgtgcagtgagaccccaagaggcccatttcccccaataaaagagatttgggacacaacaacacttgcaaattttcagacacaccatcatcatgcacgaaaaaagacaacagagttgtgcgggacccacgaagcatctgcgaagaagcttttcccaaacccactcgtgttgaggagcgggcggcccaccgatgtgtagggcgaccgtggacacagggtcttgcacgagggaagacggcccagaaaggggctgtttcccacaaaaaaaggcgcggcgaacggcggcttcgaacaaacaaaggatgcgagacacgggtcacacaggacccgctgcttaatc

SEQ ID NO: 644512 - DNA, 162 bp, Homo sapiens
gagggacctgtcgtctatgtcagaacaagacggcaaagaatgtcagcgcattacaatgcaaaatggacttgtttgatatgcttttccaacataagggacatgagtcattggggcatgttacagagaggttcagtaacaattcagaaaaaaataataaatatt

SEQ ID NO: 644513 - DNA, 1547 bp, Homo sapiens
ccgtttgttcgcttgtatgtgtgttttgttgtgcccgtcgtgtggtagaaaaagaggctatatattgagtgcgggcctcgcgaccctccctcccccccgaccactctctcagaaagacgttggtgggtgtgtggataaatcatccctcatccacacgtgctgtgttgtggtggtgaagatgatattgtggtggggtggccccgatctgtgcgtgcccacaccgctcctttgtggttggggaagcaccccccccccctcccgtgagcctaccctcacaacaagggggccgccccgggaaagtttaatctccccgtcttcgctcccaccccgcggcctgtgttgggggcccgactagcgccacgtgtgggggttgcatatgtcgtccacccccgcggttggggtggttccttcccgcggaaagaatgtgtgtccccgcccaaatgagtaaagaaaaaggaggaagaaggggcgtccgtccgtaaaaatttgtaacagccccaacagaataattggccgccttttaagaaacaggcgggtgcgcccaccagcggagaagcccgccataaggggagcaccaccaccggcccaccggtgtgtatttacctctttttttgtcttggtgaagaaaaaatttggtggagatatttcttcctctcctcctccaaccatcaaccaacaatttgggtgcttgcacacacaaggagagccacagtcttccccgcgtggttccttcttggtgtggaagaacgaacagtccgtcgcccaccaccgccgtgttctgcttgtgggggcgccctccttctacaatcagaagattggtggccacaagttgcacaacgctcgtttcacatatgggcggccaccactgaggtgccacccaacaggtctcacttttcctcaaacaggaggaagtcttttcttttgtccacaagagggaggccatttctctctcgcgagagacgacacagtgttgtcacaacatgtcgcccaactagggtgttgtcccgccccccgggaaaaggccccctgtccccttcccacacacttgggggagacacacaacagagccgcagagtgggccacatgtgacacagagagatattgggagaggttctaccctcagagagggcttgagagagaggcacacacacagtgagaacggagacactccgcttcctctctcgagagtatattcaccgtcacggctacactccacgcgagatgtctcaccccgcccacagatatagagagagagagagagagagagattctctcgcgctggagagagagaggccgccacaagagaggagagggcctataaggcacagagagcccccacatcacacctccacggcgttgtctccacgtgtcccctctaagcccgttcttaactccacacctcgcccctgctttcctccttccctccacgagaatttgtggtgttgctcgcctcctattcttgtgtttttggtgttttttttttggggggggtttagaaccgtgcctggcacatagtaggcgcctccaataaaaaacttgtttgttga

SEQ ID NO: 644514 - DNA, 957 bp, Homo sapiens
attattatactagcatataacatctcacttctaggaagtactagacatgatcgctcgaaccgtcatatcctgccctactgatgcctagtaaggaataatacgtatctgcttgggcatgtatagctactcgtcataggcctcgaacagcgcacatcgccatcttagccaatgattgtgccgtattggcatactagtcttcggcgcctgcgaagcagcggtgggcctagccgctactagtctcaatctccaacacaatgtggtctagactacgtacataacctaaaactactccagtgctcaaaactaatcgtcccagcaatgatgttactaccactgatgatgacctttccaagagaaccaaggatcttacaagagaccactgaaataaccattcttcaacgtgatcagggtctcgcggaaagagagatttcaacacagcgatttccactggagcaccagcaggcaccatctttgaaagggacacagacgggcaacattaacggatcatgaacaaggcgaccgtgcttgatacaatagagtgggagcctgccatagatatgaacgccctcgtcaggcacacccgtcgtgtctctacaatgaagcagaggacgtgcggacagaataacggggcaatgagacaaacggccaccaggagagggcccggatacaaatgtcacgaccccgcacgcggagaccaatgccagtagagaagggcctgcaagccacaccaccaccgaccgaccaaaatcaaacaccagcacaaaggaaaacctaagccgaaccacaggaggacaacagaggaaaaacagagggacgtcctaaatcaagaacacgaccatagaggaacaaaacacagagaagcaacagaaaacagaatcaggacagcacagtgggaaggacatcgacaaacacacaacgagaaggaaaaacaaaatgaaacgcagactaaagaaaaag

SEQ ID NO: 644515 - DNA, 1641 bp, Homo sapiens
gcgaggaggaagaagaggaggaggaagaggaggactgaggacgaagacctggaggagctggatggtgcatggagagtgaagcccgcctgactggtactgtcctgcggccctcagtgcccacctgcgccctgacgcactggctgctgtccccatgatgtgacttctgagaaagtgacttctgtgcacgacgtgcgcccccggtggaacacccatgacacagagagcgacatccaccaccagagtagaacgccgagaggcaggaaagcacgatcatatgaggggacaccctgatgaccctggatgatcggtcagaaccaggatgacaccagacgcacaatcccaccagcatgatacatgcattgaccagaaagatactacgccacttcacagaggagatcaccatggaggggaacgaagagaaggcgcatcgctggggacccggagggcagttacgagagataagagagacgagcagaggagcaaaagatagcacaaagaggagaatggaggaagagaagacacaacagaataaaagagacagagataggaagaagaagaggagaacaagacaagaggagacgaacagaggacagacggaagtgaggaagcaagagacgacgcgagaccgcggggaaggaaagagatgacaggaaagagcaggagaaataggaagaaaaacacagagacacgaagagaggacagcagacacaggagaggagagcgcgcaaaagggaggtggcacagatgagagggagaacgagcagacagacgacgacagaggaggggagagggaggaaggggaggaacaggggagggaaagggagcaagggggaagaggaaggagagggaacagaggaaggagacaggcgcagagaaggagggaggaggagaaaggaggaagaaggagcagaaggagacgggcaagaaaaagaggagagggaagaaaaggaaggaggacggggacagaggagcaagcgaaagcaagcaggcgatagaggggggaagaagaacgaacgaggagaggagacaagaaagagacaggagaggagcggggcggaccgaacaggagagagagagaaacggacgaaagaaagagagaaaaggacaggagtgagacgaaaaaggagagaggaaaggagacgcaggggaggtagacggagaggcgagagaggagcaggaaggaaagaggagagagaggaacgagaaagagggagagaagggagggaggaaaaagggagacagacagcagagacgcagcgagagacgagaggaaagagacaagacaagagaaaggggaaggggagccaaggagagagagaaaggccgcagcgagagagaagcgagcgagagagcacggaggcgagagggaaagggagagaagaagaagcgaaaaggaggaacgaggagagaggagaaaagcagcacgaggaagaagaaacgaaacgagaacgacaaggaaaaggaagaagacgcaacaccaagaagaacgcaacagcagagagcgagacaacaagcagagaaagagagacgagagcgaagagaagagaaagagaagaaaaaagacaagagagaagaaaggaagagaagtagaacagcaagaaagacagagagacgacgagcaagaggacaagagaaagagag

SEQ ID NO: 644516 - DNA, 287 bp, Homo sapiens
tatgcatgctcgagcggcgctttgtgatggcatatctgcgagcacattcggcttccattgtgtgtttgccagctgcactattcaacagcataacactgcatagtaaacaactacaaaatgactgtgagtcagcagcacacagtgctgggttattagaagagcctgagacggtgtgtatatgtaccaacacttgaatggcggtgtaagccagtattgtggttttgtgatgatttaaccacaaatgtcgttccctatttaaatattccaaatcagtactgttagtacac

SEQ ID NO: 644517 - DNA, 1650 bp, Homo sapiens
cttggtgttcggctgagttagattcactgcgaacttgagatggggactggctgactacggacagatgtcgtacagcgagaatgctacagcattgggcacccggtgccccgcgatacttcaacagccatcaggctgctggcatgccaggattgggttcgagttcgacaacgatactcaacgctctgggtcgtagactacaatatggaacatagtattggttcgtggttcatctcattgttaaccccaatcatgtgaaccttgcacccgtatcgagtagtagcactacaccggaaagattcaatctggcatctctcaagcatgaataaggcgcgcaacgaacggacattcctaccgggaaatcgtcgaaacatggccccaaagggtgaacttgagggtagccttacctgggttggggaatatcgttcgaagatattccggcggtccactattccttaatgccccattaggggcgctcaaagaatgacggaccattaacaggtaaacatcggtacgcggacgcgcacttagggggagaaaccgcaaaatgggcacaccaattttgcaccttcttgcgggcggattcgattcgaacagaaaaaccacacccggtgatctagtgtctgtgtaacgaagcgccgacaattcgtggtgcagttcccaagcgtgcaatcgttacagcactagggggcgggcagactacccattctaaatatacacgggcgccctattgtacagcgttgggaacacacggcggtccgagatttgctcttacagcaattcacaacagggtgggtgggccccctatacatctacataatcacgttcgccaaacatctgggaaactgcacaacgatctacacacggcggaggctatcactatacccaattatcccgggagggacaggagaaaatttatcatactcgatgggggcttgagccaaatactttggatagcgcggttacccccgtcattggatctacggggcgacacgccggtcatactccgaatggccatgtgtcgtcacctatgtccagcacaacacataatgatggcgaaagcaaacctattaaccgggatctcccaagcgtgggcgccctattatacggcacaagcgtttattcccctcttgtgtagcgcacacacagcaagttgggcgcggaacaacacctgtgattcgctcggcaccacggaccagtggcgacctgatgggcaaaaagacccccatgcgccacgcggactggacaatagcgcacatctgagagagccccggggaaggggtcccccaagagaaagcaaggcccgcaacgagaagccaactttccccgccaccaaagctggccaagacaagcggtgacagaccgggcatgcgcggccgagcgcattccaacggggcggccacacaggcattgacagcacactagcggccacccccccgcacggtgcacaagagcagcaagaaaaccctaccatacccacgggaggaacacacccaaagagactgccacccaagagaacgcagaacaggcaccaaccagagcttcaatgacagactacagacgaccccagacagtgtcgcaggggccttcattcaacaacgcggcgagaagcaccgattcaatacacgcagcggcgagcgagtaaaaacacac

SEQ ID NO: 644518 - DNA, 361 bp, Homo sapiens
  misc_feature (81)..(81): n is a, c, g, or t
  misc_feature (97)..(98): n is a, c, g, or t
  misc_feature (139)..(139): n is a, c, g, or t
ttcattacgcaaatggcaaattctttggtctcccatcagctggaattaagtaggtactgtgtatctttgagatcatgtatntgtctccactttggtnngatacaattaaaggataggcacgtaacagtctgaaaaagangggtatcacaccgctccagctggaatccagcatgaacctctcagcatgccactagctgaacactttaaacaggaaatcacggacagcttcccttcatttattttgatgtgcccattcgtttgaaagtgcatcaatcgtccttatttgttttccctatcatttagaccttctacctatgacacaaaatcccttttctattttataatacaccacactgaaatt

SEQ ID NO: 644519 - DNA, 451 bp, Homo sapiens
  misc_feature (178)..(178): n is a, c, g, or t
gcacgaggctcagcaagcaccgtggtgtgggggcgtgtcctgggagcgaggctgagttcacggagcatctgctgtgtgccgggccggtgctgagtgattcccaggtctagcgccagtcccaacacccaggaggctggtgtctacggggccacatgtctgaggtcaccgtcagtcagcngcagagcccccctccacgccctggtgtgtgtcaccttgacaggcaccatccatttccctccctggtgtgtgtcaccttggcggtcagggtctccctccctcccctctggagtgcgttcacctctgtacccttctcaaagagactcacaacctaagattagacgagccccagcccagtgtcggtgacctagtgccctcctcgctggtggctggaacctcaccgggtggctctgcggtgccggcttcagaacccaccacgccgagccctatgcag

SEQ ID NO: 644520 - DNA, 81 bp, Homo sapiens
attacgagtttgtgtcttgttcctttatgcttttggtaaatatatctataatgagttgggattaaaatagattatccgcat

SEQ ID NO: 644521 - DNA, 173 bp, Homo sapiens
tcagttaccaactgtatactaaaggtatctttgcctcattatactatctctggatagccatatcctcttctaaaattgacggatgcctgcctacaaaatctacgggacacttattgtgtaggtgtcaaacactttaaaggcccactaaagggcatctataattccatgagtgc

SEQ ID NO: 644522 - DNA, 1075 bp, Homo sapiens
ggcatggcgctggacggcgttggtatgaagaacttcagcgttgccctggccggagcaagagcacaggccctcggggatggaggtctttggtttcataagagcctgagagagatttacataagatatgtgtaacacaccaagcgtactgtgacctaggcacaggctgctaaggatgtcttcaacaaaggcatatggctataggcatggtcaagcatagcaccctgcaaacaccaagtcttgtacgtggcgtggcatttctcacattctgggtccatgcttacacatgatacaagggcaagcatcaggcaacctagaaaccacatatcagggtctgtacactcatggccttaccttcacccagaacatggaacacagcacaatactctagggacagaaatctctggggagaataacgttggctgaagggttgaaaatgattcttggataccaatattagtaccgaaacacaggaaagcacagagtgaggaaattgaaggccatcctataaacgggatggaaaaagatgttggacagtaatgatgatatagatatatctggacaaacatctatggcatggggatgtgatggacattcgaagggtgaattgtagacatctcccagaatgcacgatatagacacaaagccaacatacaaacacttggccaaagaaatacctgtccgccctgggatcacaacggttcgaggacctccacggtggcaccacaacttgttacacagatgagactgacattggaagaaaaacaaacacgaacgtgaaagaaacagcagtgacaaaacacaataaccagggcatcgggcaaaccgtggcaagaacaacaagaccccgaactgtgaacatggagagaaagaacatcagtgggtgtgcaacagccacccaccctcagtacagcgcaaaaacagccacagcgaaaggacggagaagacaaacgaccctgatgcaggggaccaaccagagcttaaagaacgaccgagggagcaacctgcgtcccggccaaccggagacaacgacagcgaacaagaggtgagagagatagacgaggaagcaaacaacacg

SEQ ID NO: 644523 - DNA, 399 bp, Homo sapiens
  misc_feature (27)..(27): n is a, c, g, or t
  misc_feature (68)..(68): n is a, c, g, or t
  misc_feature (87)..(87): n is a, c, g, or t
  misc_feature (107)..(107): n is a, c, g, or t
  misc_feature (114)..(114): n is a, c, g, or t
  misc_feature (125)..(125): n is a, c, g, or t
  misc_feature (130)..(130): n is a, c, g, or t
  misc_feature (132)..(132): n is a, c, g, or t
  misc_feature (136)..(136): n is a, c, g, or t
  misc_feature (173)..(173): n is a, c, g, or t
  misc_feature (222)..(222): n is a, c, g, or t
  misc_feature (269)..(269): n is a, c, g, or t
  misc_feature (286)..(286): n is a, c, g, or t
  misc_feature (301)..(301): n is a, c, g, or t
  misc_feature (304)..(304): n is a, c, g, or t
  misc_feature (308)..(308): n is a, c, g, or t
  misc_feature (350)..(350): n is a, c, g, or t
gagagtttctttttaagtaaattaaangaaaataaatcttcattttcacattttttgttgcagtccanaggtaactagttggttagnggctatgtccacttggacanatgctanggggggggggntttcncntggnagcactcagaaatacggcatctgtcagggctcacggnactgggctgctgaatgcactgtcgtttgtaaataacagcaagtggggantttaaaacatcatggatagataagagttataaatagaaaactggtanggttaagaggcagaggntcgttaaatacaganggntatntatatgttgcccatattccacaaactctgggttatgtttggnacttttaaataaatgatctgcatctaggttagagactggattggatttg

SEQ ID NO: 644524 - DNA, 147 bp, Homo sapiens
ctgtgttgaggagatgtttcatgtacttatactaacattagttcttctatagggtgatagattggaccaattgggtgtgaggagtcagttatatgttgggattttaggtagtgggtgtgagcctaaaagcagccaccaattaagaaa

SEQ ID NO: 644525 - DNA, 1724 bp, Homo sapiens
agcggagtatttctccggggggtgttcgagtggaggaatactcttacgtgaaagtgctcagtacaccactgcggcaggaaggaggaagggaagaattccagatggggagaaagtaatattttgcagcacagtacagggtaaactgggtccaggtggcgtagccgccgcgacaccttcacgtgaccgcggacagcttaaggaccccgcatccagtgcgcctgcgctggagctcccggaagttgccggacccggaacgcaggcggagcgcaagtctgtcagccagtcagtccgccagtccgccagcccagtacctctctctcctcggccctcgtaagctgtccgcggtctgtttggcccgaacggcggcggaggcgctgatcatggcgacattcatctcggtgcagctgaaaaagacctcagaggtggacctggccaagccgctggtgaagttcatccagcagacttacccaagcggcggggaagagcaggcccagtactgccgcgcggcggaggagctcagcaagctgcgccgcgccgcagtcggtcgtccgctggacaagcacgagggcgcgctcgagacgctcctgagatattatgatcagatttgttctattgaacccaaattcccattttctgaaaatcagatctgcttgacatttacctggaaggatgctttcgataaaggttcactttttggaggctctgtaaaactggctcttgcaagcttaggatatgaaaagagctgtgtgttgttcaattgtgcagccttagctagccaaattgcagcagaacagaacctggataatgatgaaggattgaaaatcgctgctaaacattaccagtttgctagtggtgcctttttacatattaaagagacggttttatctgccttaagtcgagagccgaccgtggaccatatctccagatactgttgggaccctcagtcttattatgctggcacaggctcaagaagtattttttttaaaagccacaagagataaaatgaaagatgccatcatagctaaattggctaatcaggctgcagattattttggtgatgctttcaaacagtgtcaatacaaagatactctccccaaggaggtgttccctgtcttggctgcaaagcactgtatcatgcaggccaatgctgagtaccatcagtctatcctggcaaaacagcagaagaaatttggagaagaaattgcaaggttacagcatgcagcagaactgattaaaacagtggcatctcgctatgatgaatatgttaatgtgaaggatttttctgacaaaatcaatcgtgcccttgctgcagcaaagaaggataatgacttcatttatcatgatcgagttccagaccttaaagatctagatcctattggcaaagccacacttgtgaaatctaccccggtcaatgtacccatcagtcagaaatttactgatctgtttgagaagatggttcccgtgtcagtacagcagtctttggctgcctataatcagaggaaagccgatttggttaacagatcaattgctcagatgagagaagccaccacttgggcaaatggggtgctagcttcccttaatcttccagcagcaattgaagatgtgtctggagacactgtacctcaagtctatattgactaaatccagatctgtgattgaacaaggaggcatccaaactgttgatcagttgattaaaagaactgcctgaattactgcaacgaaat

SEQ ID NO: 644526 - DNA, 729 bp, Homo sapiens
  misc_feature (643)..(643): n is a, c, g, or t
ttattttgttccgttaaagtcatcgtgtgtttataaagatgaataagatagtgtttatgattaccaaggcagaatgaccatttgaaatatcccagtgccagtattttactttttttagatttcaatttaaaaggagaaggaaaggaagttgggtggttataggagataatattttgagcttttgtcctttttttcatggtggatttttcttcaaagaagacttaatatttaatgagattcaggaaggttacctaattttctgttttctttcattctatccagatctgcttgacatttacctggaaggatgctttcgataaaggttcactttttggaggctctgtaaaactggctcttgcaagcttaggatatgaaaagagctgtgtgttgttcaattgtgcagccttagctagccaaattgcagcagaacagaacctggataatgatgaaggattgaaaatcgctgctaaacattaccagtttgctagtggtgcctttttacatattaaagagacggttttatctgccttaagtcgagagccgaccgtggaccatatctccagatactgttgggaccctcagtcttattatgctggcacaggctcaagaagtatttttttgccacagagattaatgaagattnctctagctgaatggctatcgggtcgatatttggggagcttcaaccggttgtcgattttccaggtgtatggttttacctgttttgct

SEQ ID NO: 644527 - DNA, 381 bp, Homo sapiens
tgccggcccagatatttctatgtttcatgggtagtgcagatgtcagaatgccatttcaaatagcctatgatctaagagattagccctacacaatttcagtctgacctgaaatccactgtatctccccattctgttttccagcttttctgtccatgttcacccagaaaaaatactgtgactctatcatcagcactgagaataaaagaaagacgtatactcaccaaacaagaaggcagaagtttgattagacactgaaaatctttatctgacaaatacttgtctgggccaaggtcagcctgaaaacatggaagggaatatcagggtactgttttggtcaccaaaagaaaaattccttgtctttccctttaattttattatcca

SEQ ID NO: 644528 - DNA, 1792 bp, Homo sapiens
agcggagtatttctccggggggtgttcgagtggaggaatactcttacgtgaaagtgctcagtacaccactgcggcaggaaggaggaagggaagaattccagatggggagaaagtaatattttgcagcacagtacagggtaaactgggtccaggtggcgtagccgccgcgacaccttcacgtgaccgcggacagcttaaggaccccgcatccagtgcgcctgcgctggagctcccggaagttgccggacccggaacgcaggcggagcgcaagtctgtcagccagtcagtccgccagtccgccagcccagtacctctctctcctcggccctcgtaagctgtccgcggtctgtttggcccgaacggcggcggaggcgctgatcatggcgacattcatctcggtgcagctgaaaaagacctcagaggtggacctggccaagccgctggtgaagttcatccagcagacttacccaagcggcggggaagagcaggcccagtactgccgcgcggcggaggagctcagcaagctgcgccgcgccgcagtcggtcgtccgctggacaagcacgagggcgcgctcgagacgctcctgagatattatgatcagatttgttctattgaacccaaattcccattttctgaaaatcagatctgcttgacatttacctggaaggatgctttcgataaaggttcactttttggaggctctgtaaaactggctcttgcaagcttaggatatgaaaagagctgtgtgttgttcaattgtgcagccttagctagccaaattgcagcagaacagaacctggataatgatgaaggattgaaaatcgctgctaaacattaccagtttgctagtggtgcctttttacatattaaagagacggttttatctgccttaagtcgagagccgaccgtggaccatatctccagatactgttgggaccctcagtcttattatgctggcacaggctcaagaagtattttttttaaaagccacaagagataaaatgaaagatgccatcatagctaaattggctaatcaggctgcagattattttggtgatgctttcaaacagtgtcaatacaaagatactctccccaaggtcagttattgtttttataaacacttgcttactttgcatgtgaaatatttagacttttttgtgtataagaagcaagttgaaacttataaagaaatttgaagttttaatagagttatctgaagtatatagtagaaatagtttttttttttttttaatttaagatgcatgaacaattcttttatgtttaggggatgcctttgtctttaccttttactaaacttgtttttccaagctagaactctttctggaaaatgttgaccatctgttttcaatacttttatcaaatcaaggcattgtgtagttctgaatcattggtgatttggtacaagcatgtatacttgagcatgttgatgattcacacttttaattattgtcctgttttcttaaagatgagccttaaagcgcaaaaacagacataaagaaaaaaggaaaagaaaacttaacaaattcatctgatactttgattagaattcagttttgccaacagggataaaaaattgggctgctaatggacagctaaggaaagcaaccatcttaaaccacatatcacaggaagtataatgttttaatgtaaacctttctgaagtgacaattgtaaagactattcagtgatgatcatttgttaatgacaaagcaaatcactagtaaatttggaatgattaataaagaaaacttaaagattgaaaaaaaaaaa

SEQ ID NO: 644529 - DNA, 1406 bp, Homo sapiens
agcggagtatttctccggggggtgttcgagtggaggaatactcttacgtgaaagtgctcagtacaccactgcggcaggaaggaggaagggaagaattccagatggggagaaagtaatattttgcagcacagtacagggtaaactgggtccaggtggcgtagccgccgcgacaccttcacgtgaccgcggacagcttaaggaccccgcatccagtgcgcctgcgctggagctcccggaagttgccggacccggaacgcaggcggagcgcaagtctgtcagccagtcagtccgccagtccgccagcccagtacctctctctcctcggccctcgtaagctgtccgcggtctgtttggcccgaacggcggcggaggcgctgatcatggcgacattcatctcggtgcagctgaaaaagacctcagaggtggacctggccaagccgctggtgaagttcatccagcagacttacccaagcggcggggaagagcaggcccagtactgccgcgcggcggaggagctcagcaagctgcgccgcgccgcagtcggtcgtccgctggacaagcacgagggcgcgctcgagacgctcctgagatattatgatcagatttgttctattgaacccaaattcccattttctgaaaatcagatctgcttgacatttacctggaaggatgctttcgataaaggttcactttttggaggctctgtaaaactggctcttgcaagcttaggatatgaaaagagctgtgtgttgttcaattgtgcagccttagctagccaaattgcagcagaacagaacctggataatgatgaaggattgaaaatcgctgctaaacattaccagtttgctagtggtgcctttttacatattaaagagacggttttatctgccttaagtcgagagccgaccgtggaccatatctccagatactgttgggaccctcagtcttattatgctggcacaggctcaagaagtattttttttaaaagccacaagagataaaatgaaagatgccatcatagctaaattggctaatcaggctgcagattattttggtgatgctttcaaacagtgtcaatacaaagatactctccccaagaagatgagccttaaagcgcaaaaacagacataaagaaaaaaggaaaagaaaacttaacaaattcatctgatactttgattagaattcagttttgccaacagggataaaaaattgggctgctaatggacagctaaggaaagcaaccatcttaaaccacatatcacaggaagtataatgttttaatgtaaacctttctgaagtgacaattgtaaagactattcagtgatgatcatttgttaatgacaaagcaaatcactagtaaatttggaatgattaataaagaaaacttaaagattgaaaaaaaaaaa

SEQ ID NO: 644530 - DNA, 985 bp, Homo sapiens
  misc_feature (56)..(56): n is a, c, g, or t
  misc_feature (160)..(161): n is a, c, g, or t
  misc_feature (182)..(182): n is a, c, g, or t
  misc_feature (198)..(198): n is a, c, g, or t
  misc_feature (218)..(218): n is a, c, g, or t
  misc_feature (239)..(239): n is a, c, g, or t
  misc_feature (247)..(247): n is a, c, g, or t
  misc_feature (258)..(258): n is a, c, g, or t
  misc_feature (261)..(261): n is a, c, g, or t
  misc_feature (270)..(270): n is a, c, g, or t
  misc_feature (273)..(273): n is a, c, g, or t
  misc_feature (301)..(301): n is a, c, g, or t
  misc_feature (313)..(313): n is a, c, g, or t
  misc_feature (322)..(322): n is a, c, g, or t
  misc_feature (326)..(326): n is a, c, g, or t
  misc_feature (985)..(985): n is a, c, g, or t
gcgtgacacccgttttctatggggtcttcatttcccagtggcacaggggaactacngaaggctctgccgtctgtgtcttcacaatgaaggatgtgcagagagtcttcagcggcctctacaaggaggtgaaccgtgagacacagcagtggtacaccgtganncacccggtgcccacacccggnctggagcgtgcatcancaacagtgcccgggaaaggnagatcaactcatccctgcagntcccagancggtgctgaanttnctcaaggancanttcctgatggacgggcaggtccgaaccngcatgctgctgntgcagcccnaggntcgctaccagcgcgtggctgtacaccggctgtccctgtgcctgaaccacacctacgatgtcctcttcctgggcactggtgacggcggatctcatgaaggcgagtgagctgtgggcccccggtgtgcatcatcagttgaggagcctgctagatcttctccatcgggacagcccgtgcagaatctgatcctgtgacacccacagggggcctgctgtatgcggactcacactcgggcgtagtccaggtgcccatggcaaactgcagcctgtacaggagctgtggggactgcctcctcgcccgggaccctactgtgcttggagcggtccagctgcaagcacgtcagctctaccagcctcagctggcaccaggccgtggatcaggacatcgagggagccagcgccaagggacttgcagcgcgtcttcggttgtgtcccgttttttgtacaacagggagaagcatgtgagcacgtcagtccagccaaccagtgaaccctttggctgccgttctcttcaactgggaccgatttggtacgccgggccccgtcatgctcgctctgccgtgtccctggctggtggggcccccctggggttcctgcgcgcctagggtcgccggtgcctgccggggcgggggccccgggggccctccttgcggcgcgggcn

SEQ ID NO: 644531 - DNA, 150 bp, Homo sapiens
tctcatcgcgtttgtgatgtaacgtttacatgtttccgtgtgcttttcagtaacgttaggatctgggtacgtcacgcatttacccacgttatccaatagcaccggtccggttttttaaatcgtaattttggttgcctcctctttagtaag

SEQ ID NO: 644532 - DNA, 613 bp, Homo sapiens
tacgaggagtccgtcacgcggtatccatcctatcaaagcctatagagtacgctcgtcatattcagttgtagggctcaggagtatgctcgctcttgggcagtgcgagtgactaatagcctagttagtgcgcctagggtgtagtgagtgtcaattagtgcgctaagtaagggaagggagcctacaagggagtcgactcggacgtatgtgcctgcgtacaggcgtactggctgatagcctcatcgggtaatgatcagccaaggcggggataagtgtgatttcgaagacgatctaaccttatgcttagttctgtggctgtgactgttctcattccaggacatttgtagggcagcttcagtcatagaacggtccagtttattttcgtgctcaatggttccctggctcaagtggcgtaggcttacccatgaatgtgaggggtacgagtccggtcgttcagtattcgccggggggtcgtacggcggtcggcggccccggttgaggacccactcactagggtcgagtagctatggttacccacataataggggcatcatcctattaattaagctgtggatagagtgttgatacccattctgtgtcccagccccgccctgcg

SEQ ID NO: 644533 - DNA, 1495 bp, Homo sapiens
agcggagtatttctccggggggtgttcgagtggaggaatactcttacgtgaaagtgctcagtacaccactgcggcaggaaggaggaagggaagaattccagatggggagaaagtaatattttgcagcacagtacagggtaaactgggtccaggtggcgtagccgccgcgacaccttcacgtgaccgcggacagcttaaggaccccgcatccagtgcgcctgcgctggagctcccggaagttgccggacccggaacgcaggcggagcgcaagtctgtcagccagtcagtccgccagtccgccagcccagtacctctctctcctcggccctcgtaagctgtccgcggtctgtttggcccgaacggcggcggaggcgctgatcatggcgacattcatctcggtgcagctgaaaaagacctcagaggtggacctggccaagccgctggtgaagttcatccagcagacttacccaagcggcggggaagagcaggcccagtactgccgcgcggcggaggagctcagcaagctgcgccgcgccgcagtcggtcgtccgctggacaagcacgagggcgcgctcgagacgctcctgagatattatgatcagatttgttctattgaacccaaattcccattttctgaaaatcagatctgcttgacatttacctggaaggatgctttcgataaaggttcactttttggaggctctgtaaaactggctcttgcaagcttaggatatgaaaagagctgtgtgttgttcaattgtgcagccttagctagccaaattgcagcagaacagaacctggataatgatgaaggattgaaaatcgctgctaaacattaccagtttgctagtggtgcctttttacatattaaagagacggttttatctgccttaagtcgagagccgaccgtggaccatatctccagatactgttgggaccctcagtcttattatgctggcacaggctcaagaagtattttttttaaaagccacaagagataaaatgaaagatgccatcatagctaaattggctaatcaggctgcagattattttggtgatgctttcaaacagtgtcaatacaaagatactctccccaaggtcagttattgtttttataaacacttgcttactttgcatgtgaatactagaccctctgcgatacgagcaagttgacctataagaaaatgagttaataagtatctaagttataggaaaaaacttcttttttaataaaatctgaccatctttacttaaggaagcctttcttaccttaacaacttgttcaagtaaaacctttggaaactaccatgttcaaacttataatagccttggacctaacattggatgtcacctttccttgcactcaattcacttcatattcccttttaaaaacctagcgcaaccttctttcaaatcttgtcctaatttacgcaccttgctctgtataacacccgctcctgcatatccgtcaatagatgattatgtctctctgcct

SEQ ID NO: 644534 - DNA, 2325 bp, Homo sapiens
agcggagtatttctccggggggtgttcgagtggaggaatactcttacgtgaaagtgctcagtacaccactgcggcaggaaggaggaagggaagaattccagatggggagaaagtaatattttgcagcacagtacagggtaaactgggtccaggtggcgtagccgccgcgacaccttcacgtgaccgcggacagcttaaggaccccgcatccagtgcgcctgcgctggagctcccggaagttgccggacccggaacgcaggcggagcgcaagtctgtcagccagtcagtccgccagtccgccagcccagtacctctctctcctcggccctcgtaagctgtccgcggtctgtttggcccgaacggcggcggaggcgctgatcatggcgacattcatctcggtgcagctgaaaaagacctcagaggtggacctggccaagccgctggtgaagttcatccagcagacttacccaagcggcggggaagagcaggcccagtactgccgcgcggcggaggagctcagcaagctgcgccgcgccgcagtcggtcgtccgctggacaagcacgagggcgcgctcgagacgctcctgaggtgggcgcggggctgggagtgggtaggttgtctgccagccgtcgctcgccgctcctcttcccgtctccccccttccttcaatcctgtaacctgggcggagccgccccgtcccggcctgaccaggcgcgtaggtgtggtctgcattctttgctggtgagcaggacccgccctgcaggcccgctgtgactgcccgcttgtcctgcctgcacgtctgctctagcccttggtcggcgagggctccgtggatcagatacctgggagcagcagtctgccctgtactgatctcttttgccacatttacttagaactagtcttcacttttttgggtctctaactgaagcttcccctttcgccccatttttccatcactgtctttcttgggccacattttgatttcataatagtagttgcttgaaggcagtgggggaagtgggggaattgggacactggaccaaatgtctgatcagctcatcacattgtccacatgaaatggaccgtcttcctcagttcaaaataatcaaatgatagatggagaattctgaaagttaggagctacaactatttgaaataaaactctagttacatagttgaaccgttcaagatattatgatcagatttgttctattgaacccaaattcccattttctgaaaatcagatctgcttgacatttacctggaaggatgctttcgataaaggttcactttttggaggctctgtaaaactggctcttgcaagcttaggatatgaaaagagctgtgtgttgttcaattgtgcagccttagctagccaaattgcagcagaacagaacctggataatgatgaaggattgaaaatcgctgctaaacattaccagtttgctagtggtgcctttttacatattaaagagacggttttatctgccttaagtcgagagccgaccgtggaccatatctccagatactgttgggaccctcagtcttattatgctggcacaggctcaagaagtattttttttaaaagccacaagagataaaatgaaagatgccatcatagctaaattggctaatcaggctgcagattattttggtgatgctttcaaacagtgtcaatacaaagatactctccccaaggaggtgttccctgtcttggctgcaaagcactgtatcatgcaggccaatgctgagtaccatcagtctatcctggcaaaacagcagaagaaatttggagaagaaattgcaaggttacagcatgcagcagaactgattaaaacagtggcatctcgctatgatgaatatgttaatgtgaaggatttttctgacaaaatcaatcgtgcccttgctgcagcaaagaaggataatgacttcatttatcatgatcgagttccagaccttaaagatctagatcctattggcaaagccacacttgtgaaatctaccccggtcaatgtacccatcagtcagaaatttactgatctgtttgagaagatggttcccgtgtcagtacagcagtctttggctgcctataatcagaggaaagccgatttggttaacagatcaattgctcagatgagagaagccaccacttgggcaaatggggtgctagcttcccttaatcttccagcagcaattgaagatgtgtctggagacactgtacctcaagtctatattgactaaatccagatctgtgattgaacaaggaggcatccaaactgttgatcagttgattaaaagaactgcctgaattactgcaacgaaat

SEQ ID NO: 644535 - DNA, 138 bp, Homo sapiens
ttggttaagggaaggtatcattctcaattagccagacctctgctggcccatgtttaatgtcataatacaacaaaatattctgccactgccatagctactgctgactgctggaaccgacatagccaccttggtttcgtg

SEQ ID NO: 644536 - DNA, 195 bp, Homo sapiens
cactcacatgctcccagagcatttcatccatccatcgaagctctagacaatgtgtcaaactcatgttatctctctaagagtctagactgcctcattgaatgcgagggaatcctgcgagtaaatacgacagcgttttcccgtctagtgtgtcttcgttggatgccgtagacaagcatacactagtagcagatgtag

SEQ ID NO: 644537 - DNA, 800 bp, Homo sapiens
  misc_feature (16)..(16): n is a, c, g, or t
  misc_feature (92)..(92): n is a, c, g, or t
  misc_feature (108)..(108): n is a, c, g, or t
  misc_feature (228)..(229): n is a, c, g, or t
  misc_feature (231)..(231): n is a, c, g, or t
  misc_feature (252)..(252): n is a, c, g, or t
  misc_feature (256)..(256): n is a, c, g, or t
acagctggatagcggntgtcccccctctcgtggggtggttgttgttttatttaaatatagatcagaatgggaccacacagcagatatgtctnccccccccgtcggccnggggttgttgtttgtaagagagaacgaacaaggaacagcgagaacgatcctcctcatagtagcgaatagcatgggtgggctgaatatgagacatacggatgtgtgcctccccccgcgggnngnggggggacaaatttttttttntgtngcgaggatcagaatacgagacggaggagagatgagccgatatagtataaagtgctagaacatcactagatataagcggatgggccggcggaggggcagtcgggcggcgcgactggatggagggagggggcggggagtggtgcgggaggtgggggagcgggcggcgtaggcggagggggaggggggcgcggtgagcgtggcgaggggctggaccgcggcgccgaccggggccgcgggggaggcaggggatgagaggcctcgagggcggggcggtcgtgggggagcgcgtccgtcggtccgcggtgtgtgggggagggggggggggccgtgcgcctgagtagggggcgggggtgcaggaatggggctggagcgtcgtgtgggggggtatactgtcggtaggtgcgtgcaagagaggaagtcagggggggcgagtgggtaggggagggaggggatagattgagcggctcaggggggcgggggggggggtgtgtggtgggggtggtgtgcgtgtgagggtgggggtcggggtggtgtgatgtatttgt

SEQ ID NO: 644538 - DNA, 102 bp, Homo sapiens
catccacccctgattcaccccgtattcaggctaagagttatgtggcgtttactgtgccagactaatcagtagctcactgaagcattgcaacacggtctctca

SEQ ID NO: 644539 - DNA, 263 bp, Homo sapiens
  misc_feature (20)..(20): n is a, c, g, or t
gagcctcaggactgtggacnaaggatgtggccttgggcattttttccgtttcccacatgggcctggtccctccctcctggccccaaccccaactgccaggcctgacatggccttgcctttcctgcagttttggtgacttaaacccttggggggggcttcccagctttgcaggccctcctggccttttttgcaggggggacccagggtttgtgtgtgggcaacagcccctgtttttcagcaaaaataaaacagcttcctgtgca

SEQ ID NO: 644540 - DNA, 1026 bp, Homo sapiens
  misc_feature (6)..(6): n is a, c, g, or t
  misc_feature (84)..(84): n is a, c, g, or t
  misc_feature (603)..(603): n is a, c, g, or t
  misc_feature (606)..(606): n is a, c, g, or t
  misc_feature (616)..(616): n is a, c, g, or t
  misc_feature (619)..(619): n is a, c, g, or t
  misc_feature (628)..(628): n is a, c, g, or t
  misc_feature (631)..(631): n is a, c, g, or t
  misc_feature (734)..(734): n is a, c, g, or t
  misc_feature (762)..(762): n is a, c, g, or t
  misc_feature (783)..(783): n is a, c, g, or t
  misc_feature (795)..(797): n is a, c, g, or t
  misc_feature (804)..(805): n is a, c, g, or t
  misc_feature (851)..(851): n is a, c, g, or t
  misc_feature (917)..(917): n is a, c, g, or t
  misc_feature (924)..(924): n is a, c, g, or t
  misc_feature (939)..(939): n is a, c, g, or t
  misc_feature (965)..(965): n is a, c, g, or t
  misc_feature (988)..(988): n is a, c, g, or t
  misc_feature (993)..(993): n is a, c, g, or t
  misc_feature (996)..(997): n is a, c, g, or t
  misc_feature (1000)..(1000): n is a, c, g, or t
  misc_feature (1006)..(1006): n is a, c, g, or t
  misc_feature (1008)..(1008): n is a, c, g, or t
  misc_feature (1022)..(1022): n is a, c, g, or t
tggaanttacatcctctttaaaccctgcctggcaatccctaacgcaccgccgttatgcccatggaaaacagggcgaccttgaantccaactacttccttaaaatcatccaactatttgattattatccgaaatttttcatttttggaacaaacaatttgggctccaaacaaatgcagcaaatccccatttcccttcccgggaaagctgttgtgctgatgggcaaaaacaccatgatgcccaaagccatcccagggcacctggaaaacaacccacctcttgaaaaactcctccctcatatcccggggaattttggcttttttttcaccaaagaggacctcactaaaatcaaggacatttttctggccaataatgtgccaactgctgccctttctggttccatttccccattttaagtcacttttccagcccaaaacactggtctcgggcccgaaaaaacctcctttttccatgctttaagtatcaccactaaaatctccaagggcaccatttaaatcctgattaatttgcaactgatcaagactggagacaaagtgggagccacccaaccacgctgcttaacatgctcaacatctcccccttcnccntggggcgggncanccagcaggnggncgacaagggcagcagcgacaacccggaagggcgggagagcacagaggaaacgcggcaggcgcgcggccgggaggggggccgcaagggggccaagggcgggcgncaaaggggcgacccaacgggggcagcangaccccaggcgagcagcaacngggacaaacgannncgggccnnggcgggggagacggaggacaccggcccacgggcggaaaaaggcaangccggcggggcggagccagcggccgggggggcggcggcccgggggcggcggcaccacaacggcgcngcggcgnggcaccccaacgaanggggaaccaaagaaaagcggagaagnggacaagagaggggagggggggngggangannacnaaaaanancaaggaccaggggngggc

SEQ ID NO: 644541 - DNA, 898 bp, Homo sapiens
tacaaatgaggcaatttattaacccagcagggttggtcctaatgcttctggtgggcagctgccaccggtccgggcgattctggtgccagatctctttggtccctgaggtggtcagtttggcgggccgccatctgggtccttttccaccattttcagcccctccagggcttgggaggacccggggggccaaattctgggagcctcggttggaatgtgggctggggcatagacgccgtttactctgaagtcccccataaattctgggtcatgggagccaaccccagggccaccccggaggtacacggtgccgcgctggggaagcagctcgcgttgtagaaccagttctcatcgtagggagcaagctcttggggctgggccagtttgacggtatccacccattcggggactttcagcttcccggacttttggaggaacggtgcaaagctctgacgaactccggcggggtacacgtctttaccaggtaactccagggcatcgggcgggctaaactggagcatggcattcctggatccaaccagagtgactaaacgcgttggtatcaccaaaaggaaccgccggggaatacccgtggagcccccccgagaaccccacacacacacggaagagacacgatcccaccacgacaccaaccgcacacacccgcagcgcaacaagaaaccatacaaaacaagagcgacaccaatacgacataaagtaatattctaaaaagtactaataggtatcatctgaacaccaaacacagacctcgatagtgcaaaccacaacccaacctcaccacccaaaacacccacgccaatcaccgcagctcttaaaacacagcccactcaccacagacacatacacactatacactaccaatgaaactaataacacgacc

SEQ ID NO: 644542 - DNA, 1249 bp, Homo sapiens
agcgggtgcctggcgcgcccgaggccctgcgggcgctgcgagcccgcggcaagcgcctgggcttcatcaccaacaacagcatcaagacccgcgctgcctacgccgagaacgcttgcttgctgcctgggcttctggctggcccccgctggggcccggcgccagcctggatggtcttctgtgcacgggcctactgcaccgcgctctacctgctgccaagcgccctggccgggcgccccctcgtgccctaagggcctacgtgctgggcaagcccagtacctgagcccagagagagctggaaggaccgtgggccgtcgccagcgatggagcgtgggggccccgaagaccacgtgaaggacagaagggttccccgagacgactgggcatgcagcggacgcccgaatggaagcccgaaacagtgccgcggcggatggatggatgaggctttggaccccggccaccttccagcttaccagttgacaggctcacccaagggccccttgagcgacttacccttgcaaagccaagccccgggcttgcccatagaatccgctggagcaacccacaccatttggaccaacgccgaggtttccagcgctttgaaggaacacgggcacaggctatccaattcagccgggcgggattcaccggatgagcccagacccaccagggggcggcgggacgggaagaagcacctgtgaagcggagtgcaagcgacgacgaggatgaagaagacccaccagcattgcacacatggaacccatttatgagaccaccgaaggatacccacaatggtggacccccccgaccagaagaattaaccacgagaggatggaaatacatagcggaacccaggaagaccacgacgtggaagagaatggaacacagaaacacagaaacagacccacaagggagctaccgaagcatgttcacagttcccggggaaaagagccgcccatagagccacggggctttccaaatgttattacccgggagcagacggctatgattgtataccccccagagggggtcaatgtaacccagtgcaggagattctagcaccgccccccgggaaggccggaccaccccctggcacaaaatttcgcgtttgggcgaggaggaccctagggacccttagggacagaacgccagaacgagtatccctttcacctatacgaggtaggccaccaccacttagtatgtgaacgccttccgacaaacgaacccaagtacaccatggacagccccagta

SEQ ID NO: 644543 - DNA, 402 bp, Homo sapiens
  misc_feature (280)..(280): n is a, c, g, or t
aggatccgagctttaccgcacttatagcagcattacataacagcaaaaaaagaagaaacaatccaaatgcccatcaactgatgaatggatcagcaaaatgtgaaatattcatacaatggaatattttcagctgtaaaaaggaatgaagtgcagatatatactgtagcttggatgaaccttgaaaacattattctaggtaaaagaagccagacactaatggccacatagtgtatgatttcgtttatatgaaatgtccagaataggaaaatccatagagatnaggtagattagtgtttggcaagggcagaggggacgctgggggaatgagagtgactgttaatggatacaggatttctactgggggatgatgaagtgttataaaattgattgcggtaaaagctt

SEQ ID NO: 644544 - DNA, 295 bp, Homo sapiens
gcaggtgagcggcaggggggtggatcgctggtgtcagggtcgggacagcctgggcaacatggtggggccccgcttcctgctgagaatgcgcgcatcggcgcatgcctgtggtcccggctgctcggggggctggggcaggagagtcgcttgaaccggggacttgaggttcagtgagccgagatcgcactgttgtactccagcctgggcgacagagcgggactcccgtctcggagaagaacagaaaacaacatttagcacaagcagagagaggaacttaaaagccacaaggtgagtc

SEQ ID NO: 644545 - DNA, 765 bp, Homo sapiens
  misc_feature (765)..(765): n is a, c, g, or t
ttatcaatttatatttgggatatggagactggaagatgcaaattaggataatacaccaagcagatgatggagtctcctgtccgcagattggagtgcagtggcacgatcctggctcactgcaacctctgcctcttgggttcaagcaactctcctgccccagcctcctcagtagctaggactacaggcctgtgccacaatgcccagctaatttctgtatttttagtagacatggggtttcaccgtattggccaggctggtcttgaactcctgacttcagaattggaaaaatgaatgtaatttgacatatgtcttgagtctggttggcttctgaggaacttgtgtgcatctcatcagtatgcatcttaagaactgaaatgaccctacttcagcattgtgggaagacatgcattctcttcgtataaataatgtggatcttacatgtaaagtattataaagattagctgtttaacaacttaaataagcttgtgaataataaattaataacaatgttatgctaatacgtaactatgatatttgctgaacaaaataaatttgcctactttggaagcagattgggtggtttaatatatcagcaaaagagtgtttttaaaaaatatcaaagttctgttaatcaaaacgtttattgtaggacagttagtaatgttttgtttgccaacttatattacaaagtctctgtcttaagtgtttccttgcaaataaaatgatggcctcgttggcctcagcggtggagctctgcggccggan

SEQ ID NO: 644546 - DNA, 117 bp, Homo sapiens
  misc_feature (112)..(112): n is a, c, g, or t
tggtagcgctcggattaagacagcagctttagcatctctaaagaagtatggcgtggggacttgtggacccagaggattttatggcacatttgatgttcatttggatttggangaccg

SEQ ID NO: 644547 - DNA, 152 bp, Homo sapiens
atgagcatgagttgaggctgggaggaagcagtggtgctgttggggtaggaacagagctgctgtgctcttgctgtgagcgaggttgctgttggggctggtcagcagaaggtgcagcatggaagtgaaggctgcacttgtatggggaagttgtg

SEQ ID NO: 644548 - DNA, 624 bp, Homo sapiens
  misc_feature (624)..(624): n is a, c, g, or t
tcttgctctgttgccctggctggagtgcaatggtatgatcatagctcacagtagccttgaactcctgggcccaagccatcctcctacctcagcaaccagagtagctgggattacaggcgaatgccaccacacctggaattggaaaaatgaatgtaatttgacatatgtcttgagtctggttggcttctgaggaacttgtgtgcatctcatcagtatgcatcttaagaactgaaatgaccctacttcagcattgtgggaagacatgcattctcttcgtataaataatgtggatcttacatgtaaagtattataaagattagctgtttaacaacttaaataagcttgtgaataataaattaataacaatgttatgctaatacgtaactatgatatttgctgaacaaaataaatttgcctactttggaagcagattgggtggtttaatatatcagcaaaagagtgtttttaaaaaatatcaaagttctgttaatcaaaacgtttattgtaggacagttagtaatgttttgtttgccaacttatattacaaagtctctgtcttaagtgtttccttgcaaataaaatgatggcctcgttggcctcagcggtggagctctgcggccggan

SEQ ID NO: 644549 - DNA, 157 bp, Homo sapiens
  misc_feature (152)..(152): n is a, c, g, or t
gtacatgtattatgcttaaataacttatgtcactacgggatgcctgtaatcctttctgaatagcaaagcaggcatctctaaagaagtatggcgtggggacttgtggacccagaggattttatggcacatttgatgttcatttggatttggangaccg

SEQ ID NO: 644550 - DNA, 418 bp, Homo sapiens
  misc_feature (21)..(21): n is a, c, g, or t
  misc_feature (40)..(40): n is a, c, g, or t
  misc_feature (96)..(96): n is a, c, g, or t
  misc_feature (389)..(389): n is a, c, g, or t
  misc_feature (393)..(394): n is a, c, g, or t
  misc_feature (399)..(399): n is a, c, g, or t
gtggtccccaaggttccccgntccttggtccctttccgantggtgccaattttattttccaaccttttggagttgccgtaattgtagaaaaacccngaaaatatccaaatatttcttttaaagaagaaaaatccaggccaggccacagtggctcatgcctgtaatcccaacacactaggctgagtcaggaggctcacttgagtccaggagtttgagaccagcctgggcaacacagtgagactctgtctttacaaaaaataaaaaaaattagctgggcatggtggcaggtgcctgtagtcccagctacttgggaggctgaggtaggaggatctcttggcctgtgaggccaaggctgcagtgagccatgatcacaccactgcactccagtnctgnngagangagcaaggctctgtctcaa

SEQ ID NO: 644551 - DNA, 995 bp, Homo sapiens
  misc_feature (637)..(637): n is a, c, g, or t
ctggcctggagcgcatgggccccgtgatggatctgcattgccacctggcctggagctgcatgtgtgcgccaacaatctggagcggatgggcctggatgcgcatggtgcgccaacagcctcgagcgcatgggcctggatgctgcatgtggtgccaacatgcctcgagctgcatggtgcccctgtcatgggccctgtgcctgggctgctggcattgagctgcatgggcctggccatgggtggctggtggctggtgccagcttttgacctgtgccatcgagatggagcgtggcaacttcggaggaagcttctgcaggttcctatatggtggagcttggactgccatgctcctggggtggccagtgaagtgctgccagatatttcgtgagaaatctgtcattcgatttcacatggcaagatgctaacggacaaattccaacgatgtgcggacacgtgctgtacgccgacatcacgatggacaatgggaacgtccaaggcggtgctggctgctggcatccgcttcgacgtcgccagacgctggccgacgcagcagcctgcccgcgatgaatgacatggcatgaaagctgagttggccgaggagactagacggtccgcaattgactagaccccgccttcagcnggttgccgtaatatccaaaccatcgattacgagaacctcctgacactcggcctagctaccttggtaagccactctccaacttccggagcggctgcgcactgctatacacgcacttcgtcaacaccaacgtccacgcactcgctcacccgagacgacacactcgacactttcacactagcacacaactctgcgcctagcgcaggcataccacaatgagcaccgatactacgcactatgacacttcggcacatgtctgcgaacaacatatcactactcgacgattctaggacacactcgctaagagactcgcgctcacagcctctcgcgaaaccacccatatcccgtccctcgaatgacc

SEQ ID NO: 644552 - DNA, 145 bp, Homo sapiens
cctctctgcggtgcttcagacggctcccctgtggctggcgccgcggtcccgacggacttcacgctgacctgaccttcggcgctggttgttgtgcacccggcgtgctgcgacgtgtgtgcctgcctgccgggtttcctgctgaccc

SEQ ID NO: 644553 - DNA, 438 bp, Homo sapiens
  misc_feature (84)..(84): n is a, c, g, or t
  misc_feature (125)..(125): n is a, c, g, or t
  misc_feature (397)..(400): n is a, c, g, or t
  misc_feature (426)..(426): n is a, c, g, or t
gtgctagtgccgcagaacatcaaaggagctgcaggctggccattagaactcaggtgatttgaggatggaggagttcgttttcantctacatatgttcctaagtatgttcccttggcagacgtcanagtgagaaaatacaaaaaaaagggacgctccattcctgtatggataaaaattttgctgtttgttgttgtggcagtttttttgtgtgtgtttggtctatcaagctatggaaaccaaccatgtaaatcccttctctaatattcttcctgatgactctagaaaacccaactgaatggtatctctttggcacattcaacttggtcttgtatttttagtaactgtgttgaagaacattcgtgtacgctttttgactccaagaactaaaaataatgtnnnnttgcctcaataaacgtagtattccantggaaagccaaa

SEQ ID NO: 644554 - DNA, 759 bp, Homo sapiens
  misc_feature (1)..(1): n is a, c, g, or t
  misc_feature (259)..(259): n is a, c, g, or t
ngaaaaacagggggttctccctcgcgcaagccgccccaactccgcgtggttggaagaggcgcctttttccacgagggcagtacctccacacccctgggcgggggcgcaaccttgtttccgcgggtcttgcgggtcaatcatcatgggatccacaggagcacatgctccaaggagtggggtgtgtcacaatcacacaaagcccactcacgggggcacacacaaaagagcgtctccgtgcgagagcgctgtgcacaacagngctcggccacaatgctcggtgccccccgagacagcccgccttcagagagcgcgctctacactcgcagtatgtatatcgctccctacatgctcctcgcgccccgccccctctcgtagaatcccattggggttggaaaaagacccgcctgttctctcagaccttgtcttggtttgtcaaaacagtggcgccctgattatacatggtatgagttgagcttatacaagaacccgggtgtttatatgaggaacaaccaagggctcttcgttacaaccgcgctccgacgaaggagacagtagaaatatttctttcgggcacccccgttggcgatttctttgattgtggcgtgggcgcccatgtttatatagtcaatgtataggaccgatgataagactccgctacgtgattctatatgcgaggacccatctggcccgcaagaagattgctcgccccagagcaaggtttgagagagcccctgtatacacaaaacgacaaacaaaaca

SEQ ID NO: 644555 - DNA, 856 bp, Homo sapiens
  misc_feature (472)..(472): n is a, c, g, or t
  misc_feature (490)..(491): n is a, c, g, or t
  misc_feature (505)..(505): n is a, c, g, or t
  misc_feature (517)..(517): n is a, c, g, or t
  misc_feature (533)..(533): n is a, c, g, or t
  misc_feature (535)..(535): n is a, c, g, or t
  misc_feature (542)..(542): n is a, c, g, or t
  misc_feature (545)..(546): n is a, c, g, or t
  misc_feature (555)..(555): n is a, c, g, or t
  misc_feature (561)..(561): n is a, c, g, or t
  misc_feature (572)..(572): n is a, c, g, or t
  misc_feature (576)..(576): n is a, c, g, or t
  misc_feature (589)..(590): n is a, c, g, or t
  misc_feature (610)..(610): n is a, c, g, or t
  misc_feature (620)..(620): n is a, c, g, or t
  misc_feature (628)..(629): n is a, c, g, or t
  misc_feature (637)..(637): n is a, c, g, or t
  misc_feature (641)..(641): n is a, c, g, or t
  misc_feature (682)..(682): n is a, c, g, or t
  misc_feature (848)..(848): n is a, c, g, or t
tggagtctgacattagaaagccagcgagaaggaagattcaaacaaccaaccctgatttcctgcttctccttttcatgagtgttcctgtggtctctgcacctcctttctgtcccccggcagagggcagtagagatggccggcccaaggcctcggtggcgcgaccagctgctgttcatgagcatcatagtcctcgtgattgtggtcatctgcctgatgttatacgctcttctctgggaggctggcaacctcactgacctgcccaacctgagaatcggcttctataacttctgcctgtggaatgaggacaccagcaccctacagtgtcaccagttccctgagctggaagccctgggggtgcctcgggttggcctgggcctggccaggcttggcgtgtacgggtccctggtcctcaccctctttgccccccagcctctcctcctagcccagtgcaacagtgatgagagagcgtggncggtgggcagtggggttnncgggtgtgttctcngtgatggtgggnaggggggctgggggcncnttccccnccnngtgtgggantgggtncaggtctaccncccnggggctgggtttnntagtctggggcagcgccagncctttactcncctcttgnntcatagcntggntgtgttccctctgagggctgtagagggctgagagcaagctngagagctgctaaaggcttacgtgattgcaagggttcagttccaaccatggtcagaggtggcacatctgctcagccatctcattttacagctaacgctgatctccagctccagcgatggaaccactacagaggaggtggggcccctgtgtcaaagaggccgaggggnagcaaggg

SEQ ID NO: 644556 - DNA, 289 bp, Homo sapiens
  misc_feature (210)..(211): n is a, c, g, or t
  misc_feature (213)..(213): n is a, c, g, or t
ctgttgttcccatctgcgccggcctccgtcatgaatgccttccgggccgggcggaaggggacgcggcttgtgccttacttaagtcgggggttgtaagggttcgggtggagtttcgaaagctgagaccctcgctacggggtgggggttgtgcacacacaccggtcaccgagacggctggacctgcacgccaccgctgccttttgctgctgnncntggcgaccgccgcagggacggggactggccctccttgcaggtcggtttggtttgttgtaaataaaagtatttaatt

SEQ ID NO: 644557 - DNA, 129 bp, Homo sapiens
gctggctgcgttatctgataacaactctggagatcacaattttaaggattacataatcataacaatattgtttgttctgccgaagatgattaatctgaccaagtgactgaattatcttggggactctcc

SEQ ID NO: 644558 - DNA, 393 bp, Homo sapiens
  misc_feature (86)..(86): n is a, c, g, or t
  misc_feature (153)..(153): n is a, c, g, or t
  misc_feature (159)..(159): n is a, c, g, or t
  misc_feature (177)..(177): n is a, c, g, or t
  misc_feature (183)..(183): n is a, c, g, or t
  misc_feature (214)..(214): n is a, c, g, or t
tcatctgagtcaactgccatgagcggtggtccacatcatcacacaagctcttttggtgagaacttggactcccaatgaacgccggnggtggtgagcctccttctggtgctctctccaaagccatcaacgagagcttcggtagcctcgagaatnccaggnccagatgaacactgctcncgccgntatccagggaagcggctgggcctggctggtncaggacaagcaaactggcagcatcgccatcaagacctacgcggtaagttgatactgggtttctcgtggtggcagagacgtagttacttatccaagtcgcatttcagaaccaggaccccgttgttggacagttcaagcccctccttggtattgatgcttgggagcacgctattatctgaa

SEQ ID NO: 644559 - DNA, 146 bp, Homo sapiens
tacaggtttattactcgggcacattttcttcctagtaattccgcatgcagatccccagtgctgacagtcgtcgtggcactactatcacactgaatcatgaggtcatttccctcctggacctcacagatcccgcgtaccacctcgaa

SEQ ID NO: 644560 - DNA, 100 bp, Homo sapiens
tctggcgtgcacagtgtctaagaaataggttcagactctgttagaagcatcttgtaagagattccgtgctggccaagtttggaaaaacgaggatgcccca

SEQ ID NO: 644561 - DNA, 385 bp, Homo sapiens
cacatggaaattacgggagctacacgatgagatttgggtggagacacagagccaaacttcatcaaatagttcttaaaagccaaagaagcagttaataactttgaagcatttagctaacctagcatttgacctacatgattcagcccacatatttacattttaaagacatttgtattttaccaattatttttaaaacagcctttatttcttaaagattatagtcatgtgaactgaaaaggtattacagcttttatttttcttcaaaaaatatttgatctaagtgcttattttcctagagcttttttatataaacatcacgccataagaaatataaaattacacagatgaacaaaggcaaattcagtacttgtaagatttttcattt

SEQ ID NO: 644562 - DNA, 473 bp, Homo sapiens
  misc_feature (18)..(18): n is a, c, g, or t
  misc_feature (70)..(70): n is a, c, g, or t
  misc_feature (77)..(77): n is a, c, g, or t
  misc_feature (137)..(137): n is a, c, g, or t
  misc_feature (430)..(430): n is a, c, g, or t
  misc_feature (450)..(450): n is a, c, g, or t
  misc_feature (457)..(457): n is a, c, g, or t
aagtaagcagaaggaggngaaattaaaattggagcagaaattcaatgaaattgaaaacaggaaattaaantgggganaattcaatgaaacccaagagttatttctgagaagatcagtaagccctcttaccaagcttnataaaagagaagaccacaaattactaataccagaaacagggcatatctagctgggcatggtggctcacacctgtaatcccagtactttgggaggccgaggcaggtggatcacttgaggccaggagttcaagaccagcctggccaacatggcgaaaccccatctctactaaaaatacaaaaaaaaaaaaaaagccagcgtggtggtgcatgcctataatcccagctactcgggaggctgagacacaagaatggcttgaacctaggaggtggaagtagcactaagccaagatcgnccactgcactccaaccttgngtgcagncaaagctctgtctcag

SEQ ID NO: 644563 - DNA, 137 bp, Homo sapiens
tggacagcacagaaggaggggtcatcctcatgaaaaccagattgcttgtagaggtctgggggtctgtctggtacgtctgtgcgtgtctggtgtaccgagcctcgcaacttcgtaactcatggatcattagcttgttt

SEQ ID NO: 644564 - DNA, 673 bp, Homo sapiens
gcaaagttggttgatggtgaccaagcttgcttcactgccatcagaggatgactatccagtttttgtttaactgtcctatcacggcctctccgtgtcaccccttttgaagagtggccagaacttgaaggtccacttcctctgtaaatatcccagtattaagccccggaacttttaggataaccccgatgcgctttaatttgttgtttaatatgttttgatccccaggacttctagaataaaccccagatgctctttcatattcttttaatacatcttgatccaccagctgggggaaaaaaagctttttaattctataccttcctagtagataagtgaagagccgggaaagagaccctttaaataattttgctataaaaaaatttgtgataagtttctatccaaaatggggagattgccagaaaaggcttcccttggctccccaggaggtgtagccggtgtgagccaatattagtgccctgtgccctttcacaccgggtttgccatttatccagtctgttttcccgatgatgtgtacatgaaagagtaccccatgtgaagagaagagagaatgattgaaaatgttttagtataggactcttcttgccgtgggttgctatttttctagattttactttttagggaaccaaattaaatccccttgttaaaactggga

SEQ ID NO: 644565 - DNA, 720 bp, Homo sapiens
  misc_feature (24)..(24): n is a, c, g, or t
  misc_feature (137)..(138): n is a, c, g, or t
  misc_feature (148)..(148): n is a, c, g, or t
  misc_feature (172)..(172): n is a, c, g, or t
  misc_feature (270)..(270): n is a, c, g, or t
  misc_feature (291)..(291): n is a, c, g, or t
  misc_feature (315)..(315): n is a, c, g, or t
  misc_feature (404)..(404): n is a, c, g, or t
  misc_feature (410)..(410): n is a, c, g, or t
  misc_feature (456)..(456): n is a, c, g, or t
  misc_feature (476)..(476): n is a, c, g, or t
  misc_feature (485)..(485): n is a, c, g, or t
  misc_feature (503)..(503): n is a, c, g, or t
  misc_feature (521)..(521): n is a, c, g, or t
  misc_feature (537)..(537): n is a, c, g, or t
  misc_feature (544)..(544): n is a, c, g, or t
  misc_feature (551)..(551): n is a, c, g, or t
  misc_feature (553)..(553): n is a, c, g, or t
  misc_feature (606)..(606): n is a, c, g, or t
  misc_feature (617)..(617): n is a, c, g, or t
  misc_feature (625)..(625): n is a, c, g, or t
  misc_feature (705)..(705): n is a, c, g, or t
gcctacctcgggggactgtctgtnctcaaaacgggctgagaaggcccgtcagggcccaggtcccacagagaggcctgggatactcccgccaagcccgaggggcagactgggcagttgggagcccccattgtgccccnnaggtgtgtcncaggctgaaggaggggcctgaggnaccgcatgcctgcaacccccagggctgcggttcactaactttttacagaataaaaggaacatggggatggggaaaaaagcaccaggtcaggcagggcntttgggccccagatcccaggngggccagggctcaggatgccagcnccaccctagcagctcccacagctcctggcacaggaggctgccacggattggcacaggccgctgctggccatcacgccacatttggagancttgtnccgacagaggttagcttggaggagctcctcatgggcacacactgtncgaacacagatcttcttgtnaatgacgtncacacggcggaggctgtngaagcagacctcgttganacactgtctgcaaggnctgtctntggagtngnggcgggtgcccgggtactgttcctcacggcagtgaagaggcccaggctctgtnggctccagcgntgcatttnctggttctggggttggggctgggatgacttcctgttggacttgctgctgggactggaactggaactgttcctcggagggncgaggagtgacctct

SEQ ID NO: 644566 - DNA, 572 bp, Homo sapiens
agttccgggtcccccactccgtacggtattttggccattctggccgtagctagaggtgctgggggggttggttaacatgggaactactcagctttctttcagtcaacccataagcaaatcagataacccacggactatgagaattactttatatagataattctggacggtaaaacatttggaccagggttttacaacatgtacataagaatacacataattcaactagagattggaagaatgggctggtctcgttataacaaccacagtacgaaacatttctacttggagagaatttcaactattctcttaatgtggtgtcacatggattaggtaactaaaaagcgcaaatggtgggcaggtttggctggcccatggtcctatgtcttggtgggctgggtggtattttcataaactaaagcggcctatgtttctttttaaagctcgcattcccagaatcagattaggcttctatgaattcagccggtttctaaaagctgaaaatctcagtttacaaatcaaaatgttaacacaaagctaagattcatcagagcccaccctatgctacggac

SEQ ID NO: 644567 - DNA, 640 bp, Homo sapiens
  misc_feature (5)..(5): n is a, c, g, or t
  misc_feature (64)..(64): n is a, c, g, or t
  misc_feature (118)..(118): n is a, c, g, or t
  misc_feature (185)..(185): n is a, c, g, or t
  misc_feature (219)..(219): n is a, c, g, or t
  misc_feature (228)..(228): n is a, c, g, or t
  misc_feature (286)..(286): n is a, c, g, or t
  misc_feature (288)..(288): n is a, c, g, or t
  misc_feature (294)..(295): n is a, c, g, or t
  misc_feature (304)..(304): n is a, c, g, or t
  misc_feature (312)..(312): n is a, c, g, or t
  misc_feature (317)..(317): n is a, c, g, or t
  misc_feature (324)..(324): n is a, c, g, or t
  misc_feature (331)..(333): n is a, c, g, or t
  misc_feature (342)..(342): n is a, c, g, or t
  misc_feature (348)..(348): n is a, c, g, or t
  misc_feature (350)..(350): n is a, c, g, or t
  misc_feature (378)..(378): n is a, c, g, or t
  misc_feature (381)..(381): n is a, c, g, or t
  misc_feature (383)..(383): n is a, c, g, or t
  misc_feature (385)..(385): n is a, c, g, or t
  misc_feature (391)..(392): n is a, c, g, or t
  misc_feature (395)..(395): n is a, c, g, or t
  misc_feature (399)..(399): n is a, c, g, or t
  misc_feature (409)..(410): n is a, c, g, or t
  misc_feature (413)..(414): n is a, c, g, or t
  misc_feature (416)..(416): n is a, c, g, or t
  misc_feature (427)..(427): n is a, c, g, or t
  misc_feature (438)..(438): n is a, c, g, or t
  misc_feature (445)..(445): n is a, c, g, or t
  misc_feature (454)..(455): n is a, c, g, or t
  misc_feature (468)..(468): n is a, c, g, or t
  misc_feature (478)..(478): n is a, c, g, or t
  misc_feature (487)..(488): n is a, c, g, or t
  misc_feature (492)..(492): n is a, c, g, or t
  misc_feature (495)..(495): n is a, c, g, or t
  misc_feature (497)..(497): n is a, c, g, or t
  misc_feature (516)..(516): n is a, c, g, or t
  misc_feature (521)..(521): n is a, c, g, or t
  misc_feature (558)..(558): n is a, c, g, or t
  misc_feature (563)..(563): n is a, c, g, or t
  misc_feature (574)..(574): n is a, c, g, or t
  misc_feature (629)..(629): n is a, c, g, or t
tgacnagttgcatcgcttctttacaatgacttcattttgtcacattagtcttttgctgtcaggnaaacaatctacagtttctctttagatctctcaagaaaaaagaaaagcgaaaggnttgttcttcaagaaaacttcctgtgtgtatcaaattcaaccatattttaaagctattctgactgtgnaaatgagcattattcataagttgccttaaaaaanttcaaggtngtttggtttttaccactgtatcaaatagtacttggcttcctattagggggtgggtttntnataagnngttatgagncattgatnatttntttgggntgcttgnnnctcttttcnccttangngtcactgtttttttcatgtttcatttgntgntngntcctgnnttngggnatggcggctnnttnncntcctcttcctngggttttcttnggctccnagggttgcnnttctcagggcgcngcttgggggnaactgcggnngggnctnanctctcacctcctttcgccncccgnttactcaataaaggtgtaaaaatgctatacaaatatntacanatatatttggncagcatatgtacgtatatatgtatatatattacatacagagttgttaagggagancaaagtcacgc

SEQ ID NO: 644568 - DNA, 806 bp, Homo sapiens
agagctcgcttgtccctgccaagcccgcggatgtccggcctcaggatagctgcactccgacggcttcgctcctccttagccctactgcgcctctgtctggcgcctcaccgttaccgcgggtcggccatgacaagcacatgactaagggctgaagaagtggtcgacccctcggggagcgagatgcgctgagctggtcctgggggccctgcaacccctcagcatgcataggattcgcggtcgtgaggtcttccgacgacgggtcacctgacgggggcaccagaccctagcgcattccggtgcacgggtgcccgtgcaaactggaagtataggagtttggaacctgacctgcaagtacaaagtgttgagaacatggcggtgcagttgtgatgggggcacaggctacacaagagtccgctcaaggcacccttgaagataggcgcgctacaatgcgtctagtgaccaggagaccatccgcgtcaccaagccctgcacccgccaagaccagagagcaaaggcacaaagcgcaagaaacgggaaggcgaataggagcatagatcgccaagccggtgggactgacagaaggaggcccgcatcgcgatgtcactactggggccatggcccacgccctccctgctctcaggccacgagtatgtgacacagccagtgccttctgtctgctcgttagctgtaatcaatcatgccctgccttgtccctctcactcctcagccccacccctaagtgcccaaagtggggagggaaagggattctgggaagctagagcctcccccaagcatggaggcccata

SEQ ID NO: 644569 - DNA, 434 bp, Homo sapiens
ctcggctaactgcaactccacatcctgagttcgaatgattctcctgcctcagcctccccagtagctgggattacaggcgagtgccaccatgcccagctaatttgtattttaagtagagatggggtttctccatgttggtcaggctggtctcatttcttttctcatcatgatggcaaaatgatggtacaactctttttcaaagtaagtcttatgccacctgtagtgtcatttgatctaaatgactttatcttatttagttttattttacccatcacaagaaccatgcatgtacatttatagaaaatcaagacgaacgaacaattaataattcacccatagacctacccaaagacaacaactgtaagagtaagggaccctttctcactagtccgtatttcttttctccatgtagctataagtaaagtacacgtgat

SEQ ID NO: 644570 - DNA, 136 bp, Homo sapiens
attcgcggccactactaataaatttatcattttgaaataaaaatttattgtctttctggcctatggactcagctgtagatgactgaagtcgcttaacaggacggatttaagtggaggtgatatgtccagtcaccgg

SEQ ID NO: 644571 - DNA, 278 bp, Homo sapiens
  misc_feature (16)..(16): n is a, c, g, or t
  misc_feature (273)..(273): n is a, c, g, or t
tgggccttgaacctcnttggcccctcaagcagtccctcccttccctaggccttcccaaagtgctgggattacaggcatgatcccactgagatgatatctcattgtagttttgatttgtaagaagtggaaagttttgatttcagattagtacacactggttttctaacaatgaagaaaacacaaaacctgacatgtggaaagagtcaagccagagagaggggacattagtgatctctggttttcaaatggttcatgaaaaccttcccctttatntgaaa

SEQ ID NO: 644572 - DNA, 142 bp, Homo sapiens
acgcaacgatcgaagtattaatcccagcaagcacaactagcagctgttggagaaattcaaagttcaaggtgaagctgtctcaaagcattcaagaaaacacacagaactcccaactgtcacaagcaggcagagtgtaagcagg

SEQ ID NO: 644573 - DNA, 153 bp, Homo sapiens
taacacgtctcagtaataactgttcaactgattgtgcaatatccccgagaaatatcccaatgggctcattcttcctcagaaggccgataggctactagactctactagtccctaactcttatccacgtgtcactgaaagggtttcccgagcat

SEQ ID NO: 644574 - DNA, 938 bp, Homo sapiens
gcgggacccgcccgcccgcgggagaaatgtgctgaagtgctgctgaaagggccagagatgcaaggattgggatacattttgaacctttaagctgtctgacattgacctcctttcattattaataaagaagaatcaggagcttaggatgtattaacaccaactcattaatatactcaaccggcacaatgttctcacaacaccaaattctcaccattgtaaaaggactggcattggcaccaacaatcaacacatcaattttcattttattccagcttcatacatcatgcacctcgcatggcaggcaacacatttgcatcacagccatgcagcagcaagcaccattccttcttccatggtccgggttcaccagccaatggcacagcttcttgccttagcagctgggccgttggaaggggcaacgtctatgtaaatcacggagactgccgcgctggcgtgtcacttctttgaagctgcagttcaagttggaactgaagacctaaaaacacttagcgctatttacagccagttgggcaatgcttatttctatttgcatgattatgccacaagcattacgaatatcaccatcatgatttaacccttgcaaggactatcggcagaccagctgggggaagcgaaagctagtggtacactctgggaacacacccttaagaagttctcggggaatctgaacgaagccataggttcggtgtccaggcgctccctagtatatttcccgatgagtttactggacctggctgggttgacacgccggaaggccctgcccatcctggggaaccggtgtcctggcctcgcggatcagagtttaggtctgggccgtgcgtctcttggatggttggagtatgttccgtcatacttgatccattttccttttggacaccttgatttcttgtggcacaaccatcattcggcatgcaggg

SEQ ID NO: 644575 - DNA, 743 bp, Homo sapiens
  misc_feature (365)..(365): n is a, c, g, or t
ggtcggtacctactttccacaggataaaaggtttctagctctgttctggctggaaagtgcacgaaagctgagtttaatcaataaataagagttgtagctactaaattcctctccacctggccccagcaaaggatacatttacatctcattccccaaatgtaggacatccaaagaccagaggtcccatgagacgccacttcttcaaatgccgacattttgaagaacacacaccaagatatttccaaagccctgaccacatacgtggtcagggaaaatgcttaaagcttcagctcctttcagaaaagcaaaaatcaaaccagacttatagcactatcggccagtaatggttaagctcacatgatgtncaaggcattcactgggctaggagggagaaataaagaaatagccctgtctgcaaggagcagatgatctcaatatcattataaggcccaaataaatgaattatggtcttagacaagtcaacggctccccacaagatgaaagcacaaggtcacactcaatgaaatagagatgaactgaattcttgtgaggacataggaattcgaaaaggaatggcatcatgagctgggctggctggagacagatttaagctttgaaaactgtggtcaagcagaaaagagataagaggacatacggagagaagtaaaaaggggaagtagaagaagcggcccctgagattccagggaacttggttccaaatggtaggacaagtggccagcggc

SEQ ID NO: 644576 - DNA, 177 bp, Homo sapiens
  misc_feature (63)..(63): n is a, c, g, or t
  misc_feature (94)..(94): n is a, c, g, or t
  misc_feature (135)..(135): n is a, c, g, or t
ctgctaaactaaaagtaaatggaagaaaccaagtctagtaggttttttctttttttttgtggnggtgggatgggggaggttagttacacttaanatatcttctccagagactgtatgctccaatactagactgtnagctctttgagggcagtctgtcagatttatctttgtatcttc

SEQ ID NO: 644577 - DNA, 270 bp, Homo sapiens
accgactggtacccaaagtgctgggattacaggagtgagccaccgtgcctggaccaggttatacttataaactgtacagaccatctcacattgcatccttcgctcatgcactgtaatgttcaatctataccttatctctaccacatcatcttacaagaaccacccaggtggtatgtactcactgacgtatccaccattccccttagacatgatctctctcctctgatttcctgtggtataatcacaacatgcatgataatctttaccaca

SEQ ID NO: 644578 - DNA, 265 bp, Homo sapiens
tgcttgcccgctccagaatctcagttgttcttggagaatcaacgacctcacccatcaattcagagctcaatggaaacaagagcgttacccgaaaataacacaacgccatgtactcaatgaaaaatctaccactttccacagataacaacaaatcaacaacacacaacactctcacctgctaacacgacaagctaaggcgtcagtgaagaatccaccacctcccacagtcgaccattgctcaatgcacacaacatcattccctgac

SEQ ID NO: 644579 - DNA, 152 bp, Homo sapiens
agaaacagagaaatttcaagagaggagaagcagaacactgagagaaaaagctgcagcagaagagcctgctggcagaacagtggtcagatctgctggctcacttggagaacacacacagtgaccacttcataaccctcaggtggtgtgactcg

SEQ ID NO: 644580 - DNA, 144 bp, Homo sapiens
gacccgtctgtggagcgagatgtgtagacagtctctgaacactcactgctttcacataataaccactctagaacatctctgacttacctttacttcctctcccactcccaaggtcgagactgttcgaactacaacgcctcactc

SEQ ID NO: 644581 - DNA, 533 bp, Homo sapiens
  misc_feature (8)..(8): n is a, c, g, or t
  misc_feature (190)..(190): n is a, c, g, or t
  misc_feature (204)..(204): n is a, c, g, or t
  misc_feature (297)..(297): n is a, c, g, or t
  misc_feature (313)..(313): n is a, c, g, or t
  misc_feature (351)..(351): n is a, c, g, or t
  misc_feature (394)..(394): n is a, c, g, or t
  misc_feature (426)..(426): n is a, c, g, or t
  misc_feature (521)..(521): n is a, c, g, or t
aaggcttncaatgacattgaatacattttcaagaaattaatatgaaacattaaaatttacttcaaaaatccaaagttttctagatcattcccatctcacgctgctttagaggtcagtccacacctgctgtgtccagatgagcggctggaatgctgaacactgccgtgttccagccctaacgctgggcgcnggtccctctctccnaagcccacggctgggcttcccctgtccccagggtcatggcggacttcaagccagggcggctgcccagaatcacactcagggtttttggacgcncaagtgcacagaggcngaggtgcccagacgagggtgagcggggagagagaggcntgggagaacgtgcccaggctgggccagggggctgcgggaagcncctgacgggcagaggagaacgtgtggggcctnccttatcgatctccagcagaggagggcaactgcgtgtgccaaactcagagagcagtgactcaaaaaaaagaaaacagggcagcagtgaccagganaacagggtccga

SEQ ID NO: 644582 - DNA, 762 bp, Homo sapiens
  misc_feature (271)..(271): n is a, c, g, or t
  misc_feature (378)..(378): n is a, c, g, or t
  misc_feature (408)..(408): n is a, c, g, or t
gattcaatcttgcctatttggtacagcgaagggaatgagactctgggaagatctagatgacctgggcccgtcgttatcgcatatgatatttgctagcctctctgctgacgagtacacctataaccatggccttgccgtccgcttatagatgactagaaactagaatttcgtgcacacaacccacgtagatctcttatagatagttatcgagctgggtaagagggcagtttactaacagcagtaacctggattccagtcgaacgtgttcgtntagtgctgctgcaggtttgtcgccctggagtgcaatccttacaaatacattcggtattgaccgttatttaacagcgcatactagttaacataacgtgttactttgtntggcaactctaacaccaccgtattgcgtanctttactttgggcatgtcaagttatatacgtgacattctaatagagaggcgcttgtaatttcatccgaaaaatctcgtcattaatcagaggtgttaagaatgcatatgactcaagggtcgtatagacatttggcaaatctattttcgaatgataccctagtggtgatcagtggcgttctaaacttctaatctttgggatttaggcattaaagaattttctattgtgatacaatgctctgggaatagacacctgcgcatagtataatatcaggtcattattctttgggaaccgtggatttggaacgtcctgaaaggaaccttatacattattcttgtggttgtgctttactagag

SEQ ID NO: 644583 - DNA, 338 bp, Homo sapiens
  misc_feature (22)..(22): n is a, c, g, or t
  misc_feature (237)..(237): n is a, c, g, or t
  misc_feature (274)..(274): n is a, c, g, or t
  misc_feature (280)..(280): n is a, c, g, or t
atgagatggaatctagctcttncgcccaggatggagtgcagtggcgcgatctctgatcactgcaacctccgcctcccgggttcaagtgactctccagcctcagcttccagagtagctgaaactacaggtgagtgccaccacgcccggctaattttgtttgtatttttttagtagagacagggtttcacagtgttagccaggatggtctcgacctcctgacctcgtgatccgcccgtntcggcctcccaaagtgatgggattagaggcgtgacanccgtgnacggcggaaaacgagatttttagatcaactttacatgccaatgcccatggtatttcct

SEQ ID NO: 644584 - DNA, 492 bp, Homo sapiens
  misc_feature (111)..(111): n is a, c, g, or t
  misc_feature (119)..(119): n is a, c, g, or t
  misc_feature (139)..(139): n is a, c, g, or t
atccattgtggacacatgtgcctctcctatcagagactgctatccagacattcatcttccacctaaaaatgcacttctgctgttgactgcaggccaatgttcccaggatanacagggtnacatccaactgtacttgccncaacttgcctttggggatcaagaaggaagttcccccgggtgggtggtagaactggaagtagtgtcacaggccatgggctcttttgcatttctcttactgtctctcacttggcctgaatgatttatcacacgatcagttgcaactgccaaagtttgggagcactacattgatgtgaagttctggagacaaaaagggacacaaacagataaaggtagagaagacaaaagggtgaaagagagggctaacgactgggagaaagagagcagaaaaaaaaagaaaaagtcgacgcggccgcgaatttagtagtcatgggcgggcggtctagagggaccacgcttacttacccgtgcatg

SEQ ID NO: 644585 - DNA, 291 bp, Homo sapiens
  misc_feature (13)..(14): n is a, c, g, or t
  misc_feature (46)..(46): n is a, c, g, or t
  misc_feature (54)..(54): n is a, c, g, or t
  misc_feature (88)..(88): n is a, c, g, or t
  misc_feature (97)..(97): n is a, c, g, or t
  misc_feature (111)..(111): n is a, c, g, or t
  misc_feature (153)..(153): n is a, c, g, or t
  misc_feature (160)..(160): n is a, c, g, or t
  misc_feature (164)..(164): n is a, c, g, or t
  misc_feature (175)..(175): n is a, c, g, or t
  misc_feature (180)..(180): n is a, c, g, or t
  misc_feature (208)..(208): n is a, c, g, or t
  misc_feature (218)..(218): n is a, c, g, or t
  misc_feature (224)..(224): n is a, c, g, or t
  misc_feature (243)..(243): n is a, c, g, or t
  misc_feature (248)..(248): n is a, c, g, or t
  misc_feature (258)..(258): n is a, c, g, or t
ttaaatcagagtnnctatcaactgattcagcgttttgttgttttgntcttggcnataatacttgtggcgcatgaagaattatgttganaaacagganaaattccacatgcnttttatttcccagtgagttgtataaactttatttttgttgangggtgtntgtnaaatcaatgtnagcantgcttatatcacttcttgagaaggaagntccgatttgnaattgnatcatttccttcaaaatgnagggnagtgcttagntaaataaaagattgatgatatcttttaagccag

SEQ ID NO: 644586 - DNA, 261 bp, Homo sapiens
attctgtgcctttctaggcccagtctactctggaggctgaggtgggagaattgctttagcacaggtagttgggatgctgcagttagcttatatcgcaccattgtactccttcctgggctacagaccaagatccggaagctcagtgagatactcaggaatacagacggactatactgtgaaatgagaaatgctatccaggatatatgatgagacattttccaaaaatagcttataaggaaaaaatgcaaactgaattttctg

SEQ ID NO: 644587 - DNA, 201 bp, Homo sapiens
  misc_feature (51)..(51): n is a, c, g, or t
ccttcccggtttttcaaaaagggggccccgtggggaagtccgtgggccccncaaaatgttttttgggttccgcccccccccccccccccggggggtgggggtggggggttcccggggggggggttttttttggtttcccaaccctttagccctttttgggggggccggggaaccccccattaattttttttttggcccgga

SEQ ID NO: 644588 - DNA, 445 bp, Homo sapiens
cgggtgtgcagacaatatagcagtggtgcatctcggctcacgcagctcaagcttccggttccagtgatcctcccacctcagcctcccaagtagcgtggaaccacaggagggtaacaccacaaccagctgattttgtattttaggtagaggtggggtttcactacgttccccaggctggtcttgaactcttgaactcaagtgatccacctgcgctggcctcccaaagtgctgggattacccgcctgagccactgcggccagtccagtgggcagtgttttcttttttttcttttttcttttttttttttggagagggagtctcattctgtgtggcccgggtgggagtgcagggccgcaatggtcgggctcacagccacctcggcctcgggtgtacaggcgatcccgggcaacagcctccaaggcagcgggggtaacgggaccaacaa

SEQ ID NO: 644589 - DNA, 291 bp, Homo sapiens
gtttcccctctgaacaggctgaggagtgcttcttggtgtcaataactgaggcaaagtaaaattgttttttccctttcaacatgaccaattttctaagactgaatatagaactggaaatctgcagggtgtgtttcttttgcggcaacggtagccaaggttactgctttgagttggtctgcagggacagaggattaaaatttactgtctataaacagaagaaggcctaaagccagagctcctttatttccagcttgtgtcatggttttataaaatgaaggacccttaccacaa

SEQ ID NO: 644590 - DNA, 856 bp, Homo sapiens
  misc_feature (15)..(15): n is a, c, g, or t
  misc_feature (80)..(80): n is a, c, g, or t
  misc_feature (88)..(89): n is a, c, g, or t
  misc_feature (98)..(99): n is a, c, g, or t
  misc_feature (104)..(104): n is a, c, g, or t
  misc_feature (121)..(121): n is a, c, g, or t
  misc_feature (152)..(152): n is a, c, g, or t
  misc_feature (158)..(158): n is a, c, g, or t
  misc_feature (161)..(161): n is a, c, g, or t
  misc_feature (165)..(165): n is a, c, g, or t
  misc_feature (179)..(179): n is a, c, g, or t
  misc_feature (183)..(183): n is a, c, g, or t
  misc_feature (185)..(186): n is a, c, g, or t
  misc_feature (188)..(188): n is a, c, g, or t
  misc_feature (203)..(203): n is a, c, g, or t
  misc_feature (206)..(206): n is a, c, g, or t
  misc_feature (208)..(208): n is a, c, g, or t
  misc_feature (211)..(211): n is a, c, g, or t
  misc_feature (214)..(214): n is a, c, g, or t
  misc_feature (216)..(216): n is a, c, g, or t
  misc_feature (219)..(219): n is a, c, g, or t
  misc_feature (222)..(223): n is a, c, g, or t
  misc_feature (225)..(225): n is a, c, g, or t
  misc_feature (229)..(230): n is a, c, g, or t
  misc_feature (233)..(233): n is a, c, g, or t
  misc_feature (235)..(236): n is a, c, g, or t
  misc_feature (239)..(240): n is a, c, g, or t
  misc_feature (242)..(242): n is a, c, g, or t
  misc_feature (244)..(246): n is a, c, g, or t
  misc_feature (248)..(249): n is a, c, g, or t
  misc_feature (253)..(253): n is a, c, g, or t
  misc_feature (259)..(262): n is a, c, g, or t
  misc_feature (264)..(266): n is a, c, g, or t
  misc_feature (271)..(272): n is a, c, g, or t
  misc_feature (274)..(274): n is a, c, g, or t
  misc_feature (278)..(278): n is a, c, g, or t
  misc_feature (280)..(281): n is a, c, g, or t
  misc_feature (283)..(283): n is a, c, g, or t
  misc_feature (289)..(289): n is a, c, g, or t
  misc_feature (291)..(291): n is a, c, g, or t
  misc_feature (293)..(294): n is a, c, g, or t
  misc_feature (296)..(296): n is a, c, g, or t
  misc_feature (305)..(305): n is a, c, g, or t
  misc_feature (346)..(346): n is a, c, g, or t
  misc_feature (349)..(349): n is a, c, g, or t
  misc_feature (352)..(352): n is a, c, g, or t
  misc_feature (356)..(356): n is a, c, g, or t
  misc_feature (358)..(358): n is a, c, g, or t
  misc_feature (366)..(366): n is a, c, g, or t
  misc_feature (384)..(384): n is a, c, g, or t
  misc_feature (386)..(386): n is a, c, g, or t
  misc_feature (391)..(392): n is a, c, g, or t
  misc_feature (400)..(400): n is a, c, g, or t
  misc_feature (409)..(409): n is a, c, g, or t
  misc_feature (414)..(414): n is a, c, g, or t
  misc_feature (416)..(417): n is a, c, g, or t
  misc_feature (422)..(422): n is a, c, g, or t
  misc_feature (431)..(431): n is a, c, g, or t
  misc_feature (440)..(440): n is a, c, g, or t
  misc_feature (442)..(442): n is a, c, g, or t
  misc_feature (449)..(449): n is a, c, g, or t
  misc_feature (455)..(455): n is a, c, g, or t
  misc_feature (457)..(458): n is a, c, g, or t
  misc_feature (461)..(461): n is a, c, g, or t
  misc_feature (467)..(467): n is a, c, g, or t
  misc_feature (478)..(478): n is a, c, g, or t
  misc_feature (480)..(480): n is a, c, g, or t
  misc_feature (482)..(482): n is a, c, g, or t
  misc_feature (484)..(485): n is a, c, g, or t
  misc_feature (490)..(490): n is a, c, g, or t
  misc_feature (494)..(494): n is a, c, g, or t
  misc_feature (497)..(497): n is a, c, g, or t
  misc_feature (499)..(499): n is a, c, g, or t
  misc_feature (501)..(501): n is a, c, g, or t
  misc_feature (521)..(522): n is a, c, g, or t
  misc_feature (667)..(667): n is a, c, g, or t
  misc_feature (669)..(669): n is a, c, g, or t
  misc_feature (759)..(759): n is a, c, g, or t
  misc_feature (834)..(834): n is a, c, g, or t
accgcagcggcggcnacggctactgggacggcggcggggccgcgggcgctgaggggccggcgccggcggggacactgagncccgcgcnnctcttcagnnccggnacctacgagcgcctggngctgctgcagggctccattgggctgctgggngaaggnaanaacntgctggtgctcgtnctcnannanaagttcaagaggctncgnantcncantnaantcnncntggnnaanannagnntnannnanntgcnggtgtnnnncnnnggggnnancttnanntncgtgtncngnntnaagaacggntgggtgtgggaaaccagtagggaagcgtgtgggaagggttnaanggnagcntnttcgaatnattgtgaggaaaaaatananaaaannaaagtaanaaaaatttnaaaanannaaaanaaaaagganaaaaaaagnanaaaaaanaaaaanannttnctggtntgtaggatgcntnananngaaanaagnatnangntggttaaaagtaaaggtcanntggaaactccaacaatatctatagtatcgtacctctttgctaaatcgaacactgtatacaatccagtgatttatgtcttcatgatcagaaagtttcgaagatcccttttgcagcttctgtgcctccgactgctgaggtgccagangnctgctaaagacctaccagcagctggaagtgaaatgcagatcagacccattgtgatgtcacagaaagatggggacaggccaaagaaaaaantgactttcaactcttcttccatcatttttatcatcaccagtgatgaatcactgtcagttgacgacagcgacaaancaatgggtccaagttgatgtaa

SEQ ID NO: 644591 - DNA, 111 bp, Homo sapiens
gaggaccgaggaatggcgcctgttgtgcagaccctgcctcgctcacgcccccacgcacctggtctgactgctgctcaatggggtccgcctggaggtcctcctctgtgctgt

SEQ ID NO: 644592 - DNA, 1687 bp, Homo sapiens
  misc_feature (158)..(158): n is a, c, g, or t
  misc_feature (335)..(335): n is a, c, g, or t
  misc_feature (939)..(939): n is a, c, g, or t
  misc_feature (1440)..(1440): n is a, c, g, or t
  misc_feature (1477)..(1477): n is a, c, g, or t
gagttcggagcgcgcgccctgagccgcgcgtggcctgggagggaggctccggaggacggcactcgctagttcttggtctggtgaggcagacggcggtgtccgtggtccggagccggtcatcggcatcctgggctccgggccccgagtctccgtacgtncaggtgctctgcggccggtcgccagacgggacagatcgaggctcgtgagaactgcccgaggcagtccgtctcctggaagttcgtagtgcccgaatgaccacacacgatgttggcggcgcgtgtctaggtcaagaaggacgcactcgaatcggatctataatcacgcaggggatcggntagggactcctaaatgctctgttcatcacgcgtcgcccagacttgatcgcgaaatcaacgcatcagtcagtgagagtcctatggtgcacttggcgcgtgtctcttccttctgcgacgagcacatgacagagattctgtatgacaccccacttgagtcgaccgcgggattggcattaacataacagggacgcgagctcgtctctgtgccaacaggaccgaccaaccaaaggcggttttcccccacttgggccccaatttctcgctctagccctaagtccagcgtgcgccatgtttagccccagtagaagccccccattggattcgggcgcctggcattgttcgccatgtttttccaccgatggggcgtatcgcgcagacgggagggccgtggtgggactcgaccccccggacaacgcaaacctcgggggagaagaagctgcgctctctcaaagttcaccatggtgttcccgaagagccgcttctcctcccttatcttacggcctccgcgcgccgtgttgtacgggaccaccgccgtggggcgttcatttctgtggagcgccggttccattatccccagttcacttacgggcgcccccaaaggggncccccgccaaccggaggcctggccttttggcccatttttggggggcctttttcctggaaagccgaggggggcccttggcctttggggcggaggggcccctacgtcagcgattggaacccttttgttggtgttacccggcggcattgccatctttacccgccctccgaggagtagcgcgcttggagtgggcgcttcccccatttgaaggcttcctatcccgcctggaattggcgccggtgccccccccccaatgggggtggcttcccccttggatatagaggcaacaagaaacggttcggcctcctttgcgaggttgggggcacctcctgcgaagcggttaagcgaccaatttggtataccctgtcaccttttgcgcaccccctttgtggggcttcaaaaactatactcttctccttctcccaagagaagccaccaaaaggcgcgcgcgggaaagagtatgggaacaacccattgtggtgagacaaaaaccccgcggctgtntgggtggaacacacggcacagacacaggattaatacngcagcgtcttggtcacaccgaggcggaccacggaaacacttccttttttgtgtgggagaccgatgagccccggagaataggtcctttgtgagaggataaaacccattatgtagagaggctttatactgcgcctacgtaaaatattcgcacctttgtcgagccccgcatttctgttgtgtgtgacaaacagcggaccgtcacacagttgag

SEQ ID NO: 644593 - DNA, 228 bp, Homo sapiens
ggtcccccgcaggtgcggatatggacgtaggcttcatgcgactggctgacctcctgaatggcgatattttgatgccaggcgacgcgggctgcgccatcaggcaggcgctctggtgcccctcgccgacgctttcgagcgtcggtttcacctcggcgcacaccgctctggcgtgcgggcagcggccgcccctctttttctcgctcgcctggaccgtatttaaatgagacg

SEQ ID NO: 644594 - DNA, 104 bp, Homo sapiens
tattttccacagggtaaactatgatttaattttgatagccctgactcagcagcagaactagtacggtaggaaaaacgtatgtttgacgccctatgtaataactc

SEQ ID NO: 644595 - DNA, 640 bp, Homo sapiens
gagaatggctgtaagctggaagcggataatatgtagtgcactatgtacaatccactatcgtagtaattgaactgaattcgtgatttccttgagaatcgaaccttggttccctatccctaattgatgacgaggctcgctgctcggatggtgtgtacaaactcacctgaatgggtactttatttagacagatcttcatgaccatgttcgcgcaccgccagttgcatcatcatctcttgttacaccaatacaggtactgcagggtcgtggtaatctgtatctttcgtgccatttaggggtggagaaggtggatgtgatgacgccaataattcaggacttattaccttcttgtgtagtgtctatttatttggcaccttgcgaccatgagttatgacagataggactgtccaggagctccagcgtatagagcttggagacgtgtctgtgtgattgtaatcacttggtggctacattcagaatctaatatgggacttctgtcgtattctacaccactcagattcgtattatatagcagttaaactgggtacactgttacgagtcttccatttagccggaatcagatcctccccttgcaatatgctgtaattaacaatcacttagaaaagttgactctatatgaaac

SEQ ID NO: 644596 - DNA, 407 bp, Homo sapiens
cgtcgacgcgacacctggcacaggatagctttgtcaatgatatattttgtggcaagatctctgtgatgccctccaaggcatggttggtacctttgccacattattccagaagttttgaagcctggagtcctccagagaccacccagtctgtgcccttgtcctgaagggcatcctccctctgctgtctctgctggctactacattcctgggggatttctcccttgtgagtcagtgtggtgcacctgactgtataggtgtgtgcttctgtgtgtataagtgtgtgtgcctgtgtctgtgtatgtgtgtgtgcctgtgcccgtgcgtgtgtgtgtgtgcctgtgtatatgtgtgtgtctgtgtatgtgcctatatatgtgtgcatgtatgtataagcctgtggtcgacgc

SEQ ID NO: 644597 - DNA, 1236 bp, Homo sapiens
gctggccctgagcgggaatctgcagtggccgaggctgagcggcagtgcggatctgccccgaccctcactcctggcgtctgagtctctggcgtagcccatgctgagtgggctgggctggtcctgggtctggtctccatggctaggcctgcagttgtgtttgtgccagtgcagctgcggggatcctggggccatcgtgtccgtgtgtgagagtctgtccattctgcacgaagttgtgagtgaggccctgagccccgaggtgctagagcttcgcaacgagagcggtgtgcacgcgtgtccctgcctgggacagtgagactcacttcctgcgtggctgtgtgtgagctactcggtttctgacggtgactgagcccccacatacaagcgactagccggacatggttccacgacaggcgctgtgccagagggagcttgggaggtccgtgtccatgcgctgggcccatccaggcacggacccccgaccagtggagagagaactcgtcagctggaccactagccccgccaattgccatgggtgggaacaaggaaaacctctaggaaaccccctgaaccccaaagagagggaggaccaggatccgaatgggctgggtgagcacgaattacccgaggtccttccctttggatacagtcccaggatttgtaagggatgaaagagcccgtggagcgcccaattctgcttgggcgtacaatacagtactactccgaagtactagcaacacttgcgtatacagtgttcaacagatgatacccgatgcagaaatgagcacggccatcgagcgtcacgtaacttgctcttgtgccccttggtaccgtatttccaggacacgtggccacgccgggactgtatccgaatgttacaaactcgcgtgaacagaacttcgaaccaggacacgtgcatggaggttgtgaacacacatcctaatagcccatttaaacgggtaaaaagctaaaacagtttatcacacacaaagacaacgacgacgaaaacaagcgcacataggctagctgagacacaagatgtgggccgggtcggcatgatcatgtgagagcgctacaggcaggagaggagacgagccccgcgcgcaccgctggccccctactgtaggcatgggcacacgctagtgcggatgggagggcggcagcgcaagagaaggaaagcccacggacgatggctagcggtagtaaccaacagacgacagcaggtgacccccgggtcac

SEQ ID NO: 644598 - DNA, 85 bp, Homo sapiens
caagccccctccaccccccactcagtgcctccacatgctgcctggcacagaccaggcctttgacaaataaatgttcaatggataa

SEQ ID NO: 644599 - DNA, 1550 bp, Homo sapiens
cggacgcgtgggtcatcttttgctcattcactttctaggttctatatgctattctccttacgtaagcgttaaatagatcctttaatttgataggttcagttagtttgtgcttaattcgttgctttccaatatgcattcgttattgtagctatttagtattacaacagattggcagtacagaggtcaagtatcgtatatttactgtttgtgatcttgtcttaactatgattcaatgatatggctcgatacttcttgtggaacacttatcgagttctaaggtacagatatgtcatcaaaggtggtcagtgaacatctatgaagtagttataagttcagtaccatacatcagcaagatatagtcatatcaaccaacatcgttctattagggtataaatcttgtactactcacgtattggccgaggcattgcattaagtttattcaccaaggtagcaaaggagcacccaacactgatgtaactggtaccgtagtaatcttctgatggagcaatagaagaagctcgccctggagcaagagcgtcttcaccgtatgagagaaaacaatacacagagaaacaataatagaagcacaagcaccaatacaagacaacaagaaagaaagaagaagcgacatgatacatcaaagcaacacaaagaccacaacgaaaaagcacatcgataagcgcgcatgcaataggcgaggacagacaattacacagaaaaaaaccaacaaccacaaccagagacaacatacccgagataagatatacccaggaccacgagaagagacaatacagaaaagcacaagagacacacaaaagcaacatagagagaaagaaaagcaaaaaagagaaaccagcccagataccgtgacgagaccaccacacaagagaacaaagagaaacaaagacaggagcaaagagacagaagaacaaagagaagagagaagaaaaaacaacaaaaagcaacctagtaaaagaacaaatgaaagaagcaagaaacgaaaataaaaaacgtcgtctagctacccgggagaagaaaagaggaagacagagaaagggagcaagaaagaaggaggcagagatcgaaacagaggaataaggtaaaacgcagagccaaaaatagaaaagggagacaatataaagataacgcagaagacagaaaagagagcgtagccgaagaaagcaaaggagagacaaacaacaaggacagtaaggaagagacgaaaaagacaagatcagaagagacatagaaacatagcgaagccaaatcggaaaacaaacggggagcagagtaggaaagactcgcagagaggagacgagaacgtagaaaagagagaggaagaaaggagaaggagaaaagacaaagaacaaaaggggggcagaaatagaagaagagaagcggaacaagaaagggagagcgacaggaaagaaagcaaacagacgaacgcaggagcagcaagaaggaagaaagaggtaaacaggaacaaatggagaagataagaagagaggacaagaagacgaagcagagaaagacaaaagacgaaagaaagt

SEQ ID NO: 644600 - DNA, 207 bp, Homo sapiens
cttctgccaagattgtaagttcctgaggcctccccagaagccgagcagatgccagcatcatgctttctgtacagcctgcagaaccgtgagccaattaaaactgttttcttgactgactgtgctgctacaatctccatgttgagtccaagtactgagagaggatgtcctgtatcagttcgttctcacaccgctataaagaaatacctg

SEQ ID NO: 644601 - DNA, 479 bp, Homo sapiens
taaggttgagggggaatgctggaaatggtaatgggtatggagacatatcatataagtaatgctagggtgagtggtaggaagttttccataggaggtgtatgacgtgggtcgtagcggaactcgggggtatgctgtctcgaattcataagaacagggaggttacaagtaggggtctgggtgacacaaaatatgttgtgtcagagtctcaggggacgagtgcgtcatatgttgttcctaggaagattgtagtggtgagggtgtcatatatacataactgtaaggggtatacggagatatgaacgaaatagggcgaaaggggcctgacggcgtatacgatgtagcaccccgagactagtacggactaccccatcggaaaggcacgaagggagatccggcagggcctatgaaacatgtggacataaacatcactatcaagggccaagagaacaatgaatggcaggaagaacaccagagcgtgc

SEQ ID NO: 644602 - DNA, 433 bp, Homo sapiens
ctctcgggagtcagaatgtctgagtggtatgtagaagaatgaatcctttcgagaaggtttctcgatttactttgcctcagatccatcaactgtagtcttacgaaatatatttcttaaataatcagacttgaaagtgaaatttattccttgacccaagggctgcagaatgaaagatgccttagcaggcatgaaagtaatattaactaccttgaacatctccatcagtctagggtgaggatgtgcattgtcaatgggcagtaatattttaaaagaaatctttcttttcctgagtagtaagtctcaacagtgggcttaaaatatttcagtaaaccatgctgtaaacaaatatggtgtgactcaggcttaatagtaccacttataggacacaggcagagtagatttagcctaattctaagcagccctaacatcatca

SEQ ID NO: 644603 - DNA, 923 bp, Homo sapiens
ggctggtcggtcgtctttgagctgcgaatgcgcgtgccggcggtttgcgggcgcgcggggcgggtgcccacccagcgctcgttgcggggttgggccgcctcccggtattgggggcgcctgtgggggggcattatggtctgggtggcgatttgcgaagggggaccgttcccgcatagtctcgggcgggacgcggggtcggtttcccttcggggcgagtgttgcggacgccccttcggcgcctctaggccggcgtggccgccttggggatctacgagaggcgttgtgtaactggcgtgattatctctgcgctcttggcccgccacgtatacgtccgcgtgtccaggtggtttcagggtgggtgatacctcgctggacatgtgatagattcgcgggagcacggagaccccttgagaggactggtatgttcgcttaggcgccacgtcatgcgcacgactgctcaattaggctatgagctctctaacagggggtctcagggcctcgcttgtgtctgccgctctaggtcagggacggtatttgccaacctggttggaggcgccgtttggggctgccccgtttgtctggagtcatctgggggtcttccgtagggtcgtccctcgacccatcgtggtcgctccatgggatggcgtgtcgaggagctgtactcagccgtggaggttctgtcccctggctctgtatcaggcacctttattaaagctgggcctcatgtggcggatgtgtttgtctcctgctcattctggagcctcggaaaggaaacgggcttcaggaggagctctgtgaggctggacgggaccagatggaggaggccaagcagctagccattgcacactggggtgatgggtgcgggcggtgactgccaccagacttgtttaacacgatttacagtataaacatcgtggggtgcg

SEQ ID NO: 644604 - DNA, 1753 bp, Homo sapiens
ggccatcatggcggcggccagaggcctgcccggctcccggaagcaggctgtgaggggcgggagcgctgctggaacccgagccggagccggagccacagcggggagggtggcctggcggcctggagccggacgtgtccggggcgtccccgcagaccggggcagcaggtcgtccgggggcccaccatgctggtgactgcctaccttgcttttgtaggcctcctggcctcctgcctggggctggaactgtcaagatgccgggctaaaccccctggaagggcctgcagcaatccctccttccttcggtttcaactggacttctatcaggtctacttcctggccctggcagctgattggcttcaggccccctacctctataaactctaccagcattactacttcctggaaggtcaaattgccatcctctatgtctgtggccttgcctctacagtcctctttggcctagtggcctcctcccttgtggattggctgggtcgcaagaattcttgtgtcctcttctccctgacttactcactatgctgcttaaccaaactctctcaagactactttgtgctgctagtggggcgagcacttggtgggctgtccacagccctgctcttctcagccttcgaggcctggtatatccatgagcacgtggaacggcatgacttccctgctgagtggatcccagctacctttgctcgagctgccttctggaaccatgtgctggctgtagtggcaggtgtggcagctgaggctgtagccagctggatagggctggggcctgtagcgccctttgtggctgccatccctctcctggctctggcaggggccttggcccttcgaaactggggggagaactatgaccggcagcgtgccttctcaaggacctgtgctggaggcctgcgctgccctcctgtcggaccgccgcgtgctgctgttgggcaccatacaagctctatttgagagtgtcatcttcatctttgtcttcctctggacacctgtgctggacccacacggggcccctctgggcattatcttctccagcttcatggcagccagcctgcttggctcttccctgtaccgtatcgccacctccaagaggtaccaccttcagcccatgcacctgctgtcccttgctgtgctcatcgtcgtcttctctctcttcatgttgactttctctaccagcccaggccaggagagtccggtggagtccttcatagcctttctacttattgagttggcttgtggattatactttcccagcatgagcttcctacggagaaaggtgatccctgagacagagcaggctggtgtactcaactggttccgggtacctctgcactcactggcttgcctagggctccttgtcctccatgacagtgatcgaaaaacaggcactcggaatatgttcagcatttgctctgctgtcatggtgatggctctgctggcagtggtgggactcttcaccgtggtaaggcatgatgctgagctgcgggtaccttcacctactgaggagccctatgcccctgagctgtaaccccactccaggacaagatagctgggacagactcttgaattccagctatccgggattgtacagatctctctgtgactgactttgtgactgtcctgtggtttctcctgccattgctttgtgtttgggaggacatgatgggggtgatggactggaaagaaggtgccaaaagttccctctgtgttactcccatttagaaaataaacacttttaaatgat

SEQ ID NO: 644605 - DNA, 432 bp, Homo sapiens
  misc_feature (136)..(136): n is a, c, g, or t
agtatataattcagtgaattttgtcaaatgtatagtcatgtaattaccacccaccacaatcttatatataacatttctatcacctaaaaatttccattttcccctttgtagtcaatcccttgcccccacttctacncccctggcaaccattgatctgctttttgtcacttttgttttgtcttttctagaatttcaaataatcagaatcagatatagtcttttgcgtccagcttctttcacttaacgtaatacttttgcggtactgatattgttacatgtattagtcgttagttcctgttttacttttcagtatttgcattgtatggtcatgccacagtttgttaattcacttattggttgatggacatttgagttattttcagttttcttttgcggttatgaataaaggtactatgaacatatgtatataag

SEQ ID NO: 644606 - DNA, 102 bp, Homo sapiens
cctagggcatccttattaaactctctgtagtctctagggaacacccaatgacaacagaggatattaacattaggataccacaggtaaagtttaacttctgct

SEQ ID NO: 644607 - DNA, 2558 bp, Homo sapiens
  misc_feature (1764)..(1766): n is a, c, g, or t
  misc_feature (1769)..(1774): n is a, c, g, or t
  misc_feature (1776)..(1778): n is a, c, g, or t
  misc_feature (2147)..(2147): n is a, c, g, or t
ggccatcatggcggcggccagaggcctgcccggctcccggaagcaggctgtgaggggcgggagcgctgctggaacccgagccggagccggagccacagcggggagggtggcctggcggcctggagccggacgtgtccggggcgtccccgcagaccggggcagcaggtcgtccgggggcccaccatgctggtgactgcctaccttgcttttgtaggcctcctggcctcctgcctggggctggaactgtcaagatgccgggctaaaccccctggaagggcctgcagcaatccctccttccttcggtttcaactggacttctatcaggtctacttcctggccctggcagctgattggcttcaggccccctacctctataaactctaccagcattactacttcctggaaggtcaaattgccatcctctatgtctgtggccttgcctctacagtcctctttggcctagtggcctcctcccttgtggattggctgggtcgcaagaattcttgtgtcctcttctccctgacttactcactatgctgcttaaccaaactctctcaagactactttgtgctgctagtggggcgagcacttggtgggctgtccacagccctgctcttctcagccttcgaggcctggtatatccatgagcacgtggaacggcatgacttccctgctgagtggatcccagctacctttgctcgagctgccttctggaaccatgtgctggctgtagtggcaggtgtggcagctgaggctgtagccagctggatagggctggggcctgtagcgccctttgtggctgccatccctctcctggctctggcaggggccttggcccttcgaaactggggggagaactatgaccggcagcgtgccttctcaaggacctgtgctggaggcctgcgctgccctcctgtcggaccgccgcgtgctgctgttgggcaccatacaagctctatttgagagtgtcatcttcatctttgtcttcctctggacacctgtgctggacccacacggggcccctctgggcattatcttctccagcttcatggcagccagcctgcttggctcttccctgtaccgtatcgccacctccaagaggtaccaccttcagcccatgcacctgctgtcccttgctgtgctcatcgtcgtcttctctctcttcatgttgactttctctaccagcccaggccaggagagtccggtggagtccttcatagcctttctacttattgagttggcttgtggattatactttcccagcatgagcttcctacggagaaaggtgatccctgagacagagcaggctggtgtactcaactggttccgggtacctctgcactcactggcttgcctagggctccttgtcctccatgacagtgatcgaaaaacaggcactcggaatatgttcagcatttgctctgctgtcatggtgatggctctgctggcagtggtgggactcttcaccgtggtaaggcatgatgctgagctgcgggtaccttcacctactgaggagccctatgcccctgagctgtaaccccactccaggacaagatagctgggacagactcttgaattccagctatccgggattgtacagatctctctgtgactgactttgtgactgtcctgtggtttctcctgccattgctttgtgtttgggaggacatgatgggggtgatggactggaaagaaggtgccaaaagttccctctgtgttactcccatttagaaaataaacacttttaaatgatcaaaaaaaaannnaannnnnnannnaaaaactttttcgcccccccggccccccaaaaacttttcaaacccttccgtgttgggcgcgcgccgtcgggcgccgctttagtgtgtacgtgtacgacctgtggcgccataacgctgtgttcccatgaggagaacaccccgggcgcctaagcgacataaggtgcgctcgggtcttctcccccaatataaaaaaccgcccgggggggcaaccccggacgctgtcttgagaaccaatctccccgagagagggggagacctccccgagagagggcaccacaaaccgcggcgacatccctatctcacacacggggagagttcctcgaaggcggagagctccgcgaaatattccaaaaaatatacgccccgccngccctcgcgggggggaaccagccgcgcaccgaccggcggacgaccacagcacccgaaacacaaggaaccaacacacacagcagcagacaagggcacgacggaaccgagacaccgggacgaggacgcagcgaggaagcacgagagacacaggaagcagaagggcgcagaaggaggcaggggaaccgccgggcaagggcaggggcaaacggaccagagcacagacggaacgcacggagagcgcgcagaacggaggagcacgcaccacaccaggagagcaggagcgaggaggagcagaacaggaaggcgtcgggcgaagggaaggcaacgagagacggatcgccaagaggagagagcgggaggagagaagagggcgagagcagcggggacgcggacgggggcggacgaagcccc

SEQ ID NO: 644608 - DNA, 761 bp, Homo sapiens
taggtttgagggggaatgctggaaatggtaaggggtatggaaacttgtcatataagtaatgctagggtgagtggtaggaagtttttcataggaggtgtatgatgggccgtacggaaccgggggtatgctgtccgaattcataagaacagggaggttagcaagtagggtctgggggacaaaatatgtggtgtagagttcaggggagagtgcgtcatatgtggtcctaggaagatggtagcggtgagggtgtcctatcatcataatgtggtgtatcggtatgaagaatagggcgaaggggcctgcggcgtatcgatgtagaagcctgaggattagttcggactcccctttgggccaaggctcgaagggggtcggtgggcactcggcataggtggtggaagataaatacatattagtgcaagggtcatgatggaaggagtaatcagaggtgtaacttggtgtaggaccaaggcgggaagaaggtcaacaggagcacctctctacaagtgtctgatagtaccacggatcggcgtcggaggacatacatacatgacacctgttggccgctactttcacagacaaatgcgacagaaacacggaccatcataggacacctagaaagtcaacaccttgtaccacacgacttgcgctccacagcgtatcgcagaccgtcgctacaacaatacagcacacagcataagcgcacagggcatagactaggcaaagaccaaaaacaccacaagctaacaacacctcggaaccaa

SEQ ID NO: 644609 - DNA, 2273 bp, Homo sapiens
  misc_feature (399)..(399): n is a, c, g, or t
  misc_feature (463)..(463): n is a, c, g, or t
  misc_feature (465)..(465): n is a, c, g, or t
  misc_feature (467)..(467): n is a, c, g, or t
  misc_feature (498)..(498): n is a, c, g, or t
  misc_feature (517)..(517): n is a, c, g, or t
  misc_feature (526)..(526): n is a, c, g, or t
gaacatagatgggagggagaggagcaggggatgaagtcagaggagtggcagagggtcagaggacagagggtcttgtaggccattataaatacttcggcttttacccttagtgagatgggaagtcatggaggctcttgaggagatgatacggaagctgtagagaggttaaatagtttttccaaggtaaaacagcttgtaagtggcagacaggtagggaattaagctccaaggctgaagttcttaaccccatgctgccactgaactttagccttctttatttgggcattgctatcctgtgacttcaaagaaactgggacactgggaagttatgcggttgcccaagccacacagctggtgtctggaccatactggcttctcttgcatggaggtcactgcagngggagaggaggcaaaccaaggagaccttctcggcttcgggcagcggtgctgttccttaggaagntncnacccttggctctaccggactgcgggcatctntcccgagcactgcacggangaaaagaanattggcacttatttcagggtggcccctcaggcatccaagagccagaggagcaggtgtcacgggatggcagcgagcgaggccaggccaggagaagcaaccgcagcctcctatggtcgccccttcccgacccaccccaggcgtcaggagttccgcgcccgggtcgtccgggggcccaccatgctggtgactgcctaccttgcttttgtaggcctcctggcctcctgcctggggctggaactgtcaagatgccgggctaaaccccctggaagggcctgcagcaatccctccttccttcggtttcaactggacttctatcaggtctacttcctggccctggcagctgattggcttcaggccccctacctctataaactctaccagcattactacttcctggaaggtcaaattgccatcctctatgtctgtggccttgcctctacagtcctctttggcctagtggcctcctcccttgtggattggctgggtcgcaagaattcttgtgtcctcttctccctgacttactcactatgctgcttaaccaaactctctcaagactactttgtgctgctagtggggcgagcacttggtgggctgtccacagccctgctcttctcagccttcgaggcctggtatatccatgagcacgtggaacggcatgacttccctgctgagtggatcccagctacctttgctcgagctgccttctggaaccatgtgctggctgtagtggcaggtgtggcagctgaggctgtagccagctggatagggctggggcctgtagcgccctttgtggctgccatccctctcctggctctggcaggggccttggcccttcgaaactggggggagaactatgaccggcagcgtgccttctcaaggacctgtgctggaggcctgcgctgccctcctgtcggaccgccgcgtgctgctgttgggcaccatacaagctctatttgagagtgtcatcttcatctttgtcttcctctggacacctgtgctggacccacacggggcccctctgggcattatcttctccagcttcatggcagccagcctgcttggctcttccctgtaccgtatcgccacctccaagaggtaccaccttcagcccatgcacctgctgtcccttgctgtgctcatcgtcgtcttctctctcttcatgttgactttctctaccagcccaggccaggagagtccggtggagtccttcatagcctttctacttattgagttggcttgtggattatactttcccagcatgagcttcctacggagaaaggtgatccctgagacagagcaggctggtgtactcaactggttccgggtacctctgcactcactggcttgcctagggctccttgtcctccatgacagtgatcgaaaaacaggcactcggaatatgttcagcatttgctctgctgtcatggtgatggctctgctggcagtggtgggactcttcaccgtggtaaggcatgatgctgagctgcgggtaccttcacctactgaggagccctatgcccctgagctgtaaccccactccaggacaagatagctgggacagactcttgaattccagctatccgggattgtacagatctctctgtgactgactttgtgactgtcctgtggtttctcctgccattgctttgtgtttgggaggacatgatgggggtgatggactggaaagaaggtgccaaaagttccctctgtgttactcccatttagaaaataaacacttttaaatgat

SEQ ID NO: 644610 - DNA, 152 bp, Homo sapiens
aagaagatgttgctccacattctcctctcctgaagctgagtgcattttgacagaaagagataatcaaggatcagctacattctgagtgcacttaatcaaggtatgcaaataatgagcatcttccgcaattactttagatgaggttgaactct

SEQ ID NO: 644611 - DNA, 1979 bp, Homo sapiens
  misc_feature (1)..(2): n is a, c, g, or t
  misc_feature (15)..(15): n is a, c, g, or t
  misc_feature (1185)..(1187): n is a, c, g, or t
  misc_feature (1190)..(1195): n is a, c, g, or t
  misc_feature (1197)..(1199): n is a, c, g, or t
  misc_feature (1568)..(1568): n is a, c, g, or t
nnttgcgaccagcanccaaagggaggaggccactaggcaaagaggatgtagaggcaaggcacagacatagaggatggcaatttgaccttccctgctgagtggatcccagctacctttgctcgagctgccttctggaaccatgtgctggctgtagtggcaggtgtggcagctgaggctgtagccagctggatagggctggggcctgtagcgccctttgtggctgccatccctctcctggctctggcaggggccttggcccttcgaaactggggggagaactatgaccggcagcgtgccttctcaaggacctgtgctggaggcctgcgctgccctcctgtcggaccgccgcgtgctgctgttgggcaccatacaagctctatttgagagtgtcatcttcatctttgtcttcctctggacacctgtgctggacccacacggggcccctctgggcattatcttctccagcttcatggcagccagcctgcttggctcttccctgtaccgtatcgccacctccaagaggtaccaccttcagcccatgcacctgctgtcccttgctgtgctcatcgtcgtcttctctctcttcatgttgactttctctaccagcccaggccaggagagtccggtggagtccttcatagcctttctacttattgagttggcttgtggattatactttcccagcatgagcttcctacggagaaaggtgatccctgagacagagcaggctggtgtactcaactggttccgggtacctctgcactcactggcttgcctagggctccttgtcctccatgacagtgatcgaaaaacaggcactcggaatatgttcagcatttgctctgctgtcatggtgatggctctgctggcagtggtgggactcttcaccgtggtaaggcatgatgctgagctgcgggtaccttcacctactgaggagccctatgcccctgagctgtaaccccactccaggacaagatagctgggacagactcttgaattccagctatccgggattgtacagatctctctgtgactgactttgtgactgtcctgtggtttctcctgccattgctttgtgtttgggaggacatgatgggggtgatggactggaaagaaggtgccaaaagttccctctgtgttactcccatttagaaaataaacacttttaaatgatcaaaaaaaaannnaannnnnnannnaaaaactttttcgcccccccggccccccaaaaacttttcaaacccttccgtgttgggcgcgcgccgtcgggcgccgctttagtgtgtacgtgtacgacctgtggcgccataacgctgtgttcccatgaggagaacaccccgggcgcctaagcgacataaggtgcgctcgggtcttctcccccaatataaaaaaccgcccgggggggcaaccccggacgctgtcttgagaaccaatctccccgagagagggggagacctccccgagagagggcaccacaaaccgcggcgacatccctatctcacacacggggagagttcctcgaaggcggagagctccgcgaaatattccaaaaaatatacgccccgccngccctcgcgggggggaaccagccgcgcaccgaccggcggacgaccacagcacccgaaacacaaggaaccaacacacacagcagcagacaagggcacgacggaaccgagacaccgggacgaggacgcagcgaggaagcacgagagacacaggaagcagaagggcgcagaaggaggcaggggaaccgccgggcaagggcaggggcaaacggaccagagcacagacggaacgcacggagagcgcgcagaacggaggagcacgcaccacaccaggagagcaggagcgaggaggagcagaacaggaaggcgtcgggcgaagggaaggcaacgagagacggatcgccaagaggagagagcgggaggagagaagagggcgagagcagcggggacgcggacgggggcggacgaagcccc

SEQ ID NO: 644612 - DNA, 2253 bp, Homo sapiens
  misc_feature (399)..(399): n is a, c, g, or t
  misc_feature (463)..(463): n is a, c, g, or t
  misc_feature (465)..(465): n is a, c, g, or t
  misc_feature (467)..(467): n is a, c, g, or t
  misc_feature (498)..(498): n is a, c, g, or t
  misc_feature (517)..(517): n is a, c, g, or t
  misc_feature (526)..(526): n is a, c, g, or t
  misc_feature (1459)..(1461): n is a, c, g, or t
  misc_feature (1464)..(1469): n is a, c, g, or t
  misc_feature (1471)..(1473): n is a, c, g, or t
  misc_feature (1842)..(1842): n is a, c, g, or t
gaacatagatgggagggagaggagcaggggatgaagtcagaggagtggcagagggtcagaggacagagggtcttgtaggccattataaatacttcggcttttacccttagtgagatgggaagtcatggaggctcttgaggagatgatacggaagctgtagagaggttaaatagtttttccaaggtaaaacagcttgtaagtggcagacaggtagggaattaagctccaaggctgaagttcttaaccccatgctgccactgaactttagccttctttatttgggcattgctatcctgtgacttcaaagaaactgggacactgggaagttatgcggttgcccaagccacacagctggtgtctggaccatactggcttctcttgcatggaggtcactgcagngggagaggaggcaaaccaaggagaccttctcggcttcgggcagcggtgctgttccttaggaagntncnacccttggctctaccggactgcgggcatctntcccgagcactgcacggangaaaagaanattggccttcgaaactggggggagaactatgaccggcagcgtgccttctcaaggacctgtgctggaggcctgcgctgccctcctgtcggaccgccgcgtgctgctgttgggcaccatacaagctctatttgagagtgtcatcttcatctttgtcttcctctggacacctgtgctggacccacacggggcccctctgggcattatcttctccagcttcatggcagccagcctgcttggctcttccctgtaccgtatcgccacctccaagaggtaccaccttcagcccatgcacctgctgtcccttgctgtgctcatcgtcgtcttctctctcttcatgttgactttctctaccagcccaggccaggagagtccggtggagtccttcatagcctttctacttattgagttggcttgtggattatactttcccagcatgagcttcctacggagaaaggtgatccctgagacagagcaggctggtgtactcaactggttccgggtacctctgcactcactggcttgcctagggctccttgtcctccatgacagtgatcgaaaaacaggcactcggaatatgttcagcatttgctctgctgtcatggtgatggctctgctggcagtggtgggactcttcaccgtggtaaggcatgatgctgagctgcgggtaccttcacctactgaggagccctatgcccctgagctgtaaccccactccaggacaagatagctgggacagactcttgaattccagctatccgggattgtacagatctctctgtgactgactttgtgactgtcctgtggtttctcctgccattgctttgtgtttgggaggacatgatgggggtgatggactggaaagaaggtgccaaaagttccctctgtgttactcccatttagaaaataaacacttttaaatgatcaaaaaaaaannnaannnnnnannnaaaaactttttcgcccccccggccccccaaaaacttttcaaacccttccgtgttgggcgcgcgccgtcgggcgccgctttagtgtgtacgtgtacgacctgtggcgccataacgctgtgttcccatgaggagaacaccccgggcgcctaagcgacataaggtgcgctcgggtcttctcccccaatataaaaaaccgcccgggggggcaaccccggacgctgtcttgagaaccaatctccccgagagagggggagacctccccgagagagggcaccacaaaccgcggcgacatccctatctcacacacggggagagttcctcgaaggcggagagctccgcgaaatattccaaaaaatatacgccccgccngccctcgcgggggggaaccagccgcgcaccgaccggcggacgaccacagcacccgaaacacaaggaaccaacacacacagcagcagacaagggcacgacggaaccgagacaccgggacgaggacgcagcgaggaagcacgagagacacaggaagcagaagggcgcagaaggaggcaggggaaccgccgggcaagggcaggggcaaacggaccagagcacagacggaacgcacggagagcgcgcagaacggaggagcacgcaccacaccaggagagcaggagcgaggaggagcagaacaggaaggcgtcgggcgaagggaaggcaacgagagacggatcgccaagaggagagagcgggaggagagaagagggcgagagcagcggggacgcggacgggggcggacgaagcccc

SEQ ID NO: 644613 - DNA, 133 bp, Homo sapiens
gtatatatcggctccagcgataggcgcgcagcatctcggtgcgtccggctcccaccagacccgccaggcccaacacttcgccggcgtgcaagtcgaacgcgagatctatggatatgccattttcgcggactga

SEQ ID NO: 644614 - DNA, 213 bp, Homo sapiens
aaatgaaaattggagaatgcagcatggatcagaactcatgccttcccataaaggcctttacacatgttttatcgatatgagtatccaatcacagcatatacagaaaagcattggacttattgtatgacatcatagtatggctctcgtgactaagcgcttctctcttaatgtctccgcgaacagctcaaactggactacaagccacgagataag

SEQ ID NO: 644615 - DNA, 325 bp, Homo sapiens
  misc_feature (309)..(309): n is a, c, g, or t
caggtggatcatgaggtcaggagatcgagaccatcctggctaacacggtgaaacctcgtctccactaaaaataccaaaaaaatagctgggcatggtggcatgcgcctgtagtcccctgtagtcccagctactcgggaggctaaggcaggagaatcgtttgaaccagggaggcagaggttgcagtgagccgagatcatgtcactgcattccagcctgggcaacagaggaagactctgtcttcaaaaaaataacagaaaagaattttcacttttggcaaaattatctttttttactgcacccttaagtgtntgacacaaaaggaatt

SEQ ID NO: 644616 - DNA, 100 bp, Homo sapiens
cacatctgctgggatagtacttgccgcagtactcttaaaactaggcggctatggtataatacgcctcacactcattctcaaccccctgataatgtgatag

SEQ ID NO: 644617 - DNA, 430 bp, Homo sapiens
aaaatctttttttttccattttgttctgtttgggggcttctgttttgtttggcgaaagaacgatggcttccgtggggagtactggggagccctcccggcaaacagggtgggggggacttgggggcatgccgggccctcactctttcgcctgttttgtgtttcacaagctttttctttcaaaattgggatccttccatgttgagccagccaaagaagatagcgagattttaatttttgccaaaaaaaaaaaaaaacttaaaaattaaaaacccaaagagcaaagcagaacttataaaattatatatatatatattaaaaagtctctatttttccccccccagccttcctgaacctgcctctttgaggataaagcaattcattttttccccccctcggccctcttgtttttaaaataaacttttaaaaagga

SEQ ID NO: 644618 - DNA, 332 bp, Homo sapiens
gcctctcagatttcagttttggacattgcacaactaaaaccttttaaacgcatttgcttgctaactcggaagacacatagtttgcagcaagacattcctatattgaaaaaatgagagaaaattttatgctgcctcaggtggagagcaaggctcaacggtggttgcattagttccctcggaagtattgaaaaaacttttaaatggaaaaaaatttttgcccctatgttttgaggaccaaatgtttgggtttttttttttgcattaaataaatgatcatgctcagtgtaacaaagggaattaaaagtttttccccagtccccttttaggggaga

SEQ ID NO: 644619 - DNA, 731 bp, Homo sapiens
aatcagcaaatgtttatttccaaagaggaattacattttcaaaggataaaagttaataggagtcatagtgctcaaaaaccacacgatataggaaaacctaccccactccaccaaagggcacatcttgctttgaacacttgatttcatattaacagttcatgagttattcaaagcaggggaatctcctgcaggttgggaaatatcctagtgcttttcatagccttccatgtcatggatcagggacacacacttgtgcacatgtgtgcacagacacaaaacagagagaatgcttaacaggagcacattttacaaaagtgagatcccaggcctggaaaatcccaaactcttataaattttacaaatccaaaatggaatattcaaaaagaactcaacctgtttctcttgagtaacttttcagactctcattacaggccccatgaggtcagtcagatttctgttctacaggatactgcaaaaagagaccagaaatttaaaaaggagtgatggtaccacacaaaatagtaaaaatgaaatagagaaggtgtgaagttagatccttgatttatgtgtggaaagctagtgccaagaatattgttatgggcctggtcctagaggcaagattgttagcaaaaactgtctctaaatatttatgctcagataataatgctaataattccggatcccagtgggattttggatcagggtagtaattaggaattggggcaaaatgg

SEQ ID NO: 644620 - DNA, 441 bp, Homo sapiens
tgagtagaggcggcagagtagtaagggtttgagaggggggaataaagaacggttaagggctacaaaaatacaattagataggaggaataagatctagtgttcggtagcacaataggacaaccagagttaaaaataatttattgtgtatttcaaaatcactaaagagtagaactggaatgttcccaacacaaagaaatgataaatgcttgaagtgatggatatcccaataactctatttgatcattatacattgcatgtctgcatcaaaatatcacatgtaccccatatatatgtgcaactattatatatccacaataatgaagtttctttggtgcttttttggttttggtttttgagaaggagtttcactcttgtggcccaggcttgagtgcaatggcgcgatcttggcttactgcaacctccacctcccaggttcaagtg

SEQ ID NO: 644621 - DNA, 767 bp, Homo sapiens
gtggcttgcggtggaggagggccgaggccatctacggcaacatgaagcaagttcatccgttacctcatctcttccaatgttggcgaggtcgtcgtgcatcttcctcacggcaattctgggcctgcccgaagccctgaatccctgctgcagttgctctgggtgaacctggtggactgacgggcgtacctgccacggctctggagcttcatacccagtgcagacctggtacatcatggcagaagctgccccggagtcccccgatcaagccctcatcagtggtctggctcttcttccgatacctgtgctatcggagtgtacgtatgcctggccactgtggactgccgccagcctggtggtttgtgtatgactgccgagggacctcacgatcaacttctaccagctgaggaacttcctgaagtgctccgaagacaagcccgcatctttgccggcatcgactgtgaggtgttctgagtcacgcttccccaccatgcatggccttgtccgtgctcgtgacctattgagcactgtgccctgccctctacagcgtctcggagaaccattcgctgctgcggatgccgccctggtatgaagccctggtctgcgtggtggctgtggcatgtccatggccctgcacttcctcatcctgctcgtgccgcccctgcctctcattttccaggtgaccccactgagcgggcgccagtgggtggtggtgctccagatatctctgcctgtcatcctgctggatgaggccctcaagtaccttgtcc

SEQ ID NO: 644622 - DNA, 464 bp, Homo sapiens
ccccggaaaaccccccttttaaaaagggggtttttggaaaaccaaaaaaaaaaaaaaattcccccggggggggccccgggggggcccccccaaaaacccccccccgggggggaagatttgggggcccccggggcccccccccccccccaaaaaaggccggggggggggggggggggccccccccccccccagggggggggggggggggagaaccccccctggggggggggccccccccccggggggggcccccccccccccccaggccggggggggaggggcctgggcccccccccccctaaaagggaataaactgtgggggaaagaaagaaggggggaaacaaaaaaacttgggggagaaaaaaaagcgcccccccccccccaagagggccacatataaaaagcccccccgggggacccccccgccccccctcttttttgggggactcccccggggcggggga

SEQ ID NO: 644623 - DNA, 231 bp, Homo sapiens
  misc_feature (35)..(35): n is a, c, g, or t
gaaataagaaaaaagaaaaaaaaaaaatcactgantgcaggtcaccctaacagatataataatgaaaaagtctgagatgttgcgagaattaccaaaatgtgatgcagacacgaaatgagcatgtgctgttggaaaagtggaacagatagacttgctggagacagggttgccacaaagtttcaatttgtaaaaaatgtgatatctatgaaatgcaataaagtgaagtccaat

SEQ ID NO: 644624 - DNA, 583 bp, Homo sapiens
ggagtgccagaacaatatcactagcactggtgatacactccaaaggaatgaggagcactccaagtctctgcctctgactactggatgtgaggttgtcctccattcccaggtaccgaccccatcttcagtaaaaagggcaccagtccagacacaagctgagcaactaaaatagacaagcagtacctccagaaccgtgcctctaaacaggcttccaaccatccaaaatgcagaagatgccagcgcagacggcaagttgcttccacgtggcatgaaactgtccagtgtattagtgatacggaacattctaggctagtatccagtcaggccatacatctctgagttagagcaaaacctgaagtccctctgctatgttaatgctgcaccaggaagcataacgtgaggaaactgtactgtcccagtctgtgagggtctcccatacaaagtttcagaagatcggctcaggactaaaagctctagcactcacattcttaccctgggggaacaaaagtataatgcccaaggcacagtgtacctttgttgggtgggctggtacagatggggatggcagaactcaaaataccag

SEQ ID NO: 644625 - DNA, 320 bp, Homo sapiens
  misc_feature (19)..(19): n is a, c, g, or t
  misc_feature (21)..(21): n is a, c, g, or t
  misc_feature (135)..(135): n is a, c, g, or t
  misc_feature (137)..(137): n is a, c, g, or t
  misc_feature (139)..(139): n is a, c, g, or t
tcctgaaggggccagatgngnctgagctcagagcatcctccagggacttgtgatagtcctccttataggcctcactgatggcccggatttcagcattggtccgagaggccagtggtggaataagagttttttcancngngccggctccctccatggccttcttccactgcctggcatcgtaatgggcccccggcatcatgagccccagaatcagccttgccaggtctccagagatctcagacttcaggtcagtcattaagtcccggccaaagtgagacttgaaggtctgccggatctgctgccgctggacattgctgcgg

SEQ ID NO: 644626 - DNA, 108 bp, Homo sapiens
  misc_feature (95)..(95): n is a, c, g, or t
cagctctctctgatgttggcaggactcactggtcgcacttgcaggacagccagctcaggctgaagctccatagccactgctctgggcccgggccnctcgagcactcag

SEQ ID NO: 644627 - DNA, 161 bp, Homo sapiens
cgtctgcttactaaagttcccctgcatgctcaggagggtctgtacggctatttacacccctgaaggacaggagacccccagttgtaccccactcatcttatttcctaagcatctgaggtcagaattgggggaggacagtatgaatgagcatggcaaaagcg

SEQ ID NO: 644628 - DNA, 264 bp, Homo sapiens
catcctggataacacggagaaaccccgtctctactaaaaatacaaaaaaattagccgggcgtgggtggctgggcatcttgtagtcccaacttactctgggagtgctgcagcatggagaactggcatagaaccctgggaggctggatctatgcatatgatgccaatgatcactgccacttgcactccatgcctgtggctgacagaactgatgactcctatctcaaacaaaaaaaaaaggaacccaagggatattagaactaaaac

SEQ ID NO: 644629 - DNA, 322 bp, Homo sapiens
gaggtgtcctggtcaccgtttcaccatcatgctttgatgttcccctgtgtttccctcttcggctctcaagagcaaaggttcatttaaggccaaagaggtagtcactgccaactaatctgtccttgtctttaccttccttctctttttcagcgcaggcattccacgtccgtgtacagcaccgtgtttgggagtgtttttccgtgagccggactctcgggtccttgctgggtgagtgcaatccctccccttgctcttgtgaaaacactttgagcgctttaacagactagcctgagataatattaaatttcttttttattcaaaa

SEQ ID NO: 644630 - DNA, 125 bp, Homo sapiens
acgctgcacctggtgtcaaaccacgcccttccatcaccacccctgtcatcacaacctggactcccatattccagaagaagagcaggaacatcgagccaaatatgtggtataattctattaaaata

SEQ ID NO: 644631 - DNA, 913 bp, Homo sapiens
gtatagtcattccggcctccgaccatgaagtccaccggcactcttgcccttcctggtgctgctagccctggagcaactctggcactctcgcaggactgtggaaggctctggaaacggtaccttcaaaaggcactgtagtctgtcactcctacatgaaatactggtccagagacttaggattgacgaccaaaatctgagtgccaggaaatgacctggcatgatgtaccagcggaaccaagaagatgtcgtaccatgatacgcttgatgcccttcaaacttgcctggcaatacctgctgtggcaagtcgcacagtaagcctccatacatgagggacgcgaaagcgcgtgcgtgacatgatgcaccaggtgagcttactgggccatgagtgtgttgagtgcgttaaccctccctcaatgttctcttggtgacgactggatggctatgttgccaatctgttgagtggaacgttggttgcgactgggcaccttgtgtgcggaaaactcctgcagtattccctcgtgttcggaccacgtctctgatctcttcgttggcccatgcttgtgacggcagggccttctggcggatgctcaccttgtcgtcctcgtcgctggctcccacgggttctgcgtttgtgccaccccttgcacgtacgtttgggtctcccaatgcaaacttgtagtattccgtgccctccacggggggaacaccggtgtttgcggtagctatcaaggccactgggctttttgcaagcaaagatgctcaggtttgactccggctgtatactaaataaaagagcgaaagccctaaattttcggcggtttccaagaaggacacgttgacaccggcatagccaatccataccattacctcttggggggcccaccgtgtaggggcgccttgcagagggagattg

SEQ ID NO: 644632 - DNA, 452 bp, Homo sapiens
tttcattacgctgtatgaactgagaaatatttgtttcaaccaaagcagtaataaattttgaaaaataaaattcaaaatattttatcataactagttgtaaactatgaaggataagattgattcagagattaagaggagtgtaatagaagtagagtatgtctgaaaagagatgtactatagataatacagacttgggaattttggtttctgtttgtaaagaacacttttctttgacaattaagttctgagtagatgagaaaattttgagattcagcagataactagaagttgtagtttgggggtgcttgaacttttaagtctctgtagtaatttttgctataaccagaaattttcagaagtattccaaagggttgggagcaaataaaattatttaaggaatttgagaaaatattatggttttatatgggtctagagtgaaaccaaacagtctt

SEQ ID NO: 644633 - DNA, 143 bp, Homo sapiens
ggcttgtccctccaggcagagtgcggagccttaccccacagcgctgagccctgagctggcctcagccctgggaggagccttccttttccagagagactctgcacacagctcttccatggctccctggccttcacctacctcaa

SEQ ID NO: 644634 - DNA, 184 bp, Homo sapiens
tagacgtgaaagaagaatgtcattacatggagaatgcaaagcaagcaatggagaagctaaccctagagcgttttattcaaaagttgagcgatctgtataggatcttgaaaagggcatatgattggaagggggctctggcaagcagccgtgtgaagcatgttaatgactgaagtgacaaacggga

SEQ ID NO: 644635 - DNA, 337 bp, Homo sapiens
  misc_feature (55)..(55): n is a, c, g, or t
tttgacacaaccattcaatcaacacatcaattcagcacccatatcaggtcagcantcacatcacacagcacatcacaacagggcagccagcattccaacatcacaaccactacagccagcaaatgcaccacaggggcgcatcattcattcaaccacatcaccagcaacatcaccacacaatcacactcatccagcatcacatcattcatggccaccaccttcttcatcgccaccatcacacactcagcacacacatcttcagcacagcacacatggcatcacacattgttgttcaacaccactatcaccagaccgtcgcaccacagcacatgcacat

SEQ ID NO: 644636 - DNA, 230 bp, Homo sapiens
acctcctaccccacgggatgctgtgtgctccccaatgcatatggatgtgcctgtggaatatatataatttttgagacagggtgttgcagtgttgcctggctggagagcagtggcgcgatcacagctcactgtagcctcaaactctcaggctcaagccatgctcccacctcagccttccgagtggctgggactatagactacaggtgcataccactatgcctggctaatat

SEQ ID NO: 644637 - DNA, 764 bp, Homo sapiens
  misc_feature (16)..(16): n is a, c, g, or t
  misc_feature (76)..(76): n is a, c, g, or t
  misc_feature (79)..(79): n is a, c, g, or t
  misc_feature (82)..(82): n is a, c, g, or t
  misc_feature (99)..(99): n is a, c, g, or t
  misc_feature (109)..(109): n is a, c, g, or t
  misc_feature (114)..(114): n is a, c, g, or t
  misc_feature (121)..(122): n is a, c, g, or t
  misc_feature (124)..(124): n is a, c, g, or t
  misc_feature (146)..(146): n is a, c, g, or t
  misc_feature (148)..(148): n is a, c, g, or t
  misc_feature (160)..(160): n is a, c, g, or t
  misc_feature (175)..(175): n is a, c, g, or t
  misc_feature (272)..(272): n is a, c, g, or t
  misc_feature (392)..(392): n is a, c, g, or t
  misc_feature (398)..(398): n is a, c, g, or t
  misc_feature (414)..(414): n is a, c, g, or t
  misc_feature (416)..(416): n is a, c, g, or t
  misc_feature (430)..(431): n is a, c, g, or t
  misc_feature (433)..(433): n is a, c, g, or t
  misc_feature (505)..(505): n is a, c, g, or t
  misc_feature (518)..(518): n is a, c, g, or t
  misc_feature (521)..(521): n is a, c, g, or t
  misc_feature (525)..(525): n is a, c, g, or t
  misc_feature (528)..(528): n is a, c, g, or t
  misc_feature (755)..(755): n is a, c, g, or t
tgtcttagtgcttttntttaaaaaggaaagggtcaacattgaactaggacatgctctgcttccccacccccatttnggnggntagattggggggggggngttgggaganaacangatattnngntcaggtggggtggttatgtttngntgctattttgtntagtatatatttttntcaattgggaaaaaaatctaggtgaaaaaaattacctaacaagagaagtagtttacatagtcataacatttaaattgctgcccaaaaaatgtaaaanaaaatttaatgtaaaatgtcacataatttcaaaaaacttacctcaattgtctatcatttatcatgtactataagtcaacttcctaaataagattacagtcctttattataagcccctacnggtacnatagtatacatttaananacgctactacaaanntnttcttttctttttgtttttgcttattgtgtacttagctatagataatttttgggtacaaagcctacgggacntataaatgcgatngtnaacnganccggtttgcggaggtcctttttatgttccacaggtgacatcttttaatccagcatcttctcctgtttcttgccttcctttttcttcttcttagattctgcagttgcatcagtagacgaatccatctcccttcacccaaacactcctctctaccatcttctcaaactctccccactcctgtgtctccattttcccttctcttgaggtttgggcttggtcagtttgcanagggcttgg

SEQ ID NO: 644638 - DNA, 839 bp, Homo sapiens
ggactgatcattacacaggcggcatgaagcaaaaatatactgtgaaccaatgcaggcggcagtctgaggattccaccttctacctgggagagaggacatactatatcgcagcaggggaggtggaatgggattattccccacaatagggagtgggatagaatggagctgcatcatttacaggagcagaatgtttcaaatggcatttttagataatgggacgagtttcacataggctcaaagtacgagaaagttgtgtatcggcaggtatactgatagcacattccgtgtatcatgatggagatgatggaagctggatagaatgaacatctgggacttctaggtccacaacattcatgcacgatgttggagacaaatagtcagcctattatcttgtacagagaactattggtccacaagggcctactcgatacttgcccatggggtacgaacagagagttctacagttacatccaactattaccgaggtgaaacgtctcaagcttgacgtatggaataatcccagaatagatctggagctggaacagaggatgctgcttgtattccatgggcttatgattcagactgtggatcaagttaaggacctctacagtggcttaatttggcccctgattgtttgtccgaagagcttagtgggaaagtattcgaagtcctcagaaggaaactgggaaatttgccgcgttcttgtatctagttttggatgagaatgaatctgtggtacttagatgacaagattaaaacatatctgatcaccccgagaaatgttggcatgagatgatgagggattcatagaaaagcattaaaatgcatggtattaaatg

SEQ ID NO: 644639 - DNA, 911 bp, Homo sapiens
cattactttagtgcgactttacaattttattatgtcgtatttttatattcagttctaattttctttttttttcttttggagatggaacttcgctttggttgcccaggctagagtgcaagtggtcacgatctcagctcacggcaacctctggcctcctgggttcaagcgattctccgtgcctcagcctcctcagtagctgggattcacaggctccagccaccatacctggctaatttggtattttcagtagagatggggtttcacccacatgggccaggctggtctcgaactccttgacctcaggtgatccacccacttgggcctcccaaagttgcggggattacaggtgtgagccaccatgcccagcctctgattatttctaatttcctccctcagttcttcttgtgacccatggattatcagaagtgggtgtgtctgaatcagcaaacattggttttttttcctcttaatatcttctgtgtgctgattctacttaaattccattgaggtcagaaaatatcctctttatgattcaatcctcttagtcttatgggaagaatgcttttatgaccccaattatgttgtcttgtcatggtgagtgtaccatacacaggtctacaaggaatgggtatttaaggcaaggtgtgggggtcatggctggaatccagcaggagataatgcggggttcacaggtggaatctggaattggaaggggggaggggagggagacttagaaccaggctggaatgtttttgggacttgttttgaaacatttgttggtgtggggtaaatgttgatatagaaggaaggggagatggagaatttatgactggtaataaggcgcagaggaatataggatgttcactaccgggagaaaattctgatagaacgggggctgaacgtgaggtatt

SEQ ID NO: 644640 - DNA, 316 bp, Homo sapiens
  misc_feature (13)..(13): n is a, c, g, or t
  misc_feature (35)..(35): n is a, c, g, or t
agttttaaatttntgggtttaagagattttttaantttatttttataaagtgttgggagtataggtgttagttatggtgtttaatttgtgataattattttaaatttattttataaatgaggaaagtgatatttatatttgtaaagttattggggttgaatttttatttttgtatttatagaattaatatataaagtttatatgttattagaatgtaagttttttgtaagttatagattttttttattgtaatatttttagtgtttagggtagtgattagtatatagtaggtgtttaataaatatttgtagaatta

SEQ ID NO: 644641 - DNA, 106 bp, Homo sapiens
ggtcggactcccattctcctctttccgtgatttctgtgtagaactctggtatttgagctgtggtactatatttatcttttgtcttttaatttaaaccttggtggag

SEQ ID NO: 644642 - DNA, 149 bp, Homo sapiens
  misc_feature (28)..(28): n is a, c, g, or t
ggagatggacgaggaagataaggctttnaagcagaaacaaaaagaggagcagaagaaactcgaggagctaaaagcgaaggccgcggggaaggggcccttggccacaggtggaattaagaaatctggcaaaaagtaagctgttccttgtg

SEQ ID NO: 644643 - DNA, 569 bp, Homo sapiens
tggaactaggaagcacggaaccatgcagatttggtaacggagaggcgctgctctcggccgcgtgcacctggacgagctcgttgatcgtggctggcctactctccacgccttgctgcagattgattctggcccccgatttgccattatgtgtccgcatgtgattattaagaaaccaaggctccttaaatcttctaccgcacatgtcacacccgtcagtgaccgaatctttgtgtgttctcatgtggatctcaacatcaaaagcgactctaaatgtctgcccacatacctcacagctaaattcatttgccttgccattcttttccttgggaggttctgttcgcacttgacttttatcaagcggactgagatactctgcttcaacccgaagaactgctggttcacagaagggtaggccggtgtcgcatcaggacatgtggattcaggtcttctgaatgtgtgcaggtctggcatgcagaacatgccatccaagggcatatacccctcgagtgggatgacatcttattcttgtgtcgctcggaatggaacaacagcggtccctttcatggaca

SEQ ID NO: 644644 - DNA, 986 bp, Homo sapiens
ttttctagaagaggcacattgggtatcattcattacatttgttgagtttgttgggttttgtttttggttttggaagaaaggctggctgtattgcccaggatggaaggcgtgggggaagcattgcgaccgcccatggggtcctcaatggacccgggccgtaatggagacccttcccaaccgtgtgtggctggcgtatttgatgactcaatagcaacgactgtgggctaataatttatattttttggattggaccaaggggatccttcctatgtttgcccaggagcagggttcgtcaagggcttcatgggggcttaaaagagtggctcttgtcgtggccctgcagcttgtcccaagaagaccaagagagcaagagtgtgtgtactgttcgtcccttggctcatgtagtgcccaaaaagagaagggttcatattcccttttagtcgtagaaagtggatgttgacaatagaattggggtcattgtcgggcgggagcaaggtcttttgagggcgtggaaatgtggtaagttctcgcttccgtgaaaatggtttttctccaagtggcatgttcccccacttgacaccttaatgtcacttgacaattagcaggcgaggtgcgtcttgggggtggttacacttcttttgcatgagaaggaacacatatattacatggatcgattttgctaaagcaataagaaacataatgcaggggggcgcccccttgccattgaaaatgccccaaagggagaggcccagaatccaatcatgatcagcaggatggtaatgtaagacagggggccacatcatggagattgaaataaccaagacggctcacaaacgctgtaacaacgtgagatagagggggaccacaggttaaagggagacactgggggaagacctgtattgggggggcgacaaatgggccacccacccgggaaatacaccgcgaagaacaaccgggcaatgggcaccgaccatggcggcaaaggc

SEQ ID NO: 644645 - DNA, 212 bp, Homo sapiens
gggtggccggaggtggcagcctcgacagcgaccgctaccgggggaagcgagaaatcagaagcggaggggaccgtgcctcaggtcgcagggggcggtgcccggccactactcgtcaggtcccgcccgctgagagaccttgctggccagacggccgtcccgcagcctgtcccggctagtcccgcatcctcggcgcgcggccccgcgtgcggccg

SEQ ID NO: 644646 - DNA, 404 bp, Homo sapiens
ttccatgacatgaatgttaactataaagtggtggaactggacctgcttgaatatggaaaccagttccaagatgctctttacaaaatgactggtgaaagaactgttccaagaatatttgtcaatggtacttttattggaggtgcaactgacactcataggcttcacaaagaaggaaaattgctcccactagttcatcagtgttatttaaaaaaaagtaaccgcccccaatttcaggcgtgtttatcctaataagtttggtagttcagggtcagctatttaaagtggtaaggccccataatgtctttttaatgtttgagtttgtttttaagacaggcatggtctttgtggaccagatgtagaactcattgccgataagtttcggcgggaacctcacaaggatgaac

SEQ ID NO: 644647 - DNA, 1096 bp, Homo sapiens
gagctagatgcaactgatggaagatctgtatgaaattttccatagactgatatgggattctccaagatgggatgattaattggcccaaaaagaggcagtgagcgtgtttgttgatgcctcaagctactgtttaagatccctcaagactcgtgacggatttgcggacactacatgggccaactcgtatgataatatgttaagcaatctattcaagaatagccgaatggtcaatcatatgttgaaacacggatgaggtagtgaacgcaatccattcggctcataagcagactagcaagtgagcgctagcagccaaggcttatataacctccagttgataactggaactgttccatcagaacccttgaattcattgagaccacgggcagcaaacggacaagagacgtccaagcaagcaggattgcaaggcaagcattgtttcacgcttcttgtacacaaaatccaccctttcttagcccaccttggaaaccccaaattcttcaattccgtgaggccagtaggcaccaaggattatgtcttaaaacgaagcttgggaacccttttgctcaaaagcttcccatccgcctttcaccaatcaagtacaaacccccaagttttcaagacccctgttccaaaccctgtaaacttgacatgggaagctaatgccagcttgcatttgaaggactttcaggcacacaattgtccagcactttgacttgcaggccccttcattaaaaacgtgttccacagaaagacttggcaaatgaaattttcccctgtttttgccaaaagcaagttgggctgtgtgagtcccttggggccaaccaagcaagggttttccatgttatcgcaggagtttaccttcccaagtgtggttaccccttgattggtcaaagaaaattcccccagggattaaagaatccccttctttaatcccaaagggcataaagtacacacaccaaggttatacccttcataaaaccctttgctaagacctgtccgcggccaacttgtaaccgttgtagaaatctcaggaaaccttcaaaatttaatcaaatactccctgtaaacaattctttatacttttcataaaaaaaac

SEQ ID NO: 644648 - DNA, 856 bp, Homo sapiens
gagccggagcttctggtgtagtcttcactgctctgtgtcttctgctcctagaggcccagcttctgtggcctcgttacctgcaggtattgggagatccacagctaagacgccaggacccactggaagcctagaaatggtgagagtgccgggtccgacatcccgagagagggggcggggctggttggaactggtgggaagtggctgtggcgggactctggcctccccgcagctggctccaaaaatccgcggccccgagttctccttggcgcagctcggcctcagtccccttcagccataggatggcggcgggctgacagctcggaccccgggcatcctgtctcctccctgcgcagtgactgtgccttggtctggagtcctctgtgggcagctctgcccccactgcccgagctctccccgattgtgcaggaccactggacggtcgtcaggggagaataactgactcaggatgcagagttcatgaatgggaagagctttggtctgccggggtcccagtcccccttttttctatgaaaatttgtggaagtctcgcagaatatttacagaaattaattaaagagtaatccaacaattgagaggccccagctatgtgtcgaagttgggggtaatgaagcggctggaagaacacctgagttagggctgttaaagaaacaattcaaaaatggcaggaagtctgtactctaaattgcaaccggggcaatccctgcgtattacacagcagcgacacttgaaccaaactagccaggataagaaaaaagtacacgaaacacaggagcaactacaaaaacaaaagtaaaaaagaaaacacactaaaaataaccaacttcttatatacttt

SEQ ID NO: 644649 - DNA, 320 bp, Homo sapiens
  misc_feature (227)..(227): n is a, c, g, or t
ccctttttgggtcaggattggaattgggatggaatgggccagttgtctataaaactctagtgtaaatattagcccccccccccctcatctttttttttatttccccccccatttatttttttttaccccggttgtatttttaattttggacttcccccattgggcatggcagctcaaaggtggagtactaaagcctggccaagtgaggaaggaaaacaaaaaggtgncgattctcccccccctcttttgtttttaataaaatcggcccctgtttgtacaaacagcctgcgtgttgtaaataaaacaaagtgggctcttta

SEQ ID NO: 644650 - DNA, 433 bp, Homo sapiens
aaatgagcaggataatccatagataagcatggaaagggcccttgaagcaaacctcaattttgatggcacttcacagtacagcagttcccactgccagtacattttcagtgacagataaaatttcttaacacacttgtagtatagattattttgcctactaagtctgatgcccaaataacctggtatttcagaccctagagtccatgcatgagaagcctccactctctgtatagtctttgtcctaatctctccggtttccagccttaattaccatcctcctattggcatcttggaaattcctagactaatagctaccctgggattaatttcccttcaaccttacagtccctacctggtcaccacataaaagaaagtgaagagattcctctccaaatgctctatataaaagatacaagaagttttaaactatcag

SEQ ID NO: 644651 - DNA, 1038 bp, Homo sapiens
ggtgactggaaatggctctgtctccaaaaaaaaaaaaaaaaaaaaaaaaaaaaaatggctggtccctaaaattgtccttggggactgaaaggttggtggcaaatccgtctttaaaggggaaagggggttggaatgaaacctttccgggccgggggggccctaacggcttcaacaacttcgggaggtgaaacgccaacatagcttagggtgacaaagggagcatcacgccgcgtctcctccaatccgggccctttcctccccccagtggcgcgcttccaatcctctcccgccaggcaggcgtgatgagaaaaccccgggaacccccttaagaaaagattcctttaagcagcgttttgtcaagacactcacaggggagtgttgtagacacatataagcccttggtgctcctcctgggccttcttcttttcgctccttcaacctcctttccgtgaaccgagcggttgggtggcctttgggggaaaaacaccggaagaggccctccgtggcctcggggaccgtgttggaccgtggaacttttccttcaacagggggggttccctcgtggcactattcgcgagcgtgtgtttcgtggcccgcagatcccccccccgaggggggcccaagaagcccgcctaggtacacacggggcccccagaaatttggcaccgtgcccgtttcttcacggcggcgcccacgagacttggtcccctggcgcggctgtggtgggtacccccaggtgttgcctctgctttgtggcgccccttggggttccccgcccctgtgtttttgtgtaacccccgagaagcaaccacacggggggtgttgcaaccctgcctcgggctccctgggaagggtgggcctgcttgccctttgaagaccccgcggaggccccccagcgtgctgagacaccccgtttgcgcctctggagacgattcgcgggggctctcccaccaattccgccccttctctcgtttgttggggtcatccgcagaggtgccttgtccatgaatttctccttctccccaggaagggcacctt

SEQ ID NO: 644652 - DNA, 217 bp, Homo sapiens
ggggaaaaaggtttttcccctttttttttaaagggggaaaatttttcccttttccgaaaaacccctttggggtgggggggggtgggtttttggggaccgcaggattttacttgcccatttttttcttaggattttgggaaaaccctttataggggtttcccttttggggccccccgggggggttttctttttaattttaacccccccccttttaata

SEQ ID NO: 644653 - DNA, 532 bp, Homo sapiens
gcaccgagcttaaaagaatatctcatacatagacggttgatgttttaatgataagatgttcaagacgataggctactgttgggggctacccaaacaccaaaacattgccaaagagaataatgcacatgtgagtgtaataagatgtaaatcgatgacattgaaaatggcgactgatgttaaggagaaacaaaatgactcttctagaccatgtatggacagcacccaatatggatgaaccaaaggcaatgaagatggctgaaggcttagcgtgagaaacgaaaggggaaaagcttagcataagcagtgaaagtggcacatggtttggcctggtagactcttataaccttggataatgcctcatgggatagatgacggattagaatgtatacacatgtgtactgtgatttcaactgcctcacaaatgaaaccattttgtctcctattgtaacttggactttttttttaatttaaacccagcgtaactgcttaaggatgttttggaacttgaatacaatatttcttttctacaaaa

SEQ ID NO: 644654 - DNA, 638 bp, Homo sapiens
  misc_feature (35)..(35): n is a, c, g, or t
  misc_feature (173)..(173): n is a, c, g, or t
  misc_feature (199)..(199): n is a, c, g, or t
ttaagatccactaagagtattcagtaactcttaanttagaactttgtgagtatagtagataagtagactgtggtctttggagattctcctgccccagacagggacatagatatacggataatgttatatagttaagagcggagcccaggtgaaaatccccaccccaagctggnctcccaacccaaaaattaccattggnccctgagaacacccaaagaccaccctcccagatttcacacattatcaattgcaggaacagtcgtgcatggcaaagtatagttctatgcatttcacagcacagaaaacccttctttcagagggcatgcaagttgccggagattacacccccaagtctggtgctcttgtgatgagcaacttactggcaaacacatctcccagtgttgtaagcaggcaaatacattgagcacattttgctgtaattccatctatttgcaatgcctgcacagttgtctgtctctggctgttaacttactcattcttgacagaactctgctttattgattgcacttttttaaaaatgccaaaggcatttccacacttgttagcttgaccgccaccactagggtataagagcaagtggctctatgccttatggctaaaggctcctccttcttggg

SEQ ID NO: 644655 - DNA, 613 bp, Homo sapiens
cagtagctgccatcagtgtggattctgaaaactaactggcatcaacactgggtgtagaaacatgcttgccttatgtatcagaggacatgctcagcagatccaagagatatatttggcaactttttctagaaaaggcacatgggtatcattcattacatttttgagtttttttgggtttttttttttttttggagacagtctggctggtatggcccaggcgggagtgtggggtggggcacaatcacagctcatggcatcctcaatcacccaggcctaagcaatcctcccaccttgtagctggggactacagctcacagcacaccgggctaaaattttttttggggagagggatctctatgtggcccaggcgggtctcaggctccggggctcagagggtcctcctgcctcagtttccaagggcacaggccaagtggtagcttggtccctggcgataatgcccaaaagaggttctatacctttaaaggaatggacttccataaatgggttatgtgggggggcaagttcttaaagcgggaaatggtaaatccctccttgaaatgtttttccatgcagttaccatgaactaatactacaataagggatggtcgttggc

SEQ ID NO: 644656 - DNA, 115 bp, Homo sapiens
ctgttgggggccagtgccctcctagttggtggggtagtgggctatggctggcagtggtaaatcggctcacgaaaatatcctgtcgaagaagaaaatttctagaggtcgtaagata

SEQ ID NO: 644657 - DNA, 359 bp, Homo sapiens
tcgagaatagtacgtgtcgtggaagacaaaaaaagagggggacgaaggtagaggggtactgccactagataatggaaacatagtgacatgacagtcgtgagcctggatggatctcagattgagggggaaaagtagccttgaaggacattcttctgcaaactgaagacatgtgcatatggatggtgatggagtaatataatcgaggtcaatattacgtttctctttttttttttttttaaaaagaggggatctggcggtgtaccccaggcgggagtgcagtatggcaacctgaaactccggggctcaagtgatcatcccactttagcctcttaattaaaggggccgggaaccctcaaaag

SEQ ID NO: 644658 - DNA, 688 bp, Homo sapiens
agcactgcgaacatagtgctagctgtgctgcacgtggctgaccggaagatgctctgctgcatataggatggagcctgagggacaccattgaatacagggctgaagggttctatgactggatggaaggctcgatcacctatcataacaccctaatacgagtgagtggatgctcgagcagaagttgacatgaaggatctgcggacgcactttaagagactgtatggtagggctcatgactcgagcgtcaagggtgacacgtctgaggactacggtagagtactgctagaactgtgcctgggagatgattagaagattaccatccagaatgacacgaggattctagagactatgagtgtgaagaactgtacgtttgtacgctgttgtggtcattgtgtcaaagtgcttatttgcaatcacagcgtgtacagctgactactgaaatatagactgtcggtatgatagatacccatggtatgtcaagatgatgctgtaaagctggacttgcatgtgatagcttggaggatttaagtggacagtgtgcagtggagctgagtatggaatgcatgattttaccccgatgctcacgactgtgcgatttacacacgttgagtatagtgacttatggcatctaatcgtgtcagtgccttgttgtaatggcagacttgtctaagatgctttgttgccttcc

SEQ ID NO: 644659 - DNA, 117 bp, Homo sapiens
atctctagcaggatcccctgatcttccgtgcccctaggaacactcagctagacactacgtatgcagagggccacgagaagccagaccctgctatgaaaaaatagcctatttactttt

SEQ ID NO: 644660 - DNA, 2561 bp, Homo sapiens
  misc_feature (2409)..(2409): n is a, c, g, or t
  misc_feature (2561)..(2561): n is a, c, g, or t
gcgccatgaaccaggccaaagcggagcggagcgggggtgaggagagtcgagggaggtgacgcgcgctgccggggcgaggttgcgaggggcggtgttgaagaatgtgtgggcgaacatcctgtcacttacctagagatgttctcacgagagcttgcgcctaccaggatcggcggggccagcagcggctcccggagtggagggaccctgataagtactgcccctcttacaacaagagtcctcaatccaacagcccagtgcttctgtctcgactgcactttgagaaggatgcagactcatctgagcgtatcattgctcccatgcgctggggcttggtcccttcttggttcaaagaaagtgatccttccaagctgcagttcaatactaccaactgtcgtagtgataccgtaatggagaaacggtcatttagtcaggtagcattggtgctgcagatagtcctgagaactgggagaaagtctgggacaactggaggctgctgacaatggccgggatctttgactgctgggagcccccagagggaggagatgtcctgtattcctataccatcatcacagtggattcctgcaaaggcttgagtgacatccaccacaggatgcctgccatattagatggagaggaggcagtttctaaatggcttgactttggtgaagtctcaactcaggaagctctgaaattaatccacccaacagagaacatcaccttccatgcagtctcttctgtggtgaacaactcgcgaaacaacactcctgagtgtctggctcctgtcgacttggtggtcaaaaaggagctcagggcaagtggcagtagccagaggatgttgcagtggttggccacaaagtcacccaaaaaggaagactcaaaaacacctcaaaaggaagagtcagatgttccccagtggtccagtcagttcctgcagaagagtccactccccaccaagagaggcactgcaggactcctagagcaatggctgaagcgggagaaggaggaggaacctgtggccaagcgtccttacagccagtgacacaggactttcagagaccaaggccagggtctgctgcactgctgttctgataataggttcttaacattgtatgtatatgtgtttgctttgggaggaggtggcactgtgttagttgacagttgtgggctcatgtagtcttttttgccatgagtaggagcccctagtggggctggtggacagctttggaagaggtgtcctgctgctgttaccagccatgtgggccccataggggcactgcgcctgctgccctttcctggcagggctggtggagtcttccctcaaagcatgccttacccagctgggaagtctctgccctgatctggtactccttgtagtaagctgttttctgctcagccactgggctctttcacttttttagttcttaaaaatttatttttaagttctaaaataaaataaaaataagttcttaaaatttatttttttcctgaataaattgtatttggtaaacttctgcctacattttggaaagtgatgctggtggggaaagttctagatcttacttggtttcttctagaatcagtcttcaggaatggattttgtcacaaatggggcatgggggctttctgaggaaataactacaagtcttggtggtgggctccttattatgtttctttttctttcattcttgatacttggaagtcgtctgaatcctttagcttcaaaccagcctgagtttgagtgcttgccgtagcagaaactatccttaccacaggtgggaaggaaaggaccagtttctagcagtgtcgggccactcctctttcgaacatccctaagggaggcattcacaaaagctgtcccaagcagctggaagaaaacagcttccgagatgaccaggaggactgggcggcgccgagcccagaacgctcctggcgcagcaccgttggcgttggccgattgctgctggtggggggcgggggtgcaggccccagtctctatgcaaatcagggatcagaagatcggaatttccaccaatcagcgggaagcctcggccctgtaactgctaatgggagacagcagcgccacgccacaggcttttcccctggtttcgggaggggtggggagccaggtggggctcccgcccagaccctttcccgaggtccgccctctccgccttttctctaaattcctcttttgagtgccctcccttccggttgagaggcgggggttggcccgtagttgtacactcagtcaccctgcactgtggaggcgggggcctcccttgtggactgatttgcgtgggatttggttgttttattaagagatttaaaaaattcagatgacttactagtatgactgttttgtcatatttgcttccaggttaataaatgacaaaaatgaaaaaaaaaaanggggcgtctaatatcccgagggccatttagctcccgtttgtcaagggccatgggcgataaaaagacggcggtaacgcggtggaaagtccggtttggacccctggggtggaccacgagcggaaatgttgtacatgtgtgtatttaaaaaagtn

SEQ ID NO: 644661 - DNA, 2418 bp, Homo sapiens
  misc_feature (2266)..(2266): n is a, c, g, or t
  misc_feature (2418)..(2418): n is a, c, g, or t
gcgccatgaaccaggccaaagcggagcggagcgggggtgaggagagtcgagggaggtgacgcgcgctgccggggcgaggttgcgaggggcggtgttgaagaatgtgtgggcgaacatcctgtcacttacctagagatgttctcacgagagcttgcgcctaccaggatcggcggggccagcagcggctcccggagtggagggaccctgataagtactgcccctcttacaacaagagtcctcaatccaacagcccagtgcttctgtctcgactgcactttgagaagtcaggtagcattggtgctgcagatagtcctgagaactgggagaaagtctgggacaactggaggctgctgacaatggccgggatctttgactgctgggagcccccagagggaggagatgtcctgtattcctataccatcatcacagtggattcctgcaaaggcttgagtgacatccaccacaggatgcctgccatattagatggagaggaggcagtttctaaatggcttgactttggtgaagtctcaactcaggaagctctgaaattaatccacccaacagagaacatcaccttccatgcagtctcttctgtggtgaacaactcgcgaaacaacactcctgagtgtctggctcctgtcgacttggtggtcaaaaaggagctcagggcaagtggcagtagccagaggatgttgcagtggttggccacaaagtcacccaaaaaggaagactcaaaaacacctcaaaaggaagagtcagatgttccccagtggtccagtcagttcctgcagaagagtccactccccaccaagagaggcactgcaggactcctagagcaatggctgaagcgggagaaggaggaggaacctgtggccaagcgtccttacagccagtgacacaggactttcagagaccaaggccagggtctgctgcactgctgttctgataataggttcttaacattgtatgtatatgtgtttgctttgggaggaggtggcactgtgttagttgacagttgtgggctcatgtagtcttttttgccatgagtaggagcccctagtggggctggtggacagctttggaagaggtgtcctgctgctgttaccagccatgtgggccccataggggcactgcgcctgctgccctttcctggcagggctggtggagtcttccctcaaagcatgccttacccagctgggaagtctctgccctgatctggtactccttgtagtaagctgttttctgctcagccactgggctctttcacttttttagttcttaaaaatttatttttaagttctaaaataaaataaaaataagttcttaaaatttatttttttcctgaataaattgtatttggtaaacttctgcctacattttggaaagtgatgctggtggggaaagttctagatcttacttggtttcttctagaatcagtcttcaggaatggattttgtcacaaatggggcatgggggctttctgaggaaataactacaagtcttggtggtgggctccttattatgtttctttttctttcattcttgatacttggaagtcgtctgaatcctttagcttcaaaccagcctgagtttgagtgcttgccgtagcagaaactatccttaccacaggtgggaaggaaaggaccagtttctagcagtgtcgggccactcctctttcgaacatccctaagggaggcattcacaaaagctgtcccaagcagctggaagaaaacagcttccgagatgaccaggaggactgggcggcgccgagcccagaacgctcctggcgcagcaccgttggcgttggccgattgctgctggtggggggcgggggtgcaggccccagtctctatgcaaatcagggatcagaagatcggaatttccaccaatcagcgggaagcctcggccctgtaactgctaatgggagacagcagcgccacgccacaggcttttcccctggtttcgggaggggtggggagccaggtggggctcccgcccagaccctttcccgaggtccgccctctccgccttttctctaaattcctcttttgagtgccctcccttccggttgagaggcgggggttggcccgtagttgtacactcagtcaccctgcactgtggaggcgggggcctcccttgtggactgatttgcgtgggatttggttgttttattaagagatttaaaaaattcagatgacttactagtatgactgttttgtcatatttgcttccaggttaataaatgacaaaaatgaaaaaaaaaaanggggcgtctaatatcccgagggccatttagctcccgtttgtcaagggccatgggcgataaaaagacggcggtaacgcggtggaaagtccggtttggacccctggggtggaccacgagcggaaatgttgtacatgtgtgtatttaaaaaagtn

SEQ ID NO: 644662 - DNA, 2056 bp, Homo sapiens
  misc_feature (1904)..(1904): n is a, c, g, or t
  misc_feature (2056)..(2056): n is a, c, g, or t
gtgtcactggctgtaaggacgctcgcccacaggttcgtcctccttttcccgcttcagccattgctctaggattcctgcaaaggcttgagtgacatccaccacaggatgcctgccatattagatggagaggaggcagtttctaaatggcttgactttggtgaagtctcaactcaggaagctctgaaattaatccacccaacagagaacatcaccttccatgcagtctcttctgtggtgaacaactcgcgaaacaacactcctgagtgtctggctcctgtcgacttggtggtcaaaaaggagctcagggcaagtggcagtagccagaggatgttgcagtggttggccacaaagtcacccaaaaaggaagactcaaaaacacctcaaaaggaagagtcagatgttccccagtggtccagtcagttcctgcagaagagtccactccccaccaagagaggcactgcaggactcctagagcaatggctgaagcgggagaaggaggaggaacctgtggccaagcgtccttacagccagtgacacaggactttcagagaccaaggccagggtctgctgcactgctgttctgataataggttcttaacattgtatgtatatgtgtttgctttgggaggaggtggcactgtgttagttgacagttgtgggctcatgtagtcttttttgccatgagtaggagcccctagtggggctggtggacagctttggaagaggtgtcctgctgctgttaccagccatgtgggccccataggggcactgcgcctgctgccctttcctggcagggctggtggagtcttccctcaaagcatgccttacccagctgggaagtctctgccctgatctggtactccttgtagtaagctgttttctgctcagccactgggctctttcacttttttagttcttaaaaatttatttttaagttctaaaataaaataaaaataagttcttaaaatttatttttttcctgaataaattgtatttggtaaacttctgcctacattttggaaagtgatgctggtggggaaagttctagatcttacttggtttcttctagaatcagtcttcaggaatggattttgtcacaaatggggcatgggggctttctgaggaaataactacaagtcttggtggtgggctccttattatgtttctttttctttcattcttgatacttggaagtcgtctgaatcctttagcttcaaaccagcctgagtttgagtgcttgccgtagcagaaactatccttaccacaggtgggaaggaaaggaccagtttctagcagtgtcgggccactcctctttcgaacatccctaagggaggcattcacaaaagctgtcccaagcagctggaagaaaacagcttccgagatgaccaggaggactgggcggcgccgagcccagaacgctcctggcgcagcaccgttggcgttggccgattgctgctggtggggggcgggggtgcaggccccagtctctatgcaaatcagggatcagaagatcggaatttccaccaatcagcgggaagcctcggccctgtaactgctaatgggagacagcagcgccacgccacaggcttttcccctggtttcgggaggggtggggagccaggtggggctcccgcccagaccctttcccgaggtccgccctctccgccttttctctaaattcctcttttgagtgccctcccttccggttgagaggcgggggttggcccgtagttgtacactcagtcaccctgcactgtggaggcgggggcctcccttgtggactgatttgcgtgggatttggttgttttattaagagatttaaaaaattcagatgacttactagtatgactgttttgtcatatttgcttccaggttaataaatgacaaaaatgaaaaaaaaaaanggggcgtctaatatcccgagggccatttagctcccgtttgtcaagggccatgggcgataaaaagacggcggtaacgcggtggaaagtccggtttggacccctggggtggaccacgagcggaaatgttgtacatgtgtgtatttaaaaaagtn

SEQ ID NO: 644663 - DNA, 89 bp, Homo sapiens
actataacgctgctggaaatcattggataagcggatgagggaggcatcaccattgcaatcacttctggaggcgctgctggaaatgctga

SEQ ID NO: 644664 - DNA, 2241 bp, Homo sapiens
  misc_feature (2089)..(2089): n is a, c, g, or t
  misc_feature (2241)..(2241): n is a, c, g, or t
ttggggttgaatgaaaaggaagcagaaggggagtaggaccagtcaaggaagaggttgtacaagattgtctggcacaaaggagggaaccaagtttagcccttatcaccagtggctgttaaggaaattctttctgtatctctcccagtctcggttttccgacactcccccctgggtcatgcctgaattacattcttttgcctgagaatgcttcattctctgcacattttggaatgcctttcagctctcttctctggctggtcccacacaatcctctgtgaaaccttctctaagatctactttcctgccccttagagcacactcctctctttccactcttgactggtgggccccagctggcccttagtaacattttccaagcctgggtaagtacctaatgcctcttcccctgtttcttcccttggacttggccttttcccaaaagcttgagctgtatggtttgagctttttcctctttcttgtaggagctcagggcaagtggcagtagccagaggatgttgcagtggttggccacaaagtcacccaaaaaggaagactcaaaaacacctcaaaaggaagagtcagatgttccccagtggtccagtcagttcctgcagaagagtccactccccaccaagagaggcactgcaggactcctagagcaatggctgaagcgggagaaggaggaggaacctgtggccaagcgtccttacagccagtgacacaggactttcagagaccaaggccagggtctgctgcactgctgttctgataataggttcttaacattgtatgtatatgtgtttgctttgggaggaggtggcactgtgttagttgacagttgtgggctcatgtagtcttttttgccatgagtaggagcccctagtggggctggtggacagctttggaagaggtgtcctgctgctgttaccagccatgtgggccccataggggcactgcgcctgctgccctttcctggcagggctggtggagtcttccctcaaagcatgccttacccagctgggaagtctctgccctgatctggtactccttgtagtaagctgttttctgctcagccactgggctctttcacttttttagttcttaaaaatttatttttaagttctaaaataaaataaaaataagttcttaaaatttatttttttcctgaataaattgtatttggtaaacttctgcctacattttggaaagtgatgctggtggggaaagttctagatcttacttggtttcttctagaatcagtcttcaggaatggattttgtcacaaatggggcatgggggctttctgaggaaataactacaagtcttggtggtgggctccttattatgtttctttttctttcattcttgatacttggaagtcgtctgaatcctttagcttcaaaccagcctgagtttgagtgcttgccgtagcagaaactatccttaccacaggtgggaaggaaaggaccagtttctagcagtgtcgggccactcctctttcgaacatccctaagggaggcattcacaaaagctgtcccaagcagctggaagaaaacagcttccgagatgaccaggaggactgggcggcgccgagcccagaacgctcctggcgcagcaccgttggcgttggccgattgctgctggtggggggcgggggtgcaggccccagtctctatgcaaatcagggatcagaagatcggaatttccaccaatcagcgggaagcctcggccctgtaactgctaatgggagacagcagcgccacgccacaggcttttcccctggtttcgggaggggtggggagccaggtggggctcccgcccagaccctttcccgaggtccgccctctccgccttttctctaaattcctcttttgagtgccctcccttccggttgagaggcgggggttggcccgtagttgtacactcagtcaccctgcactgtggaggcgggggcctcccttgtggactgatttgcgtgggatttggttgttttattaagagatttaaaaaattcagatgacttactagtatgactgttttgtcatatttgcttccaggttaataaatgacaaaaatgaaaaaaaaaaanggggcgtctaatatcccgagggccatttagctcccgtttgtcaagggccatgggcgataaaaagacggcggtaacgcggtggaaagtccggtttggacccctggggtggaccacgagcggaaatgttgtacatgtgtgtatttaaaaaagtn

SEQ ID NO: 644665 - DNA, 1071 bp, Homo sapiens
ccctgatggggagcacacccgccgcggtcacgtagctgtcgttggcgaacaggaagatcgtgtcgtcctgcatgctcgctccgacgatgagtacagggagcatcagcagcacgatgaccgtgaccatgacacgacgggatgcgacggcggcgaaccgagccagcaccacgacaccgacggcgaaggtgaggtacgccatccactctgcgctgaccgaccagtcgacgccgttccagtcgagcgtggaggggaaccagccgttgaggagcgtcaggtgcaggagaagtcgcccggggtcggcctgtccgaggaaagatggatcgccggacgagagagcctggaagatgaaatatgccccgaacagcatgagcacgaaagcggtgaggggccacaccctggccagccgcagccagatgaatccaacggcggtgcgccaggtgtatgcactcgtcatcgtcgacatgtgcgtgtaggtcaggatgaatccgctgaggatgaagaagagatcgacccgagatatcccgccgacgacaggtggatgacgaactgcgtgaaggggccaggaccgagggcatcgacgatctcggtgcggaagtgccggagaaagcaccagaacgcagcgagggcacggattgcccgtcagcgcaccgaatcagcgggcccgacgaacaggtggatcgatagcagagtcgactctcgacatcgaatacgggaagggccggcctaacggttgaccttggcgggcgagagcagcccagaatcgagccgagtacggcgggcaggaacacgaagatcaacaacacagtttgcgaagaaaacggggaatcggggtcacgacgatcgcgaatgaaccggggacagcaagattgacgacaacgacggagtgaaacgaaaggatgcaagcacaacgaaccccagaaaccccccggagtgtcagcgagcaagaggtgacaatcacgaaacaacaatatagtgcaggtacacacgaaggagaaccgagacgccccacaagatcaacacagcgtgggctgcacacagcagcacatcagagaaacaataagaagccagcaa

SEQ ID NO: 644666 - DNA, 1470 bp, Homo sapiens
  misc_feature (7)..(7): n is a, c, g, or t
  misc_feature (1318)..(1318): n is a, c, g, or t
  misc_feature (1470)..(1470): n is a, c, g, or t
acttctngctaggtacgaggctgggtgttagcggacgcgaggcgacgcggagagggcggcctgggccgaagtgaggcgacgcggggcggcggagtctgagggccggagcggagcggaggcgacgcggggaggggcgagggatcgcggccggtggctgggggccacctgctccccgagcaccggcccccgctccggggagcagagtccggagcgggatccgcggcccacaggttgcgaggggcggtgttgaagaatgtgtgggcgaacatcctgtcacttacctagagatgttctcacgagagcttgcgcctaccaggatcggcggggccagcagcggctcccggagtggagggaccctgataagtactgcccctcttacaacaagagtcctcaatccaacagcccagtgcttctgtctcgactgcactttgagaaggatgcagactcatctgagcgtatcattgctcccatgcgctggggcttggtcccttcttggttcaaagaaagtgatccttccaagctgcagttcaatactaccaactgtcgtagtgataccgtaatggagaaacggtcatttaaggtgcctctgggaaagggaagacgctgtgtcgttttagcagatggattctatgagtggcagcgatgtcagggaacaaaccagaggcagccatacttcatctattttcctcaaatcaagacagagaagtcaggtagcattggtgctgcagatagtcctgagaactgggggcattcacaaaagctgtcccaagcagctggaagaaaacagcttccgagatgaccaggaggactgggcggcgccgagcccagaacgctcctggcgcagcaccgttggcgttggccgattgctgctggtggggggcgggggtgcaggccccagtctctatgcaaatcagggatcagaagatcggaatttccaccaatcagcgggaagcctcggccctgtaactgctaatgggagacagcagcgccacgccacaggcttttcccctggtttcgggaggggtggggagccaggtggggctcccgcccagaccctttcccgaggtccgccctctccgccttttctctaaattcctcttttgagtgccctcccttccggttgagaggcgggggttggcccgtagttgtacactcagtcaccctgcactgtggaggcgggggcctcccttgtggactgatttgcgtgggatttggttgttttattaagagatttaaaaaattcagatgacttactagtatgactgttttgtcatatttgcttccaggttaataaatgacaaaaatgaaaaaaaaaaanggggcgtctaatatcccgagggccatttagctcccgtttgtcaagggccatgggcgataaaaagacggcggtaacgcggtggaaagtccggtttggacccctggggtggaccacgagcggaaatgttgtacatgtgtgtatttaaaaaagtn

SEQ ID NO: 644667 - DNA, 968 bp, Homo sapiens
  misc_feature (815)..(815): n is a, c, g, or t
  misc_feature (837)..(837): n is a, c, g, or t
  misc_feature (843)..(843): n is a, c, g, or t
  misc_feature (890)..(890): n is a, c, g, or t
  misc_feature (895)..(895): n is a, c, g, or t
  misc_feature (952)..(952): n is a, c, g, or t
  misc_feature (954)..(954): n is a, c, g, or t
ctccctctatttcatggtctgtctttgcgttttttaggcgaccgtattcagtgccggtggtaccgtggttaggtactgggtacactggttcacctgtattctaagtgttcgatggctaactgcataagatgctcaggtctaagcaacatgtttgcggaatgtttccggtgagtccgctggtacccacggctcacacgcagtaatgctagcactgtgggtggccaaaaacaggttggatcactgttgtccaggtagtcttagatacaagcttaggccatcgttaagcaagatctctgtctcgtaacataaagttttaagtatattgagccagaccatggttgtgtgtatgcctgtagtccctagccactcagaaagtctgaggctaggaggatcgcctttgagaccaagagtttgagcctgcggtgtagctgtgtaatgcatccacggcactcaaagcctgggcaatgtagcaagatcctgtctctacaagaaattgttttcgaaaatgagccaagtgtggtggtgcatgcctgtagttccagtctactcaggacactgacgtaggaggcttgcttcgagactgagacgttggaggctgcgactgagccatgaatgccccagctgcactccacgcctggtgcgacagaacgagaccccatctcaaaaaaaataagttctggttgtcattgaattgggataaacagagagcttgatgctttctgccttttgtctcaggtgatgcattgcacatttgggatatttggaaaggaaatgaggaaagaaattagggcctcctttgatctctcgctatttgngggtcctgtccttttttcaagnccttcnccataacgggggttttcctgttttttttttagtatgatccctcaaancctcnctaactggaaggatgattttgtttcagtttgtactcctaaataaaaagtaaacatgncncctctgaccaaaaa

SEQ ID NO: 644668 - DNA, 117 bp, Homo sapiens
catgacttcgggtgtctcggcctcagagcctgggcacgcgatgcatcatcgccatcctgtctatcctcctggctgtcctcctcacggtacctcctgctgtgtgctcatatacacgct

SEQ ID NO: 644669 - DNA, 646 bp, Homo sapiens
aggaaggtcgtgtagtaaaaggctcttccatgagttcaagggattggattcacaaagggtatgctggtcaggacgttgtttgccaaatggccaactcagtgattaagaccagagacggatacacttgtgcgttcttctgaaggagtcatggatgtcaggcagtgtcctgtgactggtctggcgctcgacttgggtcgcgtaagatgggacagcgtctaaaatccatgtcacttattcacgaacatggtagaacgtatcttcagtaggtccaaagatcatgacaggcacgagtacatcactgctcaggtcactgacaagataggtagattgcagctccatataaggaatttgttcttgtcatcagtgcagtgccaaatggaataagctgtttgatcatggttgagcatagtctgagtgacaacctgttagatattctacgtaggagtgcaatgaggacaacattatattatatctatgggctgtttaagacgcaagattctgctctttcattcgaagcatattgagtaagccagctggaatagacgtcaccatagtaatgatagtcagtgtgaagtctaaagtaatgccacaatgattctaaagacgagagttttagggacaacaatacagtaaattgccaaggttc

SEQ ID NO: 644670 - DNA, 413 bp, Homo sapiens
gtgactctacaggatcccggtgtttccctttgtctctactaaaaatacaaaaattagtcaggcgtggtggtgcacacctgtaatcccagctacttgggagactgaggcaggaggatcgcttgaacccgggaggcagaggttgcagtgagccgagatcatgccattgcactccagcctgggcaacagagcaagactctgtgtcaaaaaaaaaaaaaaaaatatagatttttaaattggcttttactttatatattcgctaaactttctcaaacgggactcgtgcttgtacaggaaagagttctgggtggttttctctttggccctatccctgattaaccctttagagccacaccagggttttgtggaggtgactccagtttattggacagacaaaggaaaacaccgggttaccg

SEQ ID NO: 644671 - DNA, 1389 bp, Homo sapiens
tgttttgcgtgagggtggtggtcgagtgtgtgggggtgtgtttggtggcgtggggtcaggggttgtgtgtgttgtgggcgtagtgtgctacgggcttgtcggtttgtgtcgatgtgtggaggtgcagcgtgtggccttgggtggttgcgcgcgtggcgtgtagggttggtgtgtcgagtgtaggtttagcgcctgttgggtgggtggtgctgttgggtgtagggtgttggcgcgggtgggatttgtgtgtgtgttggcgtggatgtgcggtgtttgggtcgggggaccggttgtgggtgggtgcgggagctgtgttgggggtggtttaggttggggcccgggggttttcgggtgtgggtggtgtgttgtgggaggaggtttttggtgtgtggggtttggggtgggctgttgatttgtgaggtgcggatcgtggggggtttgtgtttgggtggtgagtgtgtcgcatgtgcctaggtgggtgccaacgtgcggggggggcgcttgtgttgcggcctgtatttgtgtaagtttaggttgtggagcagcgcggggggagcccggttgggttgtgtagcaccgtttcgccggtggtgtgttgggagaatagccaccgcgtgtgtgaagtggtgttggtggcccttatttattggtgtgtatgggtgggggcaccgcttaggaggcgttgttttgtatgggaggccagcggtgctgtggttgtggtggtgtgtgttgggttttgttgggattttgttgtgttgaagtgaattgtgagtgtagtgtgctcgagggtgtagggtgggcgcgctctctgtgtagggggcacggggagttctttcacctgtaggctgggcgtgtgcaagttgtgtgttggtagtagttaaagccacctgttgaagtgtgtatgaatattttgttgcccacatagatatgtgtgggcacgcgtgtcgtatacagagatagggcagtatcttaggccactgtgtgtgtacagatagtggtgtatgtagaatcgcagcagacagaggggggaaagcgttttctcttttagaagctgcccgtcggtgtgagcacacgtgttagtgggttaaagtataccacggggggggagagaatcgcactgtgtagtaagagtcactgtttcgtaagggcacaagagtgtgttgagatgctataatgagccacagcctcgttgtctagcctagtagggcacgtgctctttatgtttaggctagagaagtgggagatcactggccttgttgagaagagagaagaaaagtcacccacattcgtgcacttgtagctgtagattcaatatatgtgcactgttgcggtagtgtttttgtgttgtagttgtaaaaaattcacatatataaacgatgttgtgatgta

SEQ ID NO: 644672 - DNA, 949 bp, Homo sapiens
  misc_feature (7)..(7): n is a, c, g, or t
  misc_feature (294)..(294): n is a, c, g, or t
acttctngctaggtacgaggctgggtgttagcggacgcgaggcgacgcggagagggcggcctgggccgaagtgaggcgacgcggggcggcggagtctgagggccggagcggagcggaggcgacgcggggaggggcgagggatcgcggccggtggctgggggccacctgctccccgagcaccggcccccgctccggggagcagagtccggagcgggatccgcggcccacaggttgcgaggggcggtgttgaagaatgtgtgggcgaacatcctgtcacttacctagagatgttcntccacggagggagctttggcggccctacccagggatccgggcgcggggggcccaagcaaggcgggctcccgggggagtggggggggacccttgattaagttactggcccctcttacaacaaagagttccctcaaaattcccgaaacaagccccaagggtggctttccgttgctcttccggaaactgtgccacctttttttggacgaaacggggattttgcaaggaacctccaattccctaggaggcgggttaattcaattttggccttcccccaaattggcggcgtgtgggcgggccctttgggttccccttttcttgtgcgtttccaacacaggaaagagtggtagattccttttcacaaaagggcgttggcaaggtgtcaagattaactttaacgccaaagagcgttggttccgggataaggcttagagaattaaaccacgtggttgacagttttgggcacgcacacacgcggggggctccagtttttttaagagggggggttgggcccccttttccttgtgcgggcgaacaagacggggggggaaaacaggaaacccggagcctttaggagtggggatccggagagagtttttattataaaagagggccaagaggaaatttttgggggagatgttttcccctaaatttgaag

SEQ ID NO: 644673 - DNA, 516 bp, Homo sapiens
gggcggcagccggagcttctggtgtagtcttcactgctctgtgtcttctgctcctagaggcccagcttctgtggcctcgttacctgcaggtatgggagatccacaggctaagacgccaggacccactggaagcctagaaatgctggctccaaaatccgcggccccgagttctccttggcgcagctcggcctcagtccccttcagccataggatggcggcgggctgacagctcggaccccgggcatcctgtctcctccctgcgcagttgactgtgccttggtctggagtcctctgtgggcagctctgcccccactgccgcaggctctccccgattgtgcagggaccactggacggtcgtcaggggagaatactgactcaggatgcagagttcatgaatgggaagagctttggtctgcggggttcccagtccccctttgtatctattagaaatgtgtggaagtctccgcagaaatattaacagaattccattacaagagtaattcaagaattgtagag

SEQ ID NO: 644674 - DNA, 645 bp, Homo sapiens
  misc_feature (74)..(74): n is a, c, g, or t
  misc_feature (124)..(124): n is a, c, g, or t
  misc_feature (142)..(142): n is a, c, g, or t
  misc_feature (493)..(493): n is a, c, g, or t
  misc_feature (645)..(645): n is a, c, g, or t
gctccccacccctcccgaaaccaggggaaaagcctgtggcgtggcgctgctgtctcccattagcagttacaggnccgaggcttcccgctgattggtggaaattccgatcttctgatccctgatntgcatagagactggggcntgcacccccgccccccaccagcagcaatcggccaacgccaacggtgctgcgccaggagcgttctgggctcggcgccgcccagtcctcctggtcatctcggaagctgttttcttccagctgcttgggacagcttttgtgaatgcctcccttagggatgttcgaaagaggagtggcccgacactgctagaaactggtcctttccttcccacctgtggtaaggatagtttctgctacggcaagcactcaaactcaggctggtttgaagctaaaggattcagatgacttactagtatgactgttttgtcatatttgcttccaggttaataaatgacaaaaatgaaaaaaaaaaanggggcgtctaatatcccgagggccatttagctcccgtttgtcaagggccatgggcgataaaaagacggcggtaacgcggtggaaagtccggtttggacccctggggtggaccacgagcggaaatgttgtacatgtgtgtatttaaaaaagtn

SEQ ID NO: 644675 - DNA, 119 bp, Homo sapiens
  misc_feature (79)..(80): n is a, c, g, or t
gcactacggcttttggccaggccccctgggcgcgttccgggagctcaggcttgcggagctgggagaagcacaccgctcnncaagggggttggtgggcacgcggcccaggggtcagggtt

SEQ ID NO: 644676 - DNA, 433 bp, Homo sapiens
cagctttattcccaattacaaacacatggaagtcaccagtatttccttcagtaggtgaatgtataaacagcagtacatccagacaatggaagattattcagtgctaaaaagaaatgagctatcaaccaatgaaaaaacatggagacaacttaaatgcatataaatatgtgaaagaagctaatctgaaaagactgcatactgtatggttctaactatatgacattctagaaaaggcaaaaacagacagtaaaaagatcagtggttactaggagttaatgaggagggagggattaactggtgaagcacagaggatttttaagtcagtgaaactactctgtccatactccagtggtggatacatgccactatacatttgttcaaatctgcagaatgtacatcaaaaataaatcctaatctcaactaaaaaaaaaaa

SEQ ID NO: 644677 - DNA, 284 bp, Homo sapiens
  misc_feature (215)..(215): n is a, c, g, or t
  misc_feature (229)..(229): n is a, c, g, or t
  misc_feature (244)..(244): n is a, c, g, or t
  misc_feature (261)..(261): n is a, c, g, or t
tcatgtctgacgcttctgggtccggagacagtgttctgagaggcagcacacagaaatgaaaagcacaatgaaaaagtcttccatgttgtatacatacattagaatattattcagcaaagaagatgtatgaagtacaaataatgctacaacttgtaaaccttgaaaacctcatgttaaatgaaagatgccagtcacagaatatcacacattatatnatttcatttatatntgatttctggaatanggagatccgtatagacncgtaagacataaccgcggggagt

SEQ ID NO: 644678 - DNA, 219 bp, Homo sapiens
cgttcatcaagggatgcaagtatctacaatttggtcctctcacagaccgtttcgctgtcgatattccatgaccgttttgctccattccccctggtgtaacttgtatccctcaaacagaactgtgtaggtgaatttgctattcccttcagccttgaattcaccttcatttgtccccatcagcttcagggccttctttacatttccattggccttatcgag

SEQ ID NO: 644679 - DNA, 389 bp, Homo sapiens
  misc_feature (166)..(166): n is a, c, g, or t
  misc_feature (222)..(222): n is a, c, g, or t
  misc_feature (285)..(285): n is a, c, g, or t
acttcagtgccctgaacggttagagaaattaatgaaggagctccaccaggtgccttcacaactctgagtcatatcagaatctctccacagctctcctttcaaaaatgacaccgtgacatttcaggatgtgaaaaaacttactggaaagtgtgtaagaaaatataanatactatttgtacaatgtgataatgtatcatcagcttgttaatttcagtgtgcttnctttgagcgccggacttaccatttttgaattttgggatttggtatttttttttaaaggaatcnaccctttaaaagaaggaattgcttataccaattacctggatggaagcaaattttttggtgaaagctaaagatatgcatgcagttaaatttataaataataagga

SEQ ID NO: 644680 - DNA, 147 bp, Homo sapiens
tgtatgaccataactgttggaattcctatttccatgctttcctgtgtggtgaggatctcacaagcttttcgacataagtggacaggaatcatcccaacccggaccatccttgttcctgggcactcaaccacgggtgatcctcataga

SEQ ID NO: 644681 - DNA, 1336 bp, Homo sapiens
  misc_feature (249)..(249): n is a, c, g, or t
  misc_feature (298)..(298): n is a, c, g, or t
ccctagaacccaagagtcaggtacctcttctcctttctcctctagggcccaccagctctgagcagatcatgaagacagggtgcccgttttggcttcagaggtttcagtccagtgattcgagcagtggcgaatggtggggggaggcaccctgagctggccctgtgacccggtgcctcagtgatgcgtccaccaaagaagctgagctgagtgtctcaagacgcatcaggggacgaactgtgacagtaacantgtgagctgcagaggatgatttgccgccgtggacacagaactccccccngagaggtctttttcctgagtggcagctgacatgttttctgacggcaacttcaactggggccgggttgtcgcccttttctactttgccagcaaactggtgctcaaggccctgtgcaccaaggtgccggaactgatcagaaccatcatgggctggacattggacttcctccgggagcggctgttgggctggatccaagaccaggtggttgggtgagactcctcaagcctcctcaccccggaccaccgtgccctcaccacgcgccccgtgccccaccgtgcctgccccgcgtcagtgactcctgaggaccctgggccttgtggagcatggtgcacagtggtggccgctctgcatcttcaggatcatcagatgtggtctataatgcgtaggcccttacatgtctgatcaatcacccgagtcatgttatccctgctgatagctttgaaacagaagaaaccctggaactccacttgtgacgctttgacatttgaatgtaagtgttctttcttggcggctctcgctggaggcgtgccatgttgcctcctggcaatagctgcagagttgcataagactcgacgcgcgtctgaaactgtgcgggatcgcagttggggcagaggggttcagcatgcctctggactatctaggccgggaaggtcgacctgcccgtggaacaaggcggactatttacacacgctagaacgaggacggacccgtatgggcgctttgactgattcaaggcaaggcaggaagctaaccaaaacccacaggtaccgagactaccaaagcggcttgagaacttacgggacgcgggactcgggagagaggcaagctcgagcagtagaagctcaccacgtcaccgtcaaagggaacactaaacacacaggatccagggcgccacgacaggttaccagaaaaggggcgcccgtccaagccgcgggaagggctacaccgctggaccgcacaccgggccgcctagaaggcgctacaaagagagagagggagggcagggaacatgttacccggagaaaatgtgaggcgcca

SEQ ID NO: 644682 - DNA, 810 bp, Homo sapiens
  misc_feature (539)..(539): n is a, c, g, or t
ggggattcctgaatctgacagcatgcgggccgagatgtatcgctccgtggccttacctgtgctcgcgctactttctctttctggcctggaggctatccatcgaactccatagattcaggcatactcacgtaatccatcaaagaatggaaagtcagatttcctgactggctatgtgtctgggtggcatccatccaacattgaaggtgacttactgactaatggatagagagtggataaagtggagcattcatacttgcctgtcagcaaggactgaccgttctatctatcgcactacactgaatgcacccacactgaataagatgaatatgcctgccgggcgaaccatgcaactttgtcacagaccaagatagataagtgggatcgagacatgcatgcagcctcatggatgtttgaagatgcaccatttggattgaatgaatgacaaacactgcttgcttgcttgctaatatagataggcttacacactcacactctatgcacaaactgtagggttataataatgttagcatgcacaggancgaccttataaatctacttagagtgctggctgcatgcatgatggatctgagcaagctggttcacacgcaggtctatgaaggctggctcttacagatagggagcaaagaattatttattcaacccaacatcttggtcagacaggaactatccaatctattgccctcaaagcatgttaagatagataaggcggccttagttaacttacaatcaacatactttgtttagaataaagggggaagtaagtgacaggaggattggaagtaatttttt

SEQ ID NO: 644683 - DNA, 344 bp, Homo sapiens
acttgggctggacccactattgccatcttcaactgcctttgctatgatcattgacacactggacggaggacatagcagctctatgccccagtcgcactgctgccagtagacccccgggtcacctgcggctggtggtccctgctagtcagtgtggctctctcattggaaaaggtggatgcaagatcaaggaaatacgagagagtacaggggctcaggtccaggtggcaggggatatgctacccaactcaactgagcgggccatcactattgctggaattccacaatccatcattgagtgtgtcaaacagatctgcgtggtcatgtaggagactctctcccagtcc

SEQ ID NO: 644684 - DNA, 102 bp, Homo sapiens
acacagtcactctagcactcaccagtattagaggcacctgccgtgtccttgtgacacatgtttaacggccgcggttacctaaacggtgcactggtagcataa

SEQ ID NO: 644685 - DNA, 356 bp, Homo sapiens
catgggtagaagttcacctgcatggccctggcatttctattttctgattagaacatcacaccagccatacatgatgtttcacttctgtaatccccgcactttgagaggccaaggcgagagaatcacttgaggccaggcgtttgagaccggcctgggcaacatagtaagacctcatctctatgaaaagttttttaaaaaattggctggatgttgtggtacacacctgtaatcccagttcttcaggggcctgaggtgggagcatcacttgagtccaggagtttgaggctgcagtgagcagtcatgccactgtactccagtctaggtgatagaatgagaccttttctctcctaaaaaac

SEQ ID NO: 644686 - DNA, 118 bp, Homo sapiens
tgctgtgtcattacaatttggcttcttatattaatgtttgaaaaggcttaaagctggtagtctcgaacctgcccttcactggttgtgtaaataaaactgtagaatgacaaaaaaaaaa

SEQ ID NO: 644687 - DNA, 373 bp, Homo sapiens
attgtaactcataaagaccatctttggatagaagtattttgctggagtaggtttgaaaaagcctgtatttgggccttggcttaggtacaatgtaaggtgaaaaaaaactctttccaaagactcatgtttcctttccctgaagttgcagctaaattacttgaatctatcgtatatgtaaaaacttggattttttatgttgttaataggctgtggttttaaattatttgttgtttagaaaattatttaaaattttggatattagttaaaatcatacagagattgtaataatcattctaattaaaatcttgttgatgaacttccttcttaggtattacatcaaataccaataacggatctatggtggtccacagta

SEQ ID NO: 644688 - DNA, 177 bp, Homo sapiens
gaagtgcatcgcgtatgagcatgcttgtagtctcagctactcccaggtgctgaagcaggaggatctcttgaacctgggaggtcgaggtgcagcgagctatgatcgtgccactgcactccagcctgtgtgacagagtaagaccctgtctcaaaaaatataaagtatttaaccaacaaa

SEQ ID NO: 644689 - DNA, 351 bp, Homo sapiens
tgccgctagaggcccctagacagatgtcacgtcagaggttaggactctgtttcatctataaggactcggacacctctaggcaccgagctaagacggcgccccaaagttaggtggcccgtcgcaggcagcccctacaagtctgtcctcctcgctcagcacaacccttcacccacaggccagcagcaatcccgacgcaggctcctgtcactaccctctacgcgctcaggcggacagctaaggtctggctgagtctccggcaggggcgcttggaatgtgaccggtcacccactctcggccctgcatttgcttgtgcatgcaagaaccacagtgtagaggcacccgaaccgtgtg

SEQ ID NO: 644690 - DNA, 349 bp, Homo sapiens
aggtgctgggattgcaggtatgagccacagtgcccggcgggataagttttaaaataatattctctgctggctgggcatggtggctcatgcctgtgaacccagcactttgggaggctgaggcaggagcatcactcgaggccgagagtttgagaccagtctgggcaacatgatgagacccccctctctacaaaaaataaaaaaaatttggctgagtgtggcatgttcctgtagctatcgggaggctgagatgggaggattgcttgagcccaggagtttgaggctgcagtgagctatgattgcaccactgcgctctagtctgggtgacagtgtgagaccctgtctcttaaaa

SEQ ID NO: 644691 - DNA, 288 bp, Homo sapiens
cgccacaggcttctccaccaatcacgcatttgggagcccacattggagcagtgggcctcctaaggcatcaggaacgggtcacgcagaatgagttgctgaaacatgtcacggtgaagatcttcgaggtagtgacttccagatggaccgcagtgctcgggaccgcctttgtgaggagacggcagagcatgtagaagctagtggagaagctgctcgtcctggttaacctgttcaatgcccagctgaaagcgttcagagatgaggagaaggccagagtagctgtggtggacg

SEQ ID NO: 644692 - DNA, 801 bp, Homo sapiens
  misc_feature (582)..(582): n is a, c, g, or t
  misc_feature (615)..(615): n is a, c, g, or t
  misc_feature (731)..(731): n is a, c, g, or t
  misc_feature (781)..(781): n is a, c, g, or t
tgcaagcaacggttcgtcaccgcaggttgagaaggaatgtctcctaccgcggatttatcagacttgaatgctataagctggtgaggcacttgttgggtatcgaaccttatcgcgccttgcgcgcttggtggtagcctctccttgaccatctttgcgcttttcgcaagcacggggaagcgagggagcgcgcgagaagatttgatcatcgtcaaccgctgagaagatgtacgtcattgtcgtctacgatgttgaacaagagcgagtgggtaaagtgtgccagttgctacggcgctacttgcgttgggtgcaaaattccgcattcgagggggagttaaccgaatcgcagctagaacgattgaaggaggatttgaaggcgatcatcgactcggagaaagattcggcctacttttatctgctaagagacgcaaagtggatgaggaaggagataatagggcaaaacaagggatccgttgactatctttgtgatcgcaccaagtaagacgctcgccagtagcggcatcaataagagatccgttggctatcttttgtgatcgcactgtctcgcgggctttcctgttcttngtctttttaacctaatccgttgatcatctttgnatctcaccgtgacttcatgtagagtcatccgtggatgtttcatccaagatcgcgcatcgtctgaaccttgcgaaggttacagtcgaagctcgtagtctcgccaaagatgctggccnaggccacgatcaggtctgggagcggtcactagtcttcatcggtggctccnagttgttggggacaagtcgc

SEQ ID NO: 644693 - DNA, 530 bp, Homo sapiens
gctcgtcgtccggcgcgtcgaaggcgatgggctgctgcaggcgcagcacgcggccagcgggttcttcagccccttgacgcggccatgcgggatcgcgacgccatggccgaggccggtcgagcccaggcgctcgcgcgcgaacaggttgtcggtgaccagcgcccgcgccatctggtggtggttctcgaacagcaggccggcatgttcgaagacgcgtttcttgctggacgcatccacattcaccaacacattgtcggcgggcaggatggcggcgagacggttcatgggcggaggccggtcatcgggggcgccgttggggcgcggccggaaccgggcgatgggtcatcacagagcagcagattatggaaccccggccgttttggggtgggcggcagaccctagggccgtggaaaacgcctctccaggcccccgaatgcgggtttttgcggcactgcagcaacaaccgacttgccatggattgcgcatcgcaaaaacaaagcggcccgcaggccgccgtggtgcttggccgg

SEQ ID NO: 644694 - DNA, 968 bp, Homo sapiens
ggtgcggtccacgttgagcctgtggccctccaggtggctgaagaggatctgggtgcgcgccatgttggatctccttccaggacgaccgctggcgctgacacgagcagcatctcactactgcatgccatgcgtcgattgtggaagttgtataccttcattctctctgagcggatactcatatatacacacgtcgaagaaacaaggccacagatgggtcgattggaggcccaccatccaaggaatgagacttgtaccatggtaggctccgcagctgagcggaacattccacacaattctcctcaacgcaacacgtaggaaagtcgttgtgtccttgtgatcacacacgatgtgcctatacaagagaggtgggccaacggctaatctaagaatcctggcaacgaggtggaacatgacagcaatcttatgagattgtatgactctctatgtagcactggtgaaaagctccatcctggcgagcgtaagcattggcaaaggctatcagtctcactatcgcgaggtggcgcgcgatgtctccgcgccccaccaccatggggactgggggaaggtgcacatatgaatgcgccatgtagggcataggtttaaggccctgagtagggagagcccgcagtgagacagaacccatgttcagagttgcgaactccacatgcacgagactgaatcctcaaggaagtaggcatcgacaatgatctatgtaaaacgagccaacacaacgagtttacgtgtgtccacttatagtgctattaccatgttaaagggtcgaccccatttgagacactttctcttccaagacgtggttggcctttgtgactggtacaggacaagcacggactttcgacggttggcggtttggacctggtatggaagcaacgggcccaccgggacctgtctagtctggttggacgccgaacggcatcccatcgctgggtaccgataacggccaccggatc

SEQ ID NO: 644695 - DNA, 403 bp, Homo sapiens
ccaaggtacattgtccaccaagtacagactggttggtgacaacgccagaaggctacacacaggaaggttactcttgtgcacctgacaaatagacaaggatcacaggatcaaaattgaaggcaggctatcagagtatcaagaaattcttaaaaaccaaaaagtgatttggaagcacaaaacttacagttaatgctacccaatgtcatgatgggcccagaggcattgtggcttcctaagttagaaaatgccatatgccaaaattttaaatggaacacactacatttttttctaatcaatccccctctctcccagaaaaaataggaactcatttttttcagggtggggaggaagagaggggatcatgggacatggaaacagtagttatattagtagtatttttgtt

SEQ ID NO: 644696 - DNA, 171 bp, Homo sapiens
  misc_feature (32)..(32): n is a, c, g, or t
  misc_feature (52)..(52): n is a, c, g, or t
cgggcatgtgctgtaggccagcggcccccggncgcgattccgggcagtcgcncatcccgaaccggagctcacggtgtacgacccgaacaatatctttgcccgaatcctgcgaggcgagctgccttgccacaaggtctacgaagacgccgacacgctggcctacagcacatg

SEQ ID NO: 644697 - DNA, 264 bp, Homo sapiens
gacgctctctctgtggggggtggccacgtagggtccagcacgtggggtggtaccccaggcctgggtcagcccgggacaaggcaggggccacaggaccgcggggtccccagctgccacctcacccaccgcaattcatttcgtagcaggcacaggggcagctccggcacggctttctcaggcctatgccggagcctcgagggctggcgagcgggaccgacaggcagtgctcggggacgttgcagcaggaccccacagagagagcgt

SEQ ID NO: 644698 - DNA, 344 bp, Homo sapiens
atggcagacacaaattctgtggctacagtagaaatagaaagaactgatgctgagttgttttcggcagatgtaaataactactgctgctgtctagatgctgaagctgaactggagacccttcaggagcctgataagtgttgcggaggtcagagtaccatctgtgggagggacagaaagagagcctggagacaagagcatttgcttctagtgagctatcaacgtgatgtgtgatatacacacctctaaccctggatgtagccagataagaacacatcatctgagagttatgagactcaaaccttcaatagtatgggagtggcagcgacaccagcacaaagagctgt

SEQ ID NO: 644699 - DNA, 198 bp, Homo sapiens
atagtgaaatgcccgccggactattttgttgaagactctctccctatataagcccatgtaaaaggtctcagcatctagcacaagactcaacaagtgaagcccacatctctctttcatacaggatttgctgcagttactatattcttccaaccagttgagtagtctcaacagtgtgactgggtgacttttaacatagtt

SEQ ID NO: 644700 - DNA, 402 bp, Homo sapiens
actaaagcatatacaatacaagcaatgcattccatattcttaaaatgaccaaacacttatggtattaatacaatgtataccctgtatactcatatatactataatatacatttccagtatatagttggtgtgtttacttgtgtgtttgtgtttttgttgtttctacacaggaatagttaggtctgattcatttgagggagcccaggtgaccttggatcgggtcacacgggcagtgtctcagtttctggtgcctcttcatatgctgggtcctggtggtcagagcgcgataagctgcggttgcacaccccgcactggaagggcttggcgcctgtgtgcttccggtagtggcgggtcagctcatccgatcgcgcgaacctccagtcgcagccttcagataaaatg

SEQ ID NO: 644701 - DNA, 210 bp, Homo sapiens
tcggaaacggtcccgttgccgaccgtctgagttaggtgagggtatacaccgaatccagacttgaccgccctcccaccagaacctctccccagtcggaggttgttcccgggagggatgagggaccccacgacacaacgacccgggaccgagccccttctacccgtgagacgacgcgaaaccctacgacaacttccgtcccggtaactaggt

SEQ ID NO: 644702 - DNA, 654 bp, Homo sapiens
  misc_feature (654)..(654): n is a, c, g, or t
aggtcccaccccaagggccgagctgtttttttgccccggggaaaaggccttttaattgcgggcaacccctgcgaaggggttttgccatttaccgggacacgggtttcatttaacccaaaaattacatttccttttaaagggggaagcccggtttccaaagggggcccccttttacaaaaatgtggcccccctcccatttgctatggggccggcttcctccgggggccggaaaggccggtgttacaattaaggcagtccctaactttatcaatttaggggacaaaaaataacgtgtagggcggtccatggtcaaggcccctaaaagcttgatgcctgggttaaaacccagatgtttgggaaaatattcaaaatttgagtggtcgaaccggcaaagttttattgagaaccggggacctaggttcattgtttgtaaattgtgcaatcctcccacatcttgctattcctgtcaaaccatgtgttcaaaagggagactggtatttccccgttgctcatggaacttgaaacaatggccatcctcttagtcaaatgctcacctttctttggaataactatcaatcttgtcgtcagtttcatctttccagatctgacttacccagtgctatacgctcacaaacttgtgtgttgagttgtggn

SEQ ID NO: 644703 - DNA, 520 bp, Homo sapiens
  misc_feature (5)..(5): n is a, c, g, or t
  misc_feature (237)..(237): n is a, c, g, or t
  misc_feature (243)..(243): n is a, c, g, or t
  misc_feature (267)..(267): n is a, c, g, or t
  misc_feature (443)..(443): n is a, c, g, or t
aaatnaacagggaacaacagcacaaaggcagtaataaattgttatttttgtttcttcctctaatgacacggaaaggcagggagaaagaccttttgaaggtggccccgaagcccatgggagtaaattttccggtggactgggggctctgctgagggaggccaggccacaaggggacaacgctggcaccaggcccagttacctctgtcccactggtaagtagtttggttggtggccgcnagaaanaggacaaacaacaggaagccaccnaggaggaagctcagaaccacgaaaaagcccagcatgaagaaaatccgtggaaaagtaaggaacaggtactgaataagaaagaacgtttccataaaagggaggtgttcaaggccatcgatgtaagtttcctggtataaatctgaaaacaccaccaagtggaccagaaaagtggtgcncacaatggcgagggtggcagcggaggccgtgaaggtcaagaggtagatgaggaagtccctaaggtcccaggccccga

SEQ ID NO: 644704 - DNA, 152 bp, Homo sapiens
acagattacatgcagtcctgacccagattagccgacgtcagacacatatggctacagatttctttaaatctgattataggctgaggctttccatgagtccacataaggaatggatgggcaaacattcaggctcactgtcgggctagtcgggg

SEQ ID NO: 644705 - DNA, 116 bp, Homo sapiens
acccatccttccttctctacgccctgtaaaatccgccgaaaatcctccatgcctcactggagcataggaacaaccacagataggtgagcggctgctcaatatttttttgataattt

SEQ ID NO: 644706 - DNA, 148 bp, Homo sapiens
agaatacccatcgcaggacatgcacagcagcagacacatgacccgcggacggggcatggggatgggacaggcagggagccacactgcaccccatcagtgatgtgcctgatggttctagtcctgagtcctgcccactatggagcccagt

SEQ ID NO: 644707 - DNA, 710 bp, Homo sapiens
  misc_feature (48)..(48): n is a, c, g, or t
  misc_feature (67)..(67): n is a, c, g, or t
  misc_feature (523)..(524): n is a, c, g, or t
  misc_feature (537)..(537): n is a, c, g, or t
  misc_feature (548)..(548): n is a, c, g, or t
  misc_feature (555)..(555): n is a, c, g, or t
  misc_feature (572)..(572): n is a, c, g, or t
gtagacctagtggatcctttgggctgcaggaattcggcacgagaaaanttgtatatatatatatacnctaaaagtggtatatatatatatacactaaaagtggtatatatatatatatacactaaaagtggtatatatatatatatatatacactaaaagtggtatatatatatacactaaaagtggtatatgtatatatatacactaaaagtggtatatgtatatatatacactaaaagtggtatatgtatatatatatacacactaaaagtggtatatgtatatatatatatatacacactaaaagtggtatatatatatacacactaaaagtggtatatatatatatacactaaaagtggtatatatatatatatatacacacactaaaagtggtatatatatatatatacacacactaaaagtggtatacatatatatatgcactaaaagtggtatatatatatacactaaaagtggtgtatatatatatatacacacacacatatatactaaaagtgnnatatatatatatnctaaaagtggnatatatntatatactaaaagtggnatatctttacctatacttccattcctgggggttatatctcacgctctctttcgacacccggtgtcccatatcaacgctcaccatcattaagcctagctcgatctcgcgttacctccgcttcgtgccgctcacgatcct

SEQ ID NO: 644708 - DNA, 367 bp, Homo sapiens
ccctgggcccggatttcctttcacagtgtttgctaggacgtcaattaaggctggagctgctgtagtcagaaaatgatagaggccggccgcggtggctcactcacacctgtaatccctgcactttgggaggccgaggcaggtagatcacctgaggtcaggagttcaagaccagcctagccaacatagtgaaactctgtctctactaaaaaatacaaaaattagctgggcgtggtggcgggcgcctgtaatcccagatactcgggaggctaaggcaggagaatcacttgaacccgggaggtgaaggttgcagagagccaagatcacaccactgcactccagcctgggtgaccgagcgagactccgtctc

SEQ ID NO: 644709 - DNA, 728 bp, Homo sapiens
  misc_feature (48)..(48): n is a, c, g, or t
  misc_feature (67)..(67): n is a, c, g, or t
  misc_feature (523)..(524): n is a, c, g, or t
  misc_feature (537)..(537): n is a, c, g, or t
  misc_feature (548)..(548): n is a, c, g, or t
  misc_feature (555)..(555): n is a, c, g, or t
  misc_feature (572)..(572): n is a, c, g, or t
gtagacctagtggatcctttgggctgcaggaattcggcacgagaaaanttgtatatatatatatacnctaaaagtggtatatatatatatacactaaaagtggtatatatatatatatacactaaaagtggtatatatatatatatatatacactaaaagtggtatatatatatacactaaaagtggtatatgtatatatatacactaaaagtggtatatgtatatatatacactaaaagtggtatatgtatatatatatacacactaaaagtggtatatgtatatatatatatatacacactaaaagtggtatatatatatacacactaaaagtggtatatatatatatacactaaaagtggtatatatatatatatatacacacactaaaagtggtatatatatatatatacacacactaaaagtggtatacatatatatatgcactaaaagtggtatatatatatacactaaaagtggtgtatatatatatatacacacacacatatatactaaaagtgnnatatatatatatnctaaaagtggnatatatntatatactaaaagtggnatatatatatatatatatatatactaaaaggggatatatatatatatatatatacaacagggggatatatatatatatgtatgtatgtgtgtgtatatatactagggtgtatttgtgggggtggaacatattatacacaccctcttgtgggggggt

SEQ ID NO: 644710 - DNA, 423 bp, Homo sapiens
agagagagagagagagagagagagagagagagagagagagagagagagagtgagagagagagagagagagagcgagagagagagagagacagcgagctacacacagagagcgaccctgactgctgcgccacgcaggaacctgccagagctgcctgcttctcgcgacacacatttcactgcccacacctcccccccttgctgcttccatccgttcatctgatgacctccgctcttcattaccctgaagctacttttctttgctaatacttctatcactgctccaacagacagccttacttctattccccgccgctccttccctttgctcgctttatagcctgcttttacacactcgccgcctccttctcctaacgccttcctgcctgttccccctctcgatcatcttccctattactcttcccg

SEQ ID NO: 644711 - DNA, 208 bp, Homo sapiens
cgcttggaggatgagagatatgtagaggacagacagccccaataataccacccaaagagccacgcaacgagccacgccaagagcctcaccaggagccacgcaaggagccactccacgggccacacaaagagccgtatggttgcaaagctgaaacttaaaggaattgacggaaggacaccacgggccacgcaacgagccacccaaagcg

SEQ ID NO: 644712 - DNA, 622 bp, Homo sapiens
  misc_feature (530)..(530): n is a, c, g, or t
cccacccagaagacaaaggatagcctggaccggtcgcagagtgagttgcacaatgactgtctgatctctaaggagagcgcctgcctcatgcaggacaggatctgtagctgtgagatcaatgtgagcgacgccattatgacctttggcttagagcccaaagacctcatgtctgtactgaacgacaactacggggataagactgaggtgatcagcagtctgcgaaatgccaactctgaagatcatgaaagtggaactgagactaacacctatgctgtcttaaacagcgtctatctcatgacgaacagccatacgcgactcctatacatgtaaacgatgggctggcaggaaatccgacatgccatcagccgtctgacagatggtgacaatatgggtggctctaccaagacagctgctgaccatatgagagagatgctgaacattaaccagcctagccatgactatctggacatctatgccatcgacgtgaacatgctggatgtggactgagcagaactgtatgcgctaggcancaagactgatgagtagagacttgcattgattgtgtagtacacaaggctttggaccaagtcttgtcacatatgctcgatgtcccgcttacagc

SEQ ID NO: 644713 - DNA, 527 bp, Homo sapiens
  misc_feature (54)..(54): n is a, c, g, or t
  misc_feature (56)..(56): n is a, c, g, or t
  misc_feature (275)..(275): n is a, c, g, or t
tcacccggggagatgcacagagaaaaaagcattccggtgggcgctttccctatnanactcaaacttagcccctcggggcctggttgggtggcatggccaacgaaggcaaaaacccaacggctcccagtttttcatccgccagtcaaaccaccctggctaaatggcaagcatgtggtgtttgccaaaattctaaagggcatggaggtggggcggaaggtggaaagccccaaaacaaccacccgggataaaccccttaaggatgtgttcctcccaanttggggcaaaattgaggtggaaaagccctttcccctccccaaggagtaggggacagggacatctttttttaagggcccgtttgggcaggccctgtagtcccccccagggtttttaattgccctggccccggggttggcatttgggggaggggaccccccccccccccattccccggggccaggggctcccttttggaacaaaccccccccccccctgcccaaaaaaaaaaaagggggggtttttttttttta

SEQ ID NO: 644714 - DNA, 744 bp, Homo sapiens
  misc_feature (693)..(693): n is a, c, g, or t
  misc_feature (695)..(695): n is a, c, g, or t
aattcggccgcgtcgagaagacgacagaagggggcagagcatggcggcgggcgagcttgagggtggcaaacccctgagcgggctgctgaatgcgctggcccaggacactttccacgggtaccccggcatcacagaggagctgctacggagccagctatatccagaggtgccacccgaggagttccgcccctttctggcaaagatgagggggattcttaagtctattgcgtctgcagacatggatttcaaccagctggaggcattcttgactgctcaaaccaaaaagcaaggtgggatcacatctgaccaagctgctgtcatttccaaattctggaagagccacaagacaaaaatccgtgagagcctcatgaaccagagccgctggaatagcgggcttcggggcctgagctggagagttgatggcaagtctcagtcaaggcactcagctcaaatacacacacctgttgccattatagagctggaattaggcaaatatggacaggaatctgaatttctgtgtttggaatttgatgaggtcaaagtcaaccaaattctgaagacgctgtcagaggtagaagaaagtatcagcacactgatcagccagcctaactgaagatgatttttgatggttttggtttttttcaccccggtttccctttcccccccccttccccttttacaaccttttttttntnccccgcattggtattaaatcctcgcattcagtcaaaaaaacaaaaaaaa

SEQ ID NO: 644715 - DNA, 855 bp, Homo sapiens
aattcggccgcgtcgagaagacgacagaagggggcagagcatggcggcgggcgagcttgagggtggcaaacccctgagcgggctgctgaatgcgctggcccaggacactttccacgggtaccccggcatcacagaggagctgctacggagccagctatatccagaggtgccacccgaggagttccgcccctttctggcaaagatgagggggattcttaagtctattgcgtctgcagacatggatttcaaccagctggaggcattcttgactgctcaaaccaaaaagcaaggtgggatcacatctgaccaagctgctgtcatttccaaattctggaagagccacaagacaaaaatccgtgagagcctcatgaaccagagccgctggaatagcgggcttcggggcctgagctggagagttgatggcaagtctcagtcaaggcactcagctcaaatacacacacctgttgccattatagagctggaattaggcaaatatggacaggaatctgaatttctgtgtttggaatttgatgaggtcaaagtcaaccaaattctgaagacgctgtcagaggtagaagaaagtatcagcacactgatcagccagcctaactgaagatgatgtatgaaggagtggagtgttgacaacaaggggtccatgatccctccccactgaccttttctaaaaaaattctggggcccgcattgggataaatcctcgaattaaggcttccctgctctacttgctcagattctttttttctagcttcatttaggcttacattgggtcaggcagagggtctcacccttcgggtgcatggtgatagggggccttgggcataacctttttgtggtatt

SEQ ID NO: 644716 - DNA, 220 bp, Homo sapiens
ggctcaacactgactgaaacatcaactcatctgaattttcagaccaccagcttgccctacagattttggactggctggcccccacaactgaataagccaattccctaaaatctcctctctctctcctctccctctcgactagtacacatgtgtatatgtaacatctggattcagagaaagtgactatagccaggaggaagtagaatcatggacgaggaga

SEQ ID NO: 644717 - DNA, 801 bp, Homo sapiens
aattcggccgcgtcgagaagacgacagaagggggcagagcatggcggcgggcgagcttgagggtggcaaacccctgagcgggctgctgaatgcgctggcccaggacactttccacgggtaccccggcatcacagaggagctgctacggagccagctatatccagaggtgccacccgaggagttccgcccctttctggcaaagatgagggggattcttaagtctattgcgtctgcagacatggatttcaaccagctggaggcattcttgactgctcaaaccaaaaagcaaggtgggatcacatctgaccaagctgctgtcatttccaaattctggaagagccacaagacactgagctggagagttgatggcaagtctcagtcaaggcactcagctcaaatacacacacctgttgccattatagagctggaattaggcaaatatggacaggaatctgaatttctgtgtttggaatttgatgaggtcaaagtcaaccaaattctgaagacgctgtcagaggtagaagaaagtatcagcacactgatcagccagcctaactgaagatgatgtatgaaggagtggagtgttgacaacaaggggtccatgatccctccccactgaccttttctaaaaaaattctggggcccgcattgggataaatcctcgaattaaggcttccctgctctacttgctcagattctttttttctagcttcatttaggcttacattgggtcaggcagagggtctcacccttcgggtgcatggtgatagggggccttgggcataacctttttgtggtatt

SEQ ID NO: 644718 - DNA, 309 bp, Homo sapiens
acactccttccgaatttccaaagtgctctgactatagctggagagtttgcatcgaggagaaatagtaataaaatagtatggggtggtttgcgggaagaagtacagatttacacatgggggtggtcagaaactgacatgagttaaatttaacattttggacgtctttcctactggatcagtagaaaaccactgcacaaacggtttaggatgagttatcctagaaaagggaaattctgactaaaagagaaaacacacggtagcagggtttttggcacttgtgagtaattcattaaagatcgaactttgaat

SEQ ID NO: 644719 - DNA, 884 bp, Homo sapiens
  misc_feature (833)..(833): n is a, c, g, or t
  misc_feature (835)..(835): n is a, c, g, or t
aattcggccgcgtcgagaagacgacagaagggggcagagcatggcggcgggcgagcttgagggtggcaaacccctgagcgggctgctgaatgcgctggcccaggacactttccacgggtaccccggcatcacagaggagctgctacggagccagctatatccagaggtgccacccgaggagttccgcccctttctggcaaagatgagggggattcttaagagacagaatctccccatatcgtccagggtggtctcaaattcctgggcttaagcaaccctctctctttagcctcccaattgctgggattacagcagctattctgggcctggaaacttgacttgggttaaaggagtggctggtctattgcgtctgcagacatggatttcaaccagctggaggcattcttgactgctcaaaccaaaaagcaaggtgggatcacatctgaccaagctgctgtcatttccaaattctggaagagccacaagacaaaaatccgtgagagcctcatgaaccagagccgctggaatagcgggcttcggggcctgagctggagagttgatggcaagtctcagtcaaggcactcagctcaaatacacacacctgttgccattatagagctggaattaggcaaatatggacaggaatctgaatttctgtgtttggaatttgatgaggtcaaagtcaaccaaattctgaagacgctgtcagaggtagaagaaagtatcagcacactgatcagccagcctaactgaagatgatttttgatggttttggtttttttcaccccggtttccctttcccccccccttccccttttacaaccttttttttntnccccgcattggtattaaatcctcgcattcagtcaaaaaaacaaaaaaaa

SEQ ID NO: 644720 - DNA, 123 bp, Homo sapiens
cgcacacagtgcttctgtatttcactctttctccctattagggagttatgcaaaatgtgtccccgattttacctttgtctttctgtgtactttacaaagagtcccaagaggtaaaactcccag

SEQ ID NO: 644721 - DNA, 335 bp, Homo sapiens
ctcctcaatggtctatcattatcatgtactataagttacttcctaaataagattacagtcctttattataaggcccctacgggtactatagtatacatttaaaaaacgctactagaaaaattttcttttctttgggtttgggcttatggtgtacttagctatagataattttggaatacaaagcctagggtacatataaatgcaatagttaactgatcctgttggctgatgtcctttgtatgtgccacaggtgacatcttttaatccagcatcttctcctgtttctagccttcctttttcttcttcttagattctgcttgaggatggtccgcaca

SEQ ID NO: 644722 - DNA, 204 bp, Homo sapiens
catcagtgaactttcgatgcctgaaagataaaggcagaagtcataagcatacttgagtttgttaccatagaaaaaagaaagaaaaaaacaaaagaaaataaaataaagtcacaagcaaaaagcctgcaaggtagtccatttatttttatttttattttttatttttgagatggggtttcactcttgttgcccaggctggagtgc

SEQ ID NO: 644723 - DNA, 110 bp, Homo sapiens
gagtctagtcgacttctgctctcatctggggtcatgtcaggttcgggggctgcagcagccaaagcgcatgagaggtgtttcctttggcttccaagaatgccactgtggag

SEQ ID NO: 644724 - DNA, 797 bp, Homo sapiens
  misc_feature (62)..(63): n is a, c, g, or t
  misc_feature (68)..(68): n is a, c, g, or t
  misc_feature (104)..(104): n is a, c, g, or t
  misc_feature (116)..(116): n is a, c, g, or t
  misc_feature (121)..(121): n is a, c, g, or t
  misc_feature (138)..(138): n is a, c, g, or t
  misc_feature (166)..(167): n is a, c, g, or t
  misc_feature (206)..(206): n is a, c, g, or t
  misc_feature (210)..(210): n is a, c, g, or t
  misc_feature (231)..(231): n is a, c, g, or t
  misc_feature (248)..(248): n is a, c, g, or t
  misc_feature (256)..(256): n is a, c, g, or t
  misc_feature (260)..(260): n is a, c, g, or t
  misc_feature (308)..(308): n is a, c, g, or t
  misc_feature (331)..(331): n is a, c, g, or t
  misc_feature (333)..(333): n is a, c, g, or t
  misc_feature (336)..(336): n is a, c, g, or t
  misc_feature (338)..(340): n is a, c, g, or t
  misc_feature (362)..(362): n is a, c, g, or t
  misc_feature (364)..(364): n is a, c, g, or t
  misc_feature (387)..(387): n is a, c, g, or t
  misc_feature (412)..(412): n is a, c, g, or t
  misc_feature (429)..(429): n is a, c, g, or t
  misc_feature (454)..(454): n is a, c, g, or t
  misc_feature (479)..(479): n is a, c, g, or t
  misc_feature (485)..(485): n is a, c, g, or t
  misc_feature (495)..(495): n is a, c, g, or t
  misc_feature (515)..(516): n is a, c, g, or t
  misc_feature (519)..(520): n is a, c, g, or t
  misc_feature (549)..(549): n is a, c, g, or t
  misc_feature (561)..(561): n is a, c, g, or t
  misc_feature (569)..(569): n is a, c, g, or t
  misc_feature (599)..(600): n is a, c, g, or t
  misc_feature (602)..(602): n is a, c, g, or t
  misc_feature (608)..(608): n is a, c, g, or t
  misc_feature (611)..(613): n is a, c, g, or t
  misc_feature (615)..(615): n is a, c, g, or t
  misc_feature (617)..(617): n is a, c, g, or t
  misc_feature (621)..(624): n is a, c, g, or t
  misc_feature (627)..(628): n is a, c, g, or t
  misc_feature (632)..(633): n is a, c, g, or t
  misc_feature (635)..(635): n is a, c, g, or t
  misc_feature (637)..(638): n is a, c, g, or t
  misc_feature (642)..(642): n is a, c, g, or t
  misc_feature (653)..(653): n is a, c, g, or t
  misc_feature (659)..(659): n is a, c, g, or t
  misc_feature (661)..(661): n is a, c, g, or t
  misc_feature (663)..(665): n is a, c, g, or t
  misc_feature (668)..(668): n is a, c, g, or t
  misc_feature (682)..(682): n is a, c, g, or t
  misc_feature (691)..(691): n is a, c, g, or t
  misc_feature (695)..(695): n is a, c, g, or t
  misc_feature (707)..(707): n is a, c, g, or t
  misc_feature (723)..(723): n is a, c, g, or t
  misc_feature (727)..(727): n is a, c, g, or t
  misc_feature (731)..(731): n is a, c, g, or t
  misc_feature (737)..(737): n is a, c, g, or t
  misc_feature (753)..(753): n is a, c, g, or t
gggagatgctttcatcgtctctccttccctcaagtgttctggaacctatcatttaaattaanngagtnaggcaggagggggcggggaatccttccgcccttctnaggaggggctgnattgnagggggaaagtaaactnaaaaaataaataaatgaaaagggaaaannagtaaaaaaaaaaaaaagtaaaaaaaaaaaaaaatttgnattnaaaaagaaaggagaagaaaanggaaataaagaagaaanaaaaaaanattnaaaaaaagaaaaaaattaaatgaaaaaaggaaaaaataaaggaaaatntaaaaaaaaaaaaaagtaaattnanttnannnaggataaaaataaaaaaaatgnanaagaaggaaaaggaaagaataanaatgaaaaaaaaaaaaaaaaaaaangaaaaaaaaaaaagtanaggaaaaaaaaaaggaaaaaaaaanaaaaaaaaaaaagaaaaaaaaaaanaagganatggaataantgaataaaaaaaattaaaannaannaaaaaaaaaattgaaaaaataaaaaaatnaaaaatgaaaangaaaaaangaaaaaaattaaataaaaaaaaaaaaaaanntnattgtnttnnntntnaagnnnnttnntttnnantnntttnccattttaatnttgttntntnnntantgtgttggtggtgntgatgaatntgcnagagttgagttntatgtatttatttatntatntgtntactcnatttctctcaaaagcnctcaagtcacaaagtaaatggttcaagcaatggagtatgggtca

SEQ ID NO: 644725 - DNA, 231 bp, Homo sapiens
  misc_feature (16)..(16): n is a, c, g, or t
  misc_feature (40)..(40): n is a, c, g, or t
  misc_feature (161)..(161): n is a, c, g, or t
  misc_feature (187)..(187): n is a, c, g, or t
gagtggccccacctgngcgtccgatgctgccgtcacctgntcctccgcctactgtccctctcagtgccttctctcagctcccaggccaacagtagccaaacccctagagacagtgatgcctgcccgcaccctggcctggtccctggtccttcactggcgcnttctcggagctggcccagggcgtganaagcatggacagtgtgggcgctctccctaacttgcctccttttt

SEQ ID NO: 644726 - DNA, 314 bp, Homo sapiens
  misc_feature (257)..(257): n is a, c, g, or t
  misc_feature (260)..(260): n is a, c, g, or t
  misc_feature (287)..(287): n is a, c, g, or t
gcagattccatatcacggctattttgaatgatgcttcaatatccctgggtgcagatgtctctttgacatactaatttcattttttttgattacgtacccagtagtgggattgctgggtaatataatagttctcttttttattttttgtggaaactccatactgcttttcataacagctatactattttaaattcccaccaacagtgtataacattcctctttctccacattatcgtttccatttgttatatttttgnctncttgataaatatccatcaatttaaacntggggtaagggaatagctcattgcggg

SEQ ID NO: 644727 - DNA, 377 bp, Homo sapiens
gtgatgttatcgccaacactacttctttattctgaagcactgtaaagtatatttagattaataatttccaaaccaagaaaatgaaagcctatattaattataagacccaaacagaaaaaatctgtaaaacgatcaagaccataaaattcacataccttctatttggtcaatgcagagacacagatctttgttccggagtatgaatttaaatgcaaagcttcagagcctgaaaatgtctaaaattagacccatgactgacaactgggctaggctcaatgtctttggaatgtgctctactaaatttggtaccatttggactgggttccctccaaaattcaggtgttgggggataacatcaggggaccgcgctcgaaatt

SEQ ID NO: 644728 - DNA, 298 bp, Homo sapiens
cctttttaatgcgctagaatatgtggctatttattgatgaattatttttaatctcagagttgtcgattgtacctttaagaaaaacatattttcctacaataaagcccctaattttatttgctaaaatcagagttctagttcagattttgttttgtgttcttactctggaggcccaaatggagtaaccccagtatgtttatgttggagaggagttttgtgttgcctttcaaacttgaatccaatagaactacagacttaaacaataaatatgaatgggagataaggaaaatcaaagcca

SEQ ID NO: 644729 - DNA, 1081 bp, Homo sapiens
  misc_feature (424)..(424): n is a, c, g, or t
  misc_feature (436)..(436): n is a, c, g, or t
  misc_feature (463)..(463): n is a, c, g, or t
ataacaacatcatcttatatcatgactactgactaaaatccttagtagctgggactacaggcacatgctacaatgtctggctaattttttaattcgtttgtagagatgggggtctccccatgttgccgaggctggtctcaaactccaggcctcaaaagatcctcccaccttggcctcccaaagggctgggattacagggatgagccactatgcccagcccataattttttttgttatgaaacataggatctcattacagcagattggaaagtagattaattcattcctaatcccagtgcttattcaataataacaaatatttattgcatgcttaactgtgctaggagctagagctgtggaggtggacaattactgtgagtagtctagttgatttcctccatttgtaaaacgaggcatcactttntgtccatgtttntgtgttttatagttacagtaaacaatntgatgtcctacttttttttttttttttttggagacgggagtctcgctctggtcgcccaggccgggactggcgggacggcgaggggccggcaatctcggctcatggcaagcctccggtttcccggggttcacggccattctccggcctcagcctcccgagtagctggggactacgggcgcccgccaccggcgcccgggctaattttttttgggtattttttaagtaagagacgggggtttcacctggttagccaggagggtctcgatctcctgacctcatgatccacccggcctccggcctcccaaaggtgcggggattacgggcgtgagccaccgggccggcgccgaggtcctacttttaaattaaatcattagctcttccccagtttggttaacttcacaaaggtttttcacggtcaattatatgctagagtaaccgttaaaataaactattattttttaatgttggcaaaaaaaaaaaaaaaaactccggcgctttattggcgggggggaaaaaaggggtttggaatgggcatgggtcataggcggtttctgaaccagtttttgtccaaggggaattgcggggccccaaggggggataatcaaacagttgagaacg

SEQ ID NO: 644730 - DNA, 889 bp, Homo sapiens
agcggaggtgcagcccaacatccggactccgtagaccagcggatctcgtgcaaagcctctttctcgaccacccaccctaccacttcttgctaaccatggcggtagttggctggtggtctcgagtctgaactgttcatcatcggcgtggtactattcgttccgcgtgctgctgcaggtgtcaaggtactccctgcagaatcctgtcatacacaggtgtcgcaggaacggggcaggcaggtgtatgaggggaagcagcatggcaacgactgatgtccactccaagcttgagtgcaccccatgcatccactagctccatggggtcgtgcccgttcattcatacacggtcgctccgtgtcgccgatcttcgtgcccacggaaaccaggcgaagcctaggtgtactggcagtcaggtaagtgctggtggtccccgtgttgtttccctcggccagtaggagtcacttgtgtcccggatcaatgaaggggccatgttaaacctccagggagaagcagtgacccgaccaaagtcaccgaaatgaattaccaagtagtcccatatcggtaagccgcgtatatgctaccaggggtccgctactatatagcggggacaagggatacggataagcagtgcaagcggttgagaattacgagggaagtcatgacacccgccattgcatcactcctgggggccattagagacagcgctgcaacattcttggaattctcgaggaacagataagttcggggcaaccaggattactctaatcctccacgtcccctcatgtaaagtccttgtggatcgctggccgttgattaggccccgaaccaagtgggaagaactctaatattcatccgaaactccagtgcgagtcacagaaactggaaccattcc

SEQ ID NO: 644731 - DNA, 158 bp, Homo sapiens
cccgtagtgagaggtgaggagtgtctctgcctggtcgcccatcgtctgggatgtgaggagccctctgcccggcgcccagtctggtaagtgaggagcgtctccgcccgggcgccatcccatctaggaagtgaggagcgcctcttcccagccgccatcta

SEQ ID NO: 644732 - DNA, 349 bp, Homo sapiens
actttgtagttcatttagacgactagagtaaatattaagggccttttcccagggattatgggctttttaaaggcagtcgctctttaaattcacagggcgggctgtgtgtgtgtgtgtgtgcgcatgcgcgcgtgtctgtgtctgtgcgtgcgtgtgtgtgtgtgcgcatgcgcgcgtgtctgtgtcagcgtgtgtgtgtgcgagcgtagtgtagtgtgtcagtctgagtgtgagagtcagagtgtgtgtagtgaccgagcgtgagtgagagactgagagagagagtacagagcgtgagcgtgtgtgtccgactgacataaagcccacgaacagcgagtgacaaagaaaa

SEQ ID NO: 644733 - DNA, 703 bp, Homo sapiens
accccgatccgaagacattgaggctgtgttttgaagcatgccattgataggttgaacataacatttttcttagaataaaagcacattccatacactctactatggcagaataaggaggttcacagataattgagagaagccaccgaaacgtgctgttttctgaaggtctccctacgcgtgttgtagtaaatgtgtgtctctctgtgactgacagtatgctggcggtcagggccccaagctcagccttgcgtttgagtgtatctttagatggaaaaggcgttggtgtggtgtggattgtagcttcccgaaactcatggcgcctcccctcggacgtcggtgtcgtggcgcctccccgcggatgtcggtcttgggtgttttgggggagaaaacaagccccatccttcccgcggggtttctgggcttcacgcctgccttgccctctcagacaaaggccaggacttgtgcggcccacactagtgtatcgccctgtattagagtaaaacatgtttatcaaagaacattggaaaatcagacacaaagaagaaaataaaaatcacctacaagctgccacaccaaaaaaaaaaacacacttccagaaatttcccctccgcatacttatagtcagattgcatgaattgtttgcataatcatatttacttaaaataagtatagccttcccttaagtataaattgtccctccaca

SEQ ID NO: 644734 - DNA, 6051 bp, Homo sapiens
  misc_feature (3052)..(3052): n is a, c, g, or t
  misc_feature (3054)..(3054): n is a, c, g, or t
  misc_feature (3282)..(3282): n is a, c, g, or t
  misc_feature (4304)..(4304): n is a, c, g, or t
  misc_feature (5274)..(5274): n is a, c, g, or t
  misc_feature (5277)..(5277): n is a, c, g, or t
  misc_feature (5902)..(5902): n is a, c, g, or t
  misc_feature (5962)..(5962): n is a, c, g, or t
ggcggcggcggcggcggttaacggcgcttcccgtgcggctgaggacgatccgccagtgagcgcggagactgcttccacttcgggcgggggagccccggaccgaatcggctctctaggccgtggagcttgccgtcccacctccgtccaaatcgacctttcctttctatccccaaccacccctcaacccctgttttcccctgccttccttgcagaggccatggaggacgaggagagacagaagaagctggaggccggcaaagccaagattgaagaactctctttagcttttcttgtcagacagcttgcccagtttcgacaaagaaaagctcagtcggatgggcagagtccttccaagaagcagaaaaaaaagagaaaaacgtcaagcagtaaacatgatgtgtcagcacaccatgatttgaatattgatcaatcacagtgtaatgaaatgtacataaatagttctcagagagtagaatcaactgtgattcctgaatctacaataatgagaactctacatagtggagaaataaccagtcatgagcagggcttctctgtggaactggaaagtgaaatttcaaccacagcagatgactgcagttcagaggtaaatggttgcagttttgtgatgagaacaggaaagcctacaaatttattaagggaagaagaatttggtgttgatgattcttattctgaacaaggagcacaagacagtccgactcatctagagatgatggaaagtgagttggctgggaagcagcatgagattgaagagctaaacagagagctggaagaaatgagggttacctatgggactgaaggactgcagcagttacaagaatttgaagctgccattaaacaaagagatggcattataacccagctcactgctaatttacaacaagcaagaagagaaaaggatgagacaatgagagaatttttagagttgacagaacagagtcaaaaattacagattcaatttcagcaattacaggctagtgaaactctgagaaacagcactcatagtagcacagctgcagacttactacaagccaaacaacagatcctcactcatcaacagcagcttgaagaacaagaccacttattagaagattatcagaaaaagaaagaagacttcacaatgcaaattagtttcttgcaagagaaaattaaagtatatgaaatggaacaagataaaaaagtagaaaactcaaataaagaagaaatacaggaaaaggagacaatcattgaagaattaaacacaaaaataatagaagaagaaaagaaaactcttgagctaaaggataaattaacaactgctgataaattactaggagaattacaagaacagattgtgcaaaagaaccaagaaataaaaaacatgaaattagagctgactaattctaagcaaaaagaaagacagtcttctgaagaaataaaacagttaatggggacagtcgaagaacttcagaagagaaatcataaagacagccagttcgaaactgatatagtacaacgaatggaacaagaaacacaaagaaagttagaacaactccgggcagagctggatgagatgtatgggcagcagatagtgcaaatgaaacaagaattaataagacaacacatggcacagatggaggaaatgaaaacacggcataagggagaaatggagaatgctttaaggtcatattcaaatattacagttaatgaagatcagataaagttaatgaatgtggcaataaatgaactgaatataaaattgcaagatactaactctcaaaaggaaaaactcaaggaagaactaggactaattttagaagaaaagtgtgctctacagagacagcttgaagaccttgttgaagaattgagcttttcaagggaacagattcagagagctagacagacaatagctgaacaagaaagtaaacttaatgaagcacataagtcccttagtacagtggaagatttgaaagctgagattgtttctgcatctgaatccagaaaggaactagaattaaaacatgaagcagaagttacaaattacaagataaaacttgaaatgttagaaaaagaaaagaatgctgtgttagacagaatggctgaatcacaagaagctgaattagagaggctgagaacacagcttctatttagtcacgaagaagagctttccaaactgaaggaagatttagaaattgaacatcgaataaatattgaaaaacttaaagataatttaggcattcactataaacagcagatagatggtttacagaatgaaatgagtcaaaagatagaaaccatgcagtttgaaaaggacaatttgataactaagcagaatcaattaattttggaaatttcaaagctaaaagatttacagcagtctcttgtaaattcaaagtcagaagaaatgactcttcaaatcaatgaacttcaaaaagaaattgaaatactcagacaagaagaaaaagaaaagggtacacttgaacaagaagttcaagaattacaacttaaaacagaattgttagaaaaacagatgaaggaaaaagagaatgatcttcaagaaaaatttgcacaacttgaagcagagaatagcattcttaaagatgaaaagaaaacccttgaagacatgttgaaaatacatactcctgttagccaagaagaaagattgattttcttagactccattaagtccaaatccaaagactctgtgtgggaaaaagaaatagaaatacttatagaggaaaatgaggacctcaaacaacaatgtattcagctaaatgaagagattgaaaagcaaaggaacactttttcatttgctgaaaaaaactttgaagttaactatcaagagttacaagaggagtatgcttgccttctcaaagtaaaagatgatttagaagacagtaaaaataaacaggaattagagtataaaagtaaacttaaagcacttaatgaagagcttcatttgcaaagaataaatccaactacagtgaaaatgaaaagttctgtctttgatgaagacaaaacttttgtagcagaaacattggaaatgggtgaggtngntgaaaaggatacaacagaactcatggaaaaacttgaggtaaccaagcgagagaaattagagctgtcacagagactgtctgatctttctgaacaattgaaaccgaaacctggtgagattagttttctaaatgaagaagttaaatctttaaagccagagaaagaaccagtttcattgagatgtagagagctagaaatcattattaaccacaaccgggcagaaaatgtacngtcatgtgatactcaagtaagctctttattagatggagttgtgactatgaccagcaggggtgctgaaggatcagtttctaaagtaaataaaagttttggtgaagaatcaaaaataatggtggaagataaagtttcttttgaaaatatgactgttggagaagaaagtaagcaagaacagttgattttggatcacttaccatctgtaacaaaggaatcatcacttagagcaactcaaccaagtgaaaatgataaacttcagaaagaactcaatgtacttaaatcagaacagaatgatttaaggctacagatggaagcccaacgcatttgcctctctctggtttattcaactcatgtggatcaggttcgtgaatatatggaaaatgaaaaagataaagctctttgcagtcttaaagaagagcttatttttgctcaagaggaaaagatcaaggaacttcagaaaatacaccagttagaactacagactatgaaaacacaagaaacaggtgatgaaggaaagcctttacatctgctcattggaaaacttcaaaaggcagtgtctgaagaatgttcttattttttacagactttatgcagtgtccttggtgaatattatactcctgctttaaaatgtgaagtaaatgcagaagacaaagagaattctggtgattacatttctgaaaatgaagatccagaattacaagattatagatatgaagttcaagactttcaagaaaatatgcacactcttctcaacaaagtaacagaagaatacaacaaactcttggtacttcaaacacgactaagcaagatctggggacagcagacagatggtatgaaacttgaatttggagaagaaaaccttccaaaagaggaaacagagtttttatcaatccattctcagatgaccaatttggaagacattgatgtcaatcataaaagcaagttatcttctctgcaagatcttgaaaaaactaaacttgaagaacaagttcaagaattagaaagcctcatatcctctttgnagcaacagttgaaagaaactgaacaaaactatgaggcagagatccactgtttacagaagaggcttcaagctgttagtgagtccacggttccgccaagcttacctgttgattcggtggtaattacagaatctgatgcacagagaacaatgtaccctggaagttgtgtgaaaaagaatattgatggtacaatagagttttctggtgaatttggagtgaaagaggaaacaaatatcgttaagttgcttgaaaaacaataccaagaacaattagaagaagaagtagctaaggttattgtgtcaatgagtatagcatttgctcaacaaactgaactgtctagaatatctgggggaaaagaaaatactgcatcatcaaagcaagcacatgctgtgtgtcagcaagaacaacattattttaatgaaatgaaattatcacaggatcaaattggttttcagacttttgagacagtggatgtgaaatttaaagaagaatttaaaccacttagtaaagagttaggagaacatggaaaggaaattttattatcaaatagtgatccccatgatataccagaatcaaaggactgtgtgctgactatttcagaagaaatgttctccaaagataaaacatttatagttagacagtctattcatgatgagatttcagtgtcaagcatggatgcttctagacaactaatgttgaatgaagaacagttggaagatatgagacaggaacttgtacgacaataccaagaacatcaacaggcaacggaattgttaaggcaagcacatatgccgcaaatggagagacagcgagaagaccaggaactagctacaagaagagattaagagacttaatagacaattagcccaggtaagggtcttgtagtcccctttctctccccagttaatttttttttccaaacaccaacttgaaccagatccccaattaaaacaacagtattttttatgtagcnatnatttttttttttgccgaaatctgaataaactacatatatttagcatcaggaacacactctatactaagacagcagctttagatcttgttagggacacctatctcaaccttggagtgggcattgtctttctgtcattttatttaactcctttttcaagcactggaaaagtggctacacggttttgtttttttcttttaaatcattccattagccatatatagcaaactcactttgacattttggaaataacattgtgctgaggtgctccattatgcagttactatcattcagttttactatcttcatttatagttttgtgagtccaccaattagcatctcgaaggtttacctttatctgtctttaatccatctttttaatcatgaatggaaatcggaagtagtatgcttctgaaactctttccagggaaacatctcttcttgatttgagaaatgcaaatttatttaacattcttatccctttcttgactaaatttaaatacttcttggtatttgggagctggattcttgtcaactgctgtataaaatatactcacccaaccattgcagaaaagcaagaaatatttatgtagaagttcttatgaaaacttattgaatttaattttgnaaactgaagctaagagagataataaatatctagagataactattaacagtattctttcanacataaaataataagataattgggagctgagcataaaacattatttggaaaaattaactttgcttttcttcattgcattttgtgaattc

SEQ ID NO: 644735 - DNA, 1068 bp, Homo sapiens
tattgtgatggaaatatgtcattttgtgtatttataaaaagttgttcgcagctgggtgcagatggtgtgtgcctatagttccagctcctcggaagctggggcaggaggatcacttgagaccaggaatttgaggccacagtgccctagaatcatgcctctgaatagctgctacactccagacctgggcaacaaaccaagaccccatctttaaccaaaaaaaaaaaaaaaaaaccacaaaaaaactgtgtaagccgaccccgagaccatacaaaaaagaataaaacaaatacgtatagggaaaagaagacaaaaagaaagcaaagaacaacggacaaaaagaaggccacataaagacaaaccgggaccatacaaaattaggaacaagagaaattacaaacaaatcacaacaaagaccagaggggagaaaaaggaaatttcataaaaaaatataagagaagagaagaaaaaagcagcaaaaaaagggaaaaatatataacaccagagataccacaaaaaaataacaaataaaaacaaataaacaccccgaacacgatggagcaaaaaacgaaaaacaacaatacaaacaaaacagagaaaaagccgaagggagtgcacagaagaacgagagcacgagtgagaagagcaagatgagggaagaaagagataggatgaacgaagtagtaacaagagaataagagatgctacaacccaaaccacaccgcgagacaagaagcgcggagaggcgataacagaagcacaaggagagagaatcagacacactacataacctaatatgtcacatagtacgattaaaagaagccaaaggagaccaaaagtctcagccagacgaatagcgacggggaggatgggagaggaaggaggacatgcctagaaggactgaagaagcgggaggagctaggtgaggtcaagagagaagagcggcagacaagggacgaacaagggagtcagcaggagagcgaaggcgacagaaagagaagcagcaagacagaggggcgaaagaggcggggacagcagcggcagagccaggaggaagggggcagagaagaa

SEQ ID NO: 644736 - DNA, 758 bp, Homo sapiens
  misc_feature (37)..(37): n is a, c, g, or t
  misc_feature (73)..(73): n is a, c, g, or t
  misc_feature (81)..(82): n is a, c, g, or t
  misc_feature (95)..(95): n is a, c, g, or t
  misc_feature (98)..(98): n is a, c, g, or t
  misc_feature (150)..(150): n is a, c, g, or t
  misc_feature (167)..(167): n is a, c, g, or t
  misc_feature (180)..(180): n is a, c, g, or t
  misc_feature (188)..(188): n is a, c, g, or t
  misc_feature (244)..(244): n is a, c, g, or t
  misc_feature (255)..(255): n is a, c, g, or t
  misc_feature (257)..(257): n is a, c, g, or t
  misc_feature (267)..(267): n is a, c, g, or t
  misc_feature (269)..(269): n is a, c, g, or t
  misc_feature (284)..(284): n is a, c, g, or t
  misc_feature (301)..(301): n is a, c, g, or t
  misc_feature (308)..(308): n is a, c, g, or t
  misc_feature (319)..(319): n is a, c, g, or t
  misc_feature (328)..(328): n is a, c, g, or t
  misc_feature (332)..(332): n is a, c, g, or t
  misc_feature (355)..(355): n is a, c, g, or t
  misc_feature (377)..(377): n is a, c, g, or t
  misc_feature (386)..(386): n is a, c, g, or t
  misc_feature (394)..(394): n is a, c, g, or t
  misc_feature (455)..(455): n is a, c, g, or t
  misc_feature (479)..(479): n is a, c, g, or t
  misc_feature (490)..(490): n is a, c, g, or t
  misc_feature (601)..(601): n is a, c, g, or t
  misc_feature (756)..(756): n is a, c, g, or t
aaaaaacaaaaacaaatataaaaatatcaaaaaatanaaaatgctaacactgaggagagttgaaaagggttgnggtttttnnccaaagggacctnttnggacacaggatttaagacttgccaaaacctccaagggaacctaaggccttgngggccttttcaagatcntttgcttatggtngaatttgntttaacggggcccaaccctgggcccttaattattaaaccattttttttggcacttnttcaatcacgntnttttccaatncntcccgaagggcattnttgaaccggcggtaggntacaaanttcacaatttngcgggcatnatcntgcccaaaacttttattcagggntccaccatcatcttccagcttntccattgcntcaaattnagcaccacccacacccacaattattattgaaatgggcaggttcgaggcacgcaccaaagcntcacttttggtttccacatccttnacagcaccatnatttatcattaacagcattaattatttcaaagcatttcccttattttcatcctttgttgcaaacctttccactattgtttatgattggttcaaattttttagggtctatanattctaacttatttgtaatgcttggcggtaggcatccacaatgccctggatgcctgcacagtaggggttactggggttgaaattcaaggcaaattcatgcgagacctgccagtcagggggaacctgggccccaaatccaaatgcagggaacagcngg

SEQ ID NO: 644737 - DNA, 6015 bp, Homo sapiens
  misc_feature (3016)..(3016): n is a, c, g, or t
  misc_feature (3018)..(3018): n is a, c, g, or t
  misc_feature (3246)..(3246): n is a, c, g, or t
  misc_feature (4268)..(4268): n is a, c, g, or t
  misc_feature (5238)..(5238): n is a, c, g, or t
  misc_feature (5241)..(5241): n is a, c, g, or t
  misc_feature (5866)..(5866): n is a, c, g, or t
  misc_feature (5926)..(5926): n is a, c, g, or t
ggcggcggcggcggcggttaacggcgcttcccgtgcggctgaggacgatccgccagtgagcgcggagactgcttccacttcgggcgggggagccccggaccgaatcggctctctaggccgtggagcttgccgtcccacctccgtccaaatcgacctttcctttctatccccaaccacccctcaacccctgttttcccctgccttccttgcagaggccatggaggacgaggagagacagaagaagctggaggccggcaaagccaagcttgcccagtttcgacaaagaaaagctcagtcggatgggcagagtccttccaagaagcagaaaaaaaagagaaaaacgtcaagcagtaaacatgatgtgtcagcacaccatgatttgaatattgatcaatcacagtgtaatgaaatgtacataaatagttctcagagagtagaatcaactgtgattcctgaatctacaataatgagaactctacatagtggagaaataaccagtcatgagcagggcttctctgtggaactggaaagtgaaatttcaaccacagcagatgactgcagttcagaggtaaatggttgcagttttgtgatgagaacaggaaagcctacaaatttattaagggaagaagaatttggtgttgatgattcttattctgaacaaggagcacaagacagtccgactcatctagagatgatggaaagtgagttggctgggaagcagcatgagattgaagagctaaacagagagctggaagaaatgagggttacctatgggactgaaggactgcagcagttacaagaatttgaagctgccattaaacaaagagatggcattataacccagctcactgctaatttacaacaagcaagaagagaaaaggatgagacaatgagagaatttttagagttgacagaacagagtcaaaaattacagattcaatttcagcaattacaggctagtgaaactctgagaaacagcactcatagtagcacagctgcagacttactacaagccaaacaacagatcctcactcatcaacagcagcttgaagaacaagaccacttattagaagattatcagaaaaagaaagaagacttcacaatgcaaattagtttcttgcaagagaaaattaaagtatatgaaatggaacaagataaaaaagtagaaaactcaaataaagaagaaatacaggaaaaggagacaatcattgaagaattaaacacaaaaataatagaagaagaaaagaaaactcttgagctaaaggataaattaacaactgctgataaattactaggagaattacaagaacagattgtgcaaaagaaccaagaaataaaaaacatgaaattagagctgactaattctaagcaaaaagaaagacagtcttctgaagaaataaaacagttaatggggacagtcgaagaacttcagaagagaaatcataaagacagccagttcgaaactgatatagtacaacgaatggaacaagaaacacaaagaaagttagaacaactccgggcagagctggatgagatgtatgggcagcagatagtgcaaatgaaacaagaattaataagacaacacatggcacagatggaggaaatgaaaacacggcataagggagaaatggagaatgctttaaggtcatattcaaatattacagttaatgaagatcagataaagttaatgaatgtggcaataaatgaactgaatataaaattgcaagatactaactctcaaaaggaaaaactcaaggaagaactaggactaattttagaagaaaagtgtgctctacagagacagcttgaagaccttgttgaagaattgagcttttcaagggaacagattcagagagctagacagacaatagctgaacaagaaagtaaacttaatgaagcacataagtcccttagtacagtggaagatttgaaagctgagattgtttctgcatctgaatccagaaaggaactagaattaaaacatgaagcagaagttacaaattacaagataaaacttgaaatgttagaaaaagaaaagaatgctgtgttagacagaatggctgaatcacaagaagctgaattagagaggctgagaacacagcttctatttagtcacgaagaagagctttccaaactgaaggaagatttagaaattgaacatcgaataaatattgaaaaacttaaagataatttaggcattcactataaacagcagatagatggtttacagaatgaaatgagtcaaaagatagaaaccatgcagtttgaaaaggacaatttgataactaagcagaatcaattaattttggaaatttcaaagctaaaagatttacagcagtctcttgtaaattcaaagtcagaagaaatgactcttcaaatcaatgaacttcaaaaagaaattgaaatactcagacaagaagaaaaagaaaagggtacacttgaacaagaagttcaagaattacaacttaaaacagaattgttagaaaaacagatgaaggaaaaagagaatgatcttcaagaaaaatttgcacaacttgaagcagagaatagcattcttaaagatgaaaagaaaacccttgaagacatgttgaaaatacatactcctgttagccaagaagaaagattgattttcttagactccattaagtccaaatccaaagactctgtgtgggaaaaagaaatagaaatacttatagaggaaaatgaggacctcaaacaacaatgtattcagctaaatgaagagattgaaaagcaaaggaacactttttcatttgctgaaaaaaactttgaagttaactatcaagagttacaagaggagtatgcttgccttctcaaagtaaaagatgatttagaagacagtaaaaataaacaggaattagagtataaaagtaaacttaaagcacttaatgaagagcttcatttgcaaagaataaatccaactacagtgaaaatgaaaagttctgtctttgatgaagacaaaacttttgtagcagaaacattggaaatgggtgaggtngntgaaaaggatacaacagaactcatggaaaaacttgaggtaaccaagcgagagaaattagagctgtcacagagactgtctgatctttctgaacaattgaaaccgaaacctggtgagattagttttctaaatgaagaagttaaatctttaaagccagagaaagaaccagtttcattgagatgtagagagctagaaatcattattaaccacaaccgggcagaaaatgtacngtcatgtgatactcaagtaagctctttattagatggagttgtgactatgaccagcaggggtgctgaaggatcagtttctaaagtaaataaaagttttggtgaagaatcaaaaataatggtggaagataaagtttcttttgaaaatatgactgttggagaagaaagtaagcaagaacagttgattttggatcacttaccatctgtaacaaaggaatcatcacttagagcaactcaaccaagtgaaaatgataaacttcagaaagaactcaatgtacttaaatcagaacagaatgatttaaggctacagatggaagcccaacgcatttgcctctctctggtttattcaactcatgtggatcaggttcgtgaatatatggaaaatgaaaaagataaagctctttgcagtcttaaagaagagcttatttttgctcaagaggaaaagatcaaggaacttcagaaaatacaccagttagaactacagactatgaaaacacaagaaacaggtgatgaaggaaagcctttacatctgctcattggaaaacttcaaaaggcagtgtctgaagaatgttcttattttttacagactttatgcagtgtccttggtgaatattatactcctgctttaaaatgtgaagtaaatgcagaagacaaagagaattctggtgattacatttctgaaaatgaagatccagaattacaagattatagatatgaagttcaagactttcaagaaaatatgcacactcttctcaacaaagtaacagaagaatacaacaaactcttggtacttcaaacacgactaagcaagatctggggacagcagacagatggtatgaaacttgaatttggagaagaaaaccttccaaaagaggaaacagagtttttatcaatccattctcagatgaccaatttggaagacattgatgtcaatcataaaagcaagttatcttctctgcaagatcttgaaaaaactaaacttgaagaacaagttcaagaattagaaagcctcatatcctctttgnagcaacagttgaaagaaactgaacaaaactatgaggcagagatccactgtttacagaagaggcttcaagctgttagtgagtccacggttccgccaagcttacctgttgattcggtggtaattacagaatctgatgcacagagaacaatgtaccctggaagttgtgtgaaaaagaatattgatggtacaatagagttttctggtgaatttggagtgaaagaggaaacaaatatcgttaagttgcttgaaaaacaataccaagaacaattagaagaagaagtagctaaggttattgtgtcaatgagtatagcatttgctcaacaaactgaactgtctagaatatctgggggaaaagaaaatactgcatcatcaaagcaagcacatgctgtgtgtcagcaagaacaacattattttaatgaaatgaaattatcacaggatcaaattggttttcagacttttgagacagtggatgtgaaatttaaagaagaatttaaaccacttagtaaagagttaggagaacatggaaaggaaattttattatcaaatagtgatccccatgatataccagaatcaaaggactgtgtgctgactatttcagaagaaatgttctccaaagataaaacatttatagttagacagtctattcatgatgagatttcagtgtcaagcatggatgcttctagacaactaatgttgaatgaagaacagttggaagatatgagacaggaacttgtacgacaataccaagaacatcaacaggcaacggaattgttaaggcaagcacatatgccgcaaatggagagacagcgagaagaccaggaactagctacaagaagagattaagagacttaatagacaattagcccaggtaagggtcttgtagtcccctttctctccccagttaatttttttttccaaacaccaacttgaaccagatccccaattaaaacaacagtattttttatgtagcnatnatttttttttttgccgaaatctgaataaactacatatatttagcatcaggaacacactctatactaagacagcagctttagatcttgttagggacacctatctcaaccttggagtgggcattgtctttctgtcattttatttaactcctttttcaagcactggaaaagtggctacacggttttgtttttttcttttaaatcattccattagccatatatagcaaactcactttgacattttggaaataacattgtgctgaggtgctccattatgcagttactatcattcagttttactatcttcatttatagttttgtgagtccaccaattagcatctcgaaggtttacctttatctgtctttaatccatctttttaatcatgaatggaaatcggaagtagtatgcttctgaaactctttccagggaaacatctcttcttgatttgagaaatgcaaatttatttaacattcttatccctttcttgactaaatttaaatacttcttggtatttgggagctggattcttgtcaactgctgtataaaatatactcacccaaccattgcagaaaagcaagaaatatttatgtagaagttcttatgaaaacttattgaatttaattttgnaaactgaagctaagagagataataaatatctagagataactattaacagtattctttcanacataaaataataagataattgggagctgagcataaaacattatttggaaaaattaactttgcttttcttcattgcattttgtgaattc

SEQ ID NO: 644738 - DNA, 397 bp, Homo sapiens
  misc_feature (286)..(287): n is a, c, g, or t
aatggtctgtagtttccttgtaatgtttttgccattgttttggaattagggtattgttagcctcacataatgaatttagggagtatttcctctgccttcctgaaagagattgcagagaattggtataatttcttccttaggctgggttcagtgtctcatgcctgtagtcccagcactttgggaggctgaggcaggtggatcacctgaggtcaggagtttgagatgagcctgaccaacatagcgaaaccctgtctcaattaaaaatacaaaaattagctgggcatgnntgcatgcgcctgtaatcccagctactcgggaggctgagacaggagaattgcttgaacccgggaggtggaggttgcagtgagccaagattggccacgcactgcagcctggg

SEQ ID NO: 644739 - DNA, 452 bp, Homo sapiens
tccagacgtggggaagagagtgagactcgtgtctaaaaaagtaataagaataatgaaaataattgaccaaaactcctttctccttgatatggaaagctaacatagggtaactgggaggaaaaaaaaaaatcccacgagcaaaaaagcccacatccatgccaagtcaagaggcacgttcatccactgcaagtaataagcccaaggaagacgacttgggcgtgttgacgaccagagagacaccagcccaaggcttttacaaactgtcctcactgtgcacttataccattttctcaaagaggagctggagagcggagacgtgccccggcaccctgtgccttgccccatcagagcatgtatcacgaggcattgtgctctacattaacttgtcttattcactggagacacggactgagccctccttgctcaccaggtaatgtctaggacctcactga

SEQ ID NO: 644740 - DNA, 535 bp, Homo sapiens
agcgaacagagaaataagtccaactatgtaagcacaaggcagtcatttcccagtgggtctatcagtgatcggtcatctgtgaggaaatgtgacgctcattgctttcatggccacaaatgctcttctttcctccacatgtcctaagtagatggcacataaaatcataatcataatcatcgctaatacttattgagttattcattggataccactcataatgcgcaggtagcgtgttacctgcatgaggttcatttatcattacatgtaatacattcatatcagttagggtttccatttggagatgcgaaattacaattcgagattatacttgtctaaaggagcacacttagtaaaccagaacagaagtgaacttagctgggggtgtgaacacaggtcaataaattcattcattcaataaaatatcacctgagaatctagttaggtaccaggcattttcttaactttgggaatcaaatacaaaataataaaactgtctgctctcatgaattttaatatcatagtgggcaacatgaaa

SEQ ID NO: 644741 - DNA, 285 bp, Homo sapiens
  misc_feature (67)..(67): n is a, c, g, or t
  misc_feature (109)..(109): n is a, c, g, or t
  misc_feature (116)..(116): n is a, c, g, or t
  misc_feature (184)..(184): n is a, c, g, or t
  misc_feature (200)..(200): n is a, c, g, or t
  misc_feature (230)..(230): n is a, c, g, or t
  misc_feature (266)..(266): n is a, c, g, or t
ccctgatcttctgttctccaaaaaactccctctgcctccatctcaacccttccactgtgccgtccanaaccacagttctactataaacataccttctactttatgtctnccccaanaacactcttccatctctgtgtctgggcaaaatgctaggtccttctctaaggacactgcttcctggcanccttggtgactggaanctgtacattgacccaggctccacacaccanaggacaagtaagccccacttcacaatctcctgaacnatacctgagatgatcctga

SEQ ID NO: 644742 - DNA, 115 bp, Homo sapiens
cttatctacctacaatctgaactagctcttgaattctgtttattttctccatcatctggccacaactcttcaaactaatatttccaattttctcccacccttctgtcgtcttctc

SEQ ID NO: 644743 - DNA, 307 bp, Homo sapiens
ggctgggtgtggtggctcatgcctataatcccagcactttgggaggctgaggcagtcagatcccctgaggtcaggagttcgagaccaattggccaacatggtgaaaccccgtttctatgaaaatacaaaaattagctgggcgtggtggtacacatctgtagtcccagctactgtgggagtctgaggcaggagaatttgcgtgaacccagaaggcggaggttgcagcaaacccagatcctgccagagtgagactctgtctcaaaaaacgtaactcaaattcaacaaaaaaaaaacctcatcaaacaaa

SEQ ID NO: 644744 - DNA, 162 bp, Homo sapiens
actatgtcgagtctgcagaaaacagttggtgattccttgaacaaggttaaacggaattagcatatgacccagcaattccagctcctaggtatgtacccagaaagaattgaaagcaggtattcaaagcaaatacttgtacagtgaatattgtgtgtcaaaatt

SEQ ID NO: 644745 - DNA, 1014 bp, Homo sapiens
  misc_feature (251)..(251): n is a, c, g, or t
  misc_feature (796)..(796): n is a, c, g, or t
  misc_feature (798)..(798): n is a, c, g, or t
cgtctgctcacctgtgaatggtcgtagcttcgtgggcgatggacggacgcggtgcgcgagattcgccgtttcagcttctgctgtggccccgagcctgaggtcggaagccgaggctgcggcgggtccgggaccctgcgagcggttgcttgagccgggtggcctgcctgttccccggcgctgcgtgccttggcggccttcctattggcgcacataccgcagatgacgtgacgtggtgacttggttcgcctttntccagttgacagaggacattgagcaagtggccatcgtccatacgctgaatggatagacgatcttaccgaactctacgattagatacgacgcacaagagacacgacgtgccggtctgggatgctactctgctccaaccgttgttgcgtcaggagtgcttgcccctggtagcattggttgcatccccaagtgttgatacatgcgagtggtctgacaagtgtggcctagtggctagggaaccacgactcacgagttgcatgcagtcttgccgcagtgactacgtacccttggtagtacgctgtcttgctacggggacaacgggtcgttgcacccgtggggccccacacaacgcctcgcgatttccccagtcccgcttcggggcaccgtgtcctgaggcgcttcgtcgccacagaccgcatgcgctccgcgaacggtgcaaaccacggaacacattcggggtggcccaggcactgggacaatggcgtccacgcagtgcaagctggaggccacacgatcactcctcagtgcacggggaaggcccgccctngngcccacacgggcagcaatcacgcttcgtggtcacatcgggacggatctcgagttgttgcaatttccttgaagaaacggtttgggcgacaagttgtggcaggtggcccttagccctcttgggccattggcagttcggatatcgatgtggagcacggcgcggccacagcgaagccgcctgaacgccggtttctccagaaagttccagaaagaggacaa

SEQ ID NO: 644746 - DNA, 235 bp, Homo sapiens
ggcagaggagcaaatgcctctgtgtccttggtcaggggtttgtctacctggggaccccgttgcacacagggatcaatagagccaagtgggaccctcctagatgtcagtatcagtggggggcagtggaattttgagcgaccttactttatacttttctgtgcttgcagattttcagccatgccatgttcactttataatcaacaaaaataaggtcccatttttacaaaagggaaaa

SEQ ID NO: 644747 - DNA, 1769 bp, Homo sapiens
gagctagctgacagagttagtagagtatggcaacgcactggcaccgacgcgcacggcacgacaaagaaagacaagcggcgagaccacaccaacacacacaaacacaacacacagaaagaagcacacgacgcacaaaacacaacactgacgcaaacaaccaccatcaccccaacaccacacaaccacacacaaaccacaaaacagcaccacactacccgcagagacaacacaaacatacagagaggaaagaagaagaaacaaggagaacacacgctaatagacatcagcgcgcgcgaagaggacaacggcacaaacacaggaatagaagacagagataaataacccggatcaaccgacggcgaaatctcacacactacccagccacgcattctcagcacacgccaggaacgacacaacagcgccagagcacagcaactaagagaacaacgactgacagccgagcgcactgaccctgaagacaatcaacatatgaagaaacaccactaccaccaaacacacaaagaacacaacaaccatcacaaggactaggcagcatgcacaacaccaggtaggagcgagacgaagacgacgacagacgaacaaaagtaccgaacgagagcgaactaagatgaagatgaacaagagcagcacgacaacgaaaacgagccgacacagagcaacaaagaaaaaggaaagaagaggtaagaccgcacgagaaacaaagaggcgaacagaaaagagcgagacagaccagcacgcgaacagaggggagaaaaagagaaaacgacaactcacgagtacgcaacaaaccgcacaaccaacaacgcacactcaacgcaccaaacagactcaagatcaagccgaagcccctcaccggagccactcacaaacgtggtagagaacacatcacaccgagcacacgacgagacgacgcaggcgccacaggagagcactcactaccacaaagactacagcacacgataaacacagatacgacgaacgacaccacgcaaaatggccagtcctgacgcatccgcacagagcgaccaggaagaaaaacaacgaacagaccacacaacaccaccggcacgagagaatacgacaaacatgaatcgcgagtagggtcaagctgaggtcatagcgtggcatatagaacgagagacagacgagagtatgcgtgcatacagagcagcaagacgcataagacgcgtagcaagactacagacaactacgtatggacaggaatgcgagatcgacggagacgaccgaacaaacacatacgcgtcctgcacgcacgcaatcagagccatacagagcacgccaccacgagacactgacaagcacaagagcaaacaacaataaacagtctgaaactaggcgacatccaagcacacaccagctcatcatctaacccacacaaaccaacacaaccaacataaacactaatcaacgatatacacgcacaaacaccaagtacaatataacagcaaaacactactaccatccaaactgataaccacatactcagaacatacaaaacagacacaccaaagcacaataacatacattagcacacattaaatacgaaacgacaacaaacacaacatagacaactcatcacacccatacactttactactcgactaccactctaaaacaatctcccaacaatacaacaatcgacactcgtaaacacaacaaacacgcagtaaaacacacaaatcactaactaaacaagctacataactacactaacatacatcaccacc

SEQ ID NO: 644748 - DNA, 191 bp, Homo sapiens
agcggggaacaatcacttcactagtgaagtgatgtcagattcctagttttttttctagtttttagttttaacatcagaacggaaataaaaaattatggatacgtgtttggaatggcaaactattcctcaggaattccaattaaatttattttactggaataggaatgatcataaaagtgatggttcccgcg

SEQ ID NO: 644749 - DNA, 136 bp, Homo sapiens
aacctgagctgcggaacagttagggggacacagcattgtgacctgactcccgagcgctctgacgtgtggtatgcgcttcaactcaacctgaagctctgacttgtggtgtgaaatctgggcatcctgcacatgagaa

SEQ ID NO: 644750 - DNA, 138 bp, Homo sapiens
atcccttgataaaataactatattataatactggctgttttgtgtattctaatctgaaaaatacagttgtttttggaacttacttaaccaaaaaatatgtagaattttctgccggtaaagcactcttataatcatttt

SEQ ID NO: 644751 - DNA, 786 bp, Homo sapiens
aaatattatactgagcatgtaccatctcacttctaggaatactagtatatcgctcacacctcatatcctccctactatgcctagaaggaatagtactatcgcgtgtgcattatagcttgactctcataaccctcaagcactccactccctcttagtcgaatatgtgcctatgccatactagtctttgccgccgtgcgaaacctcggtgggcctagcccttactagtctcaatctccagcagatatggcctagactacggtacataacctaaacctactccaatgctagaacttaatcggtcccaaacgaattatattactagcacgtgacatgactttccaagaaaactactataatttgaatcaagcgacaactcacccacagtctaattattagcatcatccccctactatttttaaagacaaatctgaaaacaagctatttagctgttccacgatcttttcctccgaccccctaaaacccgcctcctaatactaactaccgtgacgtcctagccctcacagtcatggcaagccagagccacttatccggtgaaccgacgtgatcacgaaaaaaactctacctcgtctatagtaatctcgcctactgaatctccttaattataacattcagagtcacagaactaactcatattttatatcttcgtgtcgaaaccagaagttatcccgcgaccttggtatcatcacccgatgaggcaaccgagcagaacgcctgaacgcagggccatacttcctattctagcaacctagtaaggtcccttaccct

SEQ ID NO: 644752 - DNA, 921 bp, Homo sapiens
  misc_feature (921)..(921): n is a, c, g, or t
tgtccgtctgccactctcgctcgaggtccccgcgcagagacgcagccggctcccaccacccaaccaccggccctcgttcgcctcttctccgggagccagtccggccacctgctgcggcccagcccaatcgcacaccctccgcagccatgtccaccaggtccgtgtcctcgtcctccttaccgcaagaatggttcggcggcccgggcaccagaggaagccggacgagtcaagccggagccaaacgttgacttacgttcaaacccggacttacagcctgggaagcgggctttgcgcccaaagaaaccaagccgggaagacttttaggcttcgccccgggacggggggtttctcccaagggggctcctttgacggtgcgccttgcgaagcaacaacggtgccccggggggggcgggcaccctgtgaaaggaccatcggggggaacttccctcgtgttgccgggccgcacaattcaaccacgggatgcttcaagaaacccccggaaccaagaaggaagtgtgagagctgaagaaactagaagtgaccggtctgcaaactaacttcgacgaggtcgggctccgggaacccgcagaataggatcatgcgggacgagccgagcagttaagggccaaggaagtcgggctggggaccactaagcacaggcacaggcggacactcgcacggcggagaaccacaaaccaagaaacagccggttaggtcgacccacaactggcgagaatatggcacggacatgacgggacttccaacggggacgaaacctgcaatcacggagtaacggttgagagtgacgaacaggactgcgagagtgttggaccagggaccggcgccatcgagaccgtgatccaaccccggggctaataatcaccgggcacaagtctggataggagcgaacgtgaaccgagn

SEQ ID NO: 644753 - DNA, 430 bp, Homo sapiens
  misc_feature (25)..(25): n is a, c, g, or t
  misc_feature (63)..(63): n is a, c, g, or t
acaaacccctgagctcacggcgcantcctcatatcgccccggattacacctcttacattcgcntgcaaactcaactacgacgcatcacagtcgcatcatatcctctctcaggacttcaaatctactcccatatagctgatgattctagcaagcctggtaactcgcttaccccccatattacctactgggagaactctctgtgctagtaaccacgttctcctgatcaatatcactctcctattacaggactcaacatactagtcacagccctatactcctctacataaccacaacacatggggctcactcacccaccacattaacaacataaaaccctcattcacacgagaaaacaccctcatgttcatacacctatcccccattctcctcctatccctcaaccccgacatcattaccgggttttcctcgc

SEQ ID NO: 644754 - DNA, 142 bp, Homo sapiens
acgatctgcacaggaccaaggtgacatatcttgaagcggctgcctgagtcggagagcctgtcgagtggcatcacacgccagtgggcacctcgcacctgtacgacgtcagccacccctgcgcctcggccccgccccagtacag

SEQ ID NO: 644755 - DNA, 1531 bp, Homo sapiens
  misc_feature (1)..(1): n is a, c, g, or t
  misc_feature (193)..(193): n is a, c, g, or t
  misc_feature (1076)..(1076): n is a, c, g, or t
  misc_feature (1198)..(1198): n is a, c, g, or t
ngggtgttccctccccaccctcgcaatgtgttttcctcccggggccctcagttttggctctggccactccagagggatattctccctagtatgatatgtgtggtgtgttttttttctccctctcctccccctgttggcgcgccgctctccttggtcgttcctctccgtttgttggtagctgattcttcatagngtattcttcattcctcgcgtgcactactcttcccctctaagaggtggctgctcccccgtcagatgtatacatctcctccgcggttttttgtgggtactatccccgtcgtttggggccgcacttcccccacaaatacaccaatgagggcggcacattcttcaacaagtgggtgctcaccagcaccgattgttccgcccacgcaccaagatagtattggtggtgaattttttaggcccccaccctccacgcgggagtgatttatctgcgccacgcaatgatttcggcggggtccccacccctcaccacgactattcgctgttccccccccgccgcccactatagggcgtctgttcttctgatacgcggcgggatacttctctacgccccacgagattatggcgttgaggaaccactatattgggcgtcgcccacttgtgggcggttttatatatgtgagagatatttttaggcaatattgtgggcccccccctctgcggcgcactattatggccacacaccaccccctctcacactgcttatagctctcctctccccggagatcttctgggagattataaaccgtccctcctctctcgagaaagaaagagatatatttgggtccctctcgagaagcgctctctgtgatgtgtctctgagatatttctccacagccaccctcgcgagatgtttgtgagagagacactctctgtgtgtgctgccgagtgtttgtgggagacgctctgcgtgagattatgagagagtgttatacactctgtgtggtcccacctctcgggtgaatttaaaccgtgtgtgacacagagcgtgttgtgagagtgtgtgtgtctctgggagtattttcttctcttagagagagagtctctgngacacacagagacacacacactgctgtgtgttgtgtgtgtctcttggcggggttgtcttctgtgcacacagagcgttgtgtgtgagatatagtttccacacagcgccgctagaggagacccnacagctgtttctctcttctctatatagactcagagaggtgtctctttggcacacagagacacacccgctgcggggctcgtgtatactctgcctcttagagagagtggagaacacggtgttgcacatcttatcgcccctggataaagtgagagtcacatttttataatttatatgtaaaggttttttttgtgaaccccacatttctcgagattttcttgaaagaagaatgaccacacccaaattttgggtttttaactgttaaggcgagcaaccctaggccccccccacacggccttgggtaagggaaaaaataaagggctgcccggaccccca

SEQ ID NO: 644756 - DNA, 717 bp, Homo sapiens
cgccgttcccccctccaaaaattggattcgccgagttgtttttaattccaggtataacttcccccctcgggcccaataaaaaaagcttttaaatattttttgacggtttaaaaaaactgccccgcaagtggtttatctttttaagccaggggagtccctattggccaatcacaccattaaaagggttttcagaaccccaggtattcccaatgtccccgttatgaagatggagcatccacttgtggggaaaatttccgtcccaggcccagctgtgagatacagtaagttcaaaatgtcaaaggccaggccgccccccctgctcgggcagcacacaacgcacatcctgaaggaggtccttaaatacgatgacagggccctcggggagctgctcagcgctggagtggtggacccacattaaactccctgacaaaggaaaagggctcttcctcataacctcgatccgaatacactggcaaaggcaaccctttgcttggacccttctccccagttttgatacccctaaaaagaaaatttagagtaactccagatttcttacatggcatctccagaaaggctctgggattaaagaatctagggccttttaaatgtatcccccgttttgttgcccaccctcttttttttcaaaatgttctgtcctcatggctctgtgggagtttttaaaataaaaaatacaatttttttcctggaaaagaaaaa

SEQ ID NO: 644757 - DNA, 304 bp, Homo sapiens
gtctctagaggctcccctgagacgaccttgtgcttagattattcttattatttatttatttatttatttttccgagacggagtcttgctctgttgcccaggctggagtacagtggcgtgatctcagctcactgcaacctctgcctcccgggttcaagcaattctcctgcctcagcctcccgagtagctgggactgcaggtgtacactgccaagcctggctaattttttgtatttttagtagagatgggatttcaccacgttgctgaggctggtcttgaactcctgagctcaggcaatctgcctg

SEQ ID NO: 644758 - DNA, 314 bp, Homo sapiens
gtaccctagaaatataggaatggggaaaaatatatgggatgctggtaatgtgtgtgtgtctgttggatgagggggggaggtcacctctagagtttagtaggcagtgtcacatgacttggcacttctaagcagacagtacgatgagaccagatgacctctctaatagtcctctctttccttacagaccagatgacctctctaatagtcctctccttcattacagaccagatgacctctctaatagtcctctctttcattacagaccagatgacctctctaatagtcctgtctttaatgacagaccagatgaccta

SEQ ID NO: 644759 - DNA, 822 bp, Homo sapiens
gctctcgcactactgtacttccgccgatccgacgtcgcgtttctctgccggtctgcaatgtgaagaagagatcgccgctgctggtcattgagcaatggctccgcgctatgtgcaaagcatggttttgctggggactgacgctccccgagccgtgatatccattccatcgtcgggcgccccagaacatcgatgggcgtcatgtgtgggcatgtggccagaaggactcctacgtgggcgaggaggcctcagagcatgcgtggcatcctgacctctgaagtaccccattgagcatggtcactcgtcacctaacatgggactgacatggaggaagatctggcactcactactcttctactacagcagacgctgtcgcagtgtgccactcggacgcgagctagcccaagtgctagcgtgacacgatggcccccgtaaaccccaagggccaacagagagaagatgactcagattactgttctgagaccattcaacaccccgtgcatgtacgtggccatccaggccgtgctgtccctctagcgcctctgggcagcgaccactggcatctgtcatggcactcgtggagacggggtcacccacactggtgcccatctacgagggactacgcccatcccccaagccatcctgcgtctggacctgtgctgggcggggacctgagccgactaccgtcatgcaagatcctcactgagacgaggctcacagcttcaccaccacggccgagacgggaaatcgtgcgcgacatcgaaggagaagctgtgctacgtcgacctggacttccgagcaggagatggccaacggcgcatcctc

SEQ ID NO: 644760 - DNA, 516 bp, Homo sapiens
ggtgtaatcgatgccacgtgcgctcgtgcccaggccggagtgcagtggcatcatcttggctcactgcagcactgaccttccgggctcaggcaatccacctgcctttgcctcccaaagtcttgggatgtaggcgtgagccactgtgcctggcccaaaggaatttctgtgatggaatgtatagtgtacttctgagcttgcctgctttttctaggtgcttggttcccggtcagttatagatccgggagtctttagaacttcttctgagccttttaatccctccattctccagtctgaagctagacctcagaatggtctggttagagtcctggatcagtcttacctcatggaattggtttcactttttccctaggcttagttactgtcttcttgtgtttgaacttgtcttttatactaaactagtatctagagtgagacagggattaggatgaatctctttgtccaagtggagtgggtgagacagtttgacctaggagtttgtggtggcatcgataaaca

SEQ ID NO: 644761 - DNA, 302 bp, Homo sapiens
caccaacattcagaccaaagcaaggaccttccaaaatcagtgcaccttggaaaatttttgtcttcagatattactgaggtaattttaaaagtctagggagtagggaccggctaagaggaactgtgtttaaccatgtaatactcttttagcaaaccaagtgcctgcgtaatttttcacacagttcaagaatggagaaataattctgtcctaaactctttccacttcattagctgaaatgttcacatttctcatatccaagcagaaaggggggcaggttcctcattggtccctaaagcaaactt

SEQ ID NO: 644762 - DNA, 346 bp, Homo sapiens
agaagagtatcggcgaatggcgcgcctgcacccagaactggatgatcaggacctggcacgcctgttggcccttgatgaagcccaggtcgcgcagttgcgtcagcacctgcacagcagcgaaaaggccgtcgagcaagccaaggttctgctgcacgagcgcgaacagcgcctggccgaacaccaggccctgcacaacggcaacctggaggccgagcagttggacgccacccttttttcgcttgagcagcaactgctcgagggcgagaaacactgcgccgaactgcgcgcaacgccaaggcgaagaccagcgccgccagaatgccaaacccaggcccctggcccgaac

SEQ ID NO: 644763 - DNA, 227 bp, Homo sapiens
gtaatacatcaaaaagctaagaagtcaccagagtgtccataaatacacctctgaaaaggtggcatccaatatcagcgactatattatacagcattaaaaagcttatgctttagggtgcttctctgcacaatggcattgagcagacagagctgagttccattatcccacccagtttcacatggccccatttgagagctttatacccaaaatgcagggacagttactgc

SEQ ID NO: 644764 - DNA, 569 bp, Homo sapiens
  misc_feature (219)..(219): n is a, c, g, or t
tgctggtgttatcggccgaggctcctttccgctcggctgttttcctgcgcatggatgcctgcagtggcctgtaggcagccatggcgcccagccggaatggcatggtcttgaagccccacttccacaaggactggcatgctggctgctgtggccacgtggttcaaccatgccggccctgtaatgatcctgcatgactgtaatgtgccctgtgcaatgccnaatggctgctgcctgcattctgcccctgcgccccgctgtctgtgtgtcccattcctggcccatctgtgctgctgccccactggttctggtaccacactgaatggtgcgctgccggcctgcggcttcagcctggaggagctcagtggtggcctggcattcacaagaaaggtggcccggaccatctggcatttctgtggatccgatggaggcggaacaagtccacaggagtccctgctaggccaactgtgcagctggctgaaggagtaccgctccaaactcatcctcttccccaggaagccctcggcccccaagaagggagacagttctgctgaagaactgaaactggccaa

SEQ ID NO: 644765 - DNA, 662 bp, Homo sapiens
cccaggaaccccgggccggggcgtccaagcccaccctctggccggcttttcacaagccgccggaagccccccaggtgccaagctccggccagacgcaggccagcggggacatcctcggtagtgatcgtcctgggcaggtgcacaaattcctgcgcggtcgcgccgcacaccgggaagtccccgcaacccgcaggctcgggccaaccccagcccccccggaagctccgccgcatggtcgcggtggtcccccactcacgcccgccgttgcccctcctcttctaaggaacccgcgttcgttggccgccgccatgaccacggtggcggaccgcctcatgtttcgatagccaccgcgcgtctctcggaagaaactatcctgcacaacgttttatgggttgtctaccgccccctttctatggggcgtgctaagatgaggctccctcgccgtcgcccacaaggagaagccacattgcttccttgctccgtcgtgcccttccccttttatcggacaggcacagcagcattctcctccgcagcagcctgtaagaagcaagcattcccaataggtggggatgagcaagaagcgctgagaatctctgaagcaatagccggtgcgcgcggaagggccgtcgcgcgtataacaccaaaaacccacaaaaataaca

SEQ ID NO: 644766 - DNA, 846 bp, Homo sapiens
ggccgtcgtgtggtgtgctcggtgcgctgagctccgggtccgcgagccggttccgtccccttcccgccgcgccatgaagtggatgtcaaggaggaccactcgctggaacacagatgcgtgagtccggaagattcgagcgaaatatcccgacagggtaccggtgattgtggacaaggtctcaggctctcagtattgttgacattgacaaacggaagtatttggttccatctgatatcactgtggctcagttcagtgtggcatcatcaggaagaaggatccagcttccttctgaaaggcgatcttcctgttgtggataagacagtcccaacagtccagcctaattatgggacagtttactgatgaaggacataaacgatgaagatgtgagttcttatatgtggctagagggagagaacacgtttggcttctgagggccaatgtgggcttaggtgcaaccgaactggtgtgtatctggtaagataggcagcaattttcaggtattataccagaacctcttcagatagagttataagtgaattgtaggtgattattctaaagtatatgggaggttttgttccttagactagtaattatcattacagagttcattggagtttcgtttgtgatgctgagcgttttgtcaagaattgtctctgaatattgaggatttattcgagggagaggtgggataaggaggaaggagctaatgggaagtgaagtgaaggaagtttaaaaccaataacttagagaatttataattacgaaatgggggattgtttgaaggaaaaaaatttagaaaaaaaaatagcgggaaaagggagaagtgtaatttaaaagtgaattttt

SEQ ID NO: 644767 - DNA, 323 bp, Homo sapiens
ttctttgcttcaggtcctgtttggtatatggcatgcctggagtccacacgcagaggtcagggagcgagagagagagagggcgagagagggcgagagagagagagagagagagagacacccaggcgccaatgcccttattggctcaagggtactattcaaactggttctctgtggagacttttaagtcgcgtgcttaaagcacgcaggcaagagttctctggggtcacactgtgactgggaggtggacactggctccatgaggggagcggggttccagaggcttgtcaagtagattgcatcacgctcgcccatgatcaagtggt

SEQ ID NO: 644768 - DNA, 266 bp, Homo sapiens
agtaatacagagagtcctacaagagaacgagagtagatctgtaactaagttataacgaacatagtacatttttgttaagtagtaaatacaaaggatcgagtatagaaggtgccaatatgtgcctaggcataacaattctttacatcttatactaaatgctatatatatattttgaaggtaaagttaatttggagactcccattgatgttattttaataaaagcatattttgcagaaaatacagtataattcacaggcgtagccagg

SEQ ID NO: 644769 - DNA, 282 bp, Homo sapiens
agaaaatcgccgaaagttaccaaaacattctagcggccatcgagggctccaggttctacacctcggaccccagccaggcgtgcctcttttgtcctgagtcttggatactttagacagaggccaggtggtcacctcagtatgttcacacatttgagatcaaagtcagaggcttcacttgttggacaattggtgggttaatttaatttttaattaatttcggcacttggcctacttcaccgaggacgttggggttacaactggcacgcgagttgtgccaaagcg

SEQ ID NO: 644770 - DNA, 176 bp, Homo sapiens
  misc_feature (156)..(156): n is a, c, g, or t
  misc_feature (166)..(166): n is a, c, g, or t
aatctgttgtctcttgaaacagtgacacaaaggtgtaattctctatggttgaaatggatcatacgaggcatgtaataccaagaatgttactttacaatgttcccttaagcaaaattgaattgctttgaacttttagttatgcacagactgataatnaaagcctctnaaaacctggc

SEQ ID NO: 644771 - DNA, 260 bp, Homo sapiens
tgtgctcttatgctagatttacggacagattttcttctgccctgtaaactaatagcataggagcattttttaatacgattcgatacaaaaaagaatttaagcaatctctcgccgagacgcacaatcaagaccattcatatactgatctatccgctgaatacgaaccttcaatcgactcaatccgtaactggatcaagttgtacgcgggtccacgaagtgacagacgaaaaatgaacgcaagctgatgtaaacgcatcaca

SEQ ID NO: 644772 - DNA, 345 bp, Homo sapiens
cgtgttccatgtcttcaagatgatgtttcaggttctgcggtaccaggatcaccaatctcagattgtggtagagctgcagctgccccgcattggctttcaaagtttggtcaatgaaattgaagttaaagggttccattatggtattcttgggatcaaatgttgtcttccacttggcactcaggtagatagcattgagcagctcaagacgggtatcggagggcagactgtctaacatccgcctgatcttgttgttggtgttcttggccactcaggtgttgatgagctccaagttggcgtcactggtgttgcttaggactctgggtctgcttctgtacaggatccgag

SEQ ID NO: 644773 - DNA, 315 bp, Homo sapiens
catatattgcatttggttgttaacacaaggctgttcttaattttgagacagggtcttgctctgtcacccaggctggagtgcagtggcgtgatcacagttcactgcaacctcccaggctcaagcaaccctcccacctcagctaggatagcttgggcttcaggcgtgtggcaccataatggctaattttttttttatagagaagggtctccctatgtttccaaagctggccttgaactcctgagctcaaacgatccacacacctctgcctcccaaagtactgggatttcaggtgtgagccaacctgcgaacctatga

SEQ ID NO: 644774 - DNA, 540 bp, Homo sapiens
atagcagcgggcaagagaattgtgccggggaaccctatattcaaaccatcagatcttgtgaaaattactcactaccacaagaacagcaagggccagattgtccccatgattcattacctcctaccaggtccctcccacgacatgtgggaattcaagatgcgattagggtggcgatacagccaaatgctatcagctgtcattttgtatcttttaacaaatctgtctttaactttacctcccctctacccttcccagcctctagttatcttctgttctactttatacttcagttgagatccacttttaaatggcttccacttataagtcaaagtatgtggtgtataactttctgttcctagctgctatcacttaacataatgtcctccaactccatccatgttacacaactaacaggatttcattcattttaataactgattagtatcctatttagtatatccaccaaattttctctatccattcatgtattattggacacctagataggttccatatcttggctaccaagtatgaatccga

SEQ ID NO: 644775 - DNA, 793 bp, Homo sapiens
  misc_feature (88)..(88): n is a, c, g, or t
  misc_feature (179)..(179): n is a, c, g, or t
  misc_feature (236)..(236): n is a, c, g, or t
  misc_feature (245)..(245): n is a, c, g, or t
  misc_feature (250)..(250): n is a, c, g, or t
  misc_feature (269)..(269): n is a, c, g, or t
  misc_feature (282)..(282): n is a, c, g, or t
atgtctttgacaggtgctgtcctgaaaaacaaagttctatttttatttttaatggtttagttcttaactgcggccaactcttacatcnccagcaaatcatcgggccatggattttttccattatgttcatcacccttatatcatgtacctcagatctctctctctctcctctctctcanttatatagtttctgtctggacttttttttttcttttcttttctttttttttggcttnaaaacaagngtgangccatatcaagtccaggtnattctctcacagngtactctataagaagggtggtgggtgtctgttgggcaggattggtcagaaagtgcggataagtagcatgatcagggtatgcgaaagggttttaggaagtatgggcaaacaatgtggtatggactatgagggtgacatgatatagtcagcgggccttttaagaggtcttatctgtccagggtcaagtgatttacaaaaataataaccggttttctgactagtttacagatggttggacactggtttcgaagtggcactgagggttcatgcttcatcgggcaataagactcagcctttgaagctaaacacaagcatacacaccacacacaacaactagtgtgcgccgcgcgcaccagaaaaaggtttccagaccctcttggggcgcgcgggcccaggtataggacacttggcaacgcggtcaagagaacctggcgagccggctggttccacccaaaaagccgggccacgggttgacaacaagggcggcgacggtacacaggcaggggcgtatc

SEQ ID NO: 644776 - DNA, 452 bp, Homo sapiens
tcattatgtccgcaatgccacattcttcccaaggagctctacaaaactctactgggcctatcatataacaccttatgaccttccataatcacgccctcataatcattctccttatcctcttcctaatcctctattcccttttcctaacacttcacaacctaacctaatactaacatctcataccctcaccaaatacaaaccccttcaactatcctccccgccatcatcctactcctcatccccctcccatccctatccatcctttacataacacactacctcaaccatccctcccttaccatcaaatctcgccaccaatcccacttactctactactacacctacttctactcactaatcttcaatcctacatacttcccccattattcctataaccaatccaccttcctactccttttcttctctactccattacctactctcccccttct

SEQ ID NO: 644777 - DNA, 203 bp, Homo sapiens
gcatgtctggtggctccgcggattataacagcagagaacatagcggcccagaaggaattggaccccgatggtgtcatcgagagcaactggatgagattgttgataacttgatgatatgatttaaaggagtctctcctcgtggcatctatgcttacggttttgagaggcctccgctattcagcagagagctattattccctgta

SEQ ID NO: 644778 - DNA, 107 bp, Homo sapiens
  misc_feature (77)..(77): n is a, c, g, or t
tttttttttttccgttggtaaagtatattggtatcccacagtctcgcacgcttacttatgatatagttataatagcnattattatgatactatagaggatgaaagag

SEQ ID NO: 644779 - DNA, 1216 bp, Homo sapiens
agcgggaaaaaaaaaaaaaaaaaaaaaaaaaaaaaaaaaagggttttttttgggggtatttttttttgggggcccacaccaatcttttttgtttaagcccccacaaattgtgggtaccccttaaagtgtgggttgtgtttgggggacacgttaatctacctataactattttcccgctattagcatggtttcttacaacctgtgcgtgtgttacaaattttaacggggggaaacaaaaaatatgggcctgggaccctggagagggttccccacaccttttgtgtgtgagagaacaacaagcgttgtgtacaccctattgagggggaaccctgtgaacagagtgtgtacacctcttattgtggggcgcgggaaaaaattcccgagagggaaacacatggagaacaacaaggtgtgttgtggccccgccattacagcgtgttgtttaccccacacagctgatgaacacccgggaagcgagaagatttcttcaccccaccttttttgtctgtgaacacaagtggaaacacaaacggggcgctttttcccacccaccaaagtgtgaaaacaaagagtgtgtgtgtttctcacacacaacctataagagttgtgtggggattcaaccccacaacaaagatcaccttggtgcccctattgcgccttgtggaggcttctaatatatgaggtctctcatataataacattggggggagggtgtagggacaccaacttctctcaactgtataacagttttttttcttctcgccaccacgtgttgtgttaacaccaacacttattttgttgttgtagtctttcctacaacagactatatcatcttcttagccctccaacaaaaaatatattacaccacctgttgtggtggcgtccaacacagcgtcgcctctattatgaaggacgaggcaccctcattgtaggagaggaggggacgaacaacattagtcgagtaatcttatatctactagtccgccccccgcaggagggtggtgcaacatacaagacgggtgggggcttgctggtagcggagcacaccgaacacaaaatctatacaaaacgcgtactatttgtggttcttccaccaacatattattttttccaccgcagtgtggttgtgtctcccccccccgcaatgaaactatttttggcgcaccgaatattaaggaatgtttccttctaacagatatttgtgatctcttctcga

SEQ ID NO: 644780 - DNA, 564 bp, Homo sapiens
  misc_feature (387)..(387): n is a, c, g, or t
  misc_feature (482)..(482): n is a, c, g, or t
tggagagggggtctcaccatgtgtagtagatgggtcttgatctcctgacctcgtgatctggcccagctcagcctcccaaagggctggggattacagggcgtgagccaccgtgcccggccggtccctaagagttttactctgggttcagcaactggcctaaagtggcactggtggttctgggaacgcagtcatctttgagacagaggtggtgggacactgggattgatacctaagaggaagctggggaaaatgtgagtggcacagacagtaagtgtggtagcgaatccagagcgggaaatacttttatccagatcaggaaagtcaaagaaggctattctcgaggagggtggtgatgacggtgcccctcttctatcgacctggtgtgtnggatccttatgcctattcctagatggaaaaagaaccggtggagggtcagtgaataccgggggggggtttcctaccagagttaaattatgctcggnacttatttaagcggtggaactggtgctaaagaagacttctagggtggagggctcgccactcagaattggttctgtgtgggaa

SEQ ID NO: 644781 - DNA, 296 bp, Homo sapiens
aggtgccagagtgtggcaggtatgagtgtatagtccgtagaaggggcgtaaatctctggcaaattaagttagatgaaagatcttctctaaatgtctagagtacttagggatcatacaataacgatatactgtgctctttccgtggtatttcatctaagcaggtctcactatattgcaacagtacctcccccttccacaagcctctaaatccaacctaaagatggtagtcagagtgattctttacaaaatataaatgtaataacattatcgtgctttagaccttctggtggcttcca

SEQ ID NO: 644782 - DNA, 416 bp, Homo sapiens
cagataattttaagctaagggcctgtgggttaggccggttctttcctttccagccggggacctttgccgaaaccatgctcggccggatcatgggccaggccaggaggcatccgacctggatcccctttttggaattaatgggaactggagctacgggagcaccactgaatctttggcgtctggcatggttaaatccaaaggttggtgggaccagaattaccccaaagccttggaccaaacggggtcccaaggatcattccaggttttactcagggaagggggataccagcaggctgaaggaaggttttccagaggccacatccgaccaattttccacttaaccaggaaatattcctcctttaaaggcatgaaatcatgttgaagacctttatgggaacctctatggaagattccaa

SEQ ID NO: 644783 - DNA, 167 bp, Homo sapiens
tcacggtgtattcctccgcgatcgtgaccctgaaagaaaatgaaagattctttggaagacggtgcagcaaagcatggagacttgagaatccaaaggctacgcatacgttacttccagacacctcctggggaacgcaggcagataaccccacatgtagctcgattacc

SEQ ID NO: 644784 - DNA, 893 bp, Homo sapiens
cctgcataaaaaactcatgttcaagacagaagggcctgactcagactagacattctccactatctatgtaccccactgacagacctcccacccccatctactaccctacccctgccatatttagggtattatgggtactattgaaccctatctaagccaaaaagtgtagtagcgtacagaagacataccaggcacttaccatattagctttgtacccgagggactcccaccctgcacacatatgctacagcgccctatggcaccttcggttcgaatcttgtcactgtggcgtacctgaagtgaatcgacaggcaccatacgccgcacacatacccccacagcccttacaacttcttcaaacagtgtaacaacaaacatcgatagcaacgcagactcgctatcctgacacacacaatatgctaccgtgaacacaataggatatccgtctgccacacgttataccaaggagcactaatccgctcctacaccacccattccaatcgccacacactatacataacgtgatacgcgcggcaccccatcactctcacaccccggatcaccttataatcccatgaggcaaaaaagacactgatcaccccctcacacaatggaatcggccagttatacttcctttccttccaccttattccacctctgccccaccaagtaccatacatcgatgccacaaccatatgtcatgcatacacctctacagtgcccctcccataacaacataccaccacaacaaccaatgtaaccatttacgcctagccctcgcgcctcatcaccttgacacaaccacaaacatctatatcacctccgctgctaccccactagacatgtcactccactccatcactcaactctctaacccttgcgcagcatcatag

SEQ ID NO: 644785 - DNA, 1022 bp, Homo sapiens
cgctcgcaagaggaccggcagagtgcccggcagctcggagctccgggaccttttggcgcatcagtgacgcggctgtccctctgccggtgacccagagcctgccgccgccgctctgcctcctgcgtgttagcctcctctgcgcgctccggtgcaggcggccgtgggagcctgctggtgtgcgaggactggctgctgatggctgctgctgctgcccccgtgcccgctgcggctggaaacggatgatggcctgagccaaagcggcgggcccctcttatgctgggaggatgctggatgagtagcggctgcaaaggcggctgaaggaagggctgtgcttggagaagcgcagcgacgggttgttgcaaggctctggaagaaaaaggtgttgcatcctcaccgaggaatgggcttgctatgcttatcccgcccaagcagcttgcaacaccaggcaggcagcagcaacagcagcaagcatgcagcaggaaacaacagcccgggtgcaggtggccggccgagccgtcccaacccagatggacccccgcatgtaatcacagtccttcgaagtccggacggatcaagcttcaaaggaacttgcaacttcttcccaagcatgagagacctgtaggactgatgtggaagcgcaaggggtcaaatgttaccatgtatcatatcaagaggagggatgactggagcagaagtgtcaaatggcatgatcggacttaacgcgtgcacggaaggaaacaagggagctggaaacgcgccataagattcacgacgtgtaagattggatggcagtaaaacagaaatcgggcaaggcccaatcccaggagagggggtacaaaatccaacggctagcaagaaaggcgagacaagagatcattgggatccaagagagcgattgcccacacttgagaaggcacacgaggcagcgttagactcgaaaggtagggaggagactaatagccgaaatgcctaatggcataaaagcggcaaagaccgcataacgccgattaagagaatctccg

SEQ ID NO: 644786 - DNA, 1277 bp, Homo sapiens
ggcgacaacatgcttgcggacctcgggttaatcggaaccataggtcgaggatgacgaggtggccggtggtaggcccgagtcgtgactctcggggactgaggaagaggagtgggctccattgtgcggtgggcgagcacgacagaaaagcttgggggaagaaccgctagtgctgatcgcatagcctgcatttcgtgtgtgtcactgagatagggaggggacgtacgtagtggcagcgtgggccctggctgatgtcatgagccaactcaatgaaggacgagggcagtccatgtacacttagattgagaacgattgaggaaatgttcgaatagacatttcggacaaatcgagaggataaacgaaggcgcacgatctgggaaggttcggagaagggagaaattaaggctaatggaaacggtcgtgaaaacctgtgggaagaagtgcatagaaggcgtttgatgagtacggaaatggagtgcagcgacagggagctcaggaaacgtattggaagggcctgcgaggaggaccactggtatctaacttcctaattcttgacttgaactggccgacacacgagtactgtttcgctcaccaagggccagacgagtaacaccctccagcacagggttaagaacgtgcggttccgccgacacggagaagaaacggaaccggcatattggacttcgtggcacccaagagggaaagtccgacagtgacggagaacccccaaggaaaatgcaaacccgcccccggagggatacctgtcacaggcaaggggcagcacacggaaaggccccccaagtccattcggaataccggcacaacggggtagcgaaatggcgagaggacccggttcgtgcacgggggcgacccacggtaactctgaggaagggccctgggtacatccgaggcccaaacggcgtgtgtccgacaaacagcgactcagatccccaaaccacaccgaggttccaccggacaaggacccgtagccagttaccacctaagatggggggagagcaaatatggaagagagaagggggagaatccttcggtgcccataggtcgccattgcagaattagacaacacacgggggaagatcggcggccaggcaagcacaggcccagggggccatggggctcgggaaacccgctcacgcacatagcaggccacagacgccgggctcagcgggggatcggagcagcaacacagcagccggctccatgaggggcgacacaaagaagctccaagagacgcgagagacagaaggggaagcacccag

SEQ ID NO: 644787 - DNA, 831 bp, Homo sapiens
  misc_feature (148)..(149): n is a, c, g, or t
tgtgttggcatgcgcctgtaatcccagctacttgggagactgaggcacaagaatcatttgaacccggaggcagaagttgcagtgagccaagattgtgccatggcactccagcctgggtgacagaacaagactgtctcaaaaaaaattnnaaataaaaataaaagatcctcgatttcactcagaataaaatagtcattaaaaccacactgaaatactgtggaactgttccatatcccacaagactctgaatgcccgctacacacttgtgtaggcaaaaaccactacttacaatgatatgagattagaagcaattctgttttataaatagccacaaaacagacaggcacagttgtaatgcacactgaattctctgggactacaatagtgtaagctgaggcaagggcacactcttctgcttggaactgggtggggagctgctgagcctctcaggaagccatgttgctgacggcaaggccagctgagaggcctggacccagccctgtgctcagcccttgcccacacaggccagtacggatcccgctgtgctgtcctcacgagtcagtccagaagcactgacacacctaaacgtatgactttattctgtttctttcctatcactttcccctgatgttacagttaggatactactctgccttccatttcagaattctgtgtgtcggcagcctacattaactatgttacccatgaattttatttctgcatagtaaaggggtatcacaaagtgttctaaaaacaggagttgagtctgataggcttggaaactaccagcctacactactgtacccagatatcagcctacatgtggcaggg

SEQ ID NO: 644788 - DNA, 867 bp, Homo sapiens
gatcttagtcaacaggtgtagcgtacttccagcccagtcaggactgcggagtatgatgaagacagcccaggagggtactttcactttttctccaacctcgtaaccaaatgggaagctgcagcccaggcttcctggagattcttacacgtccagcatgctggtgcgctcaggggttgtcctgggcccgtggggcatgatcaccatggggccaacatgctgctgccctgttcgcctgggcctggggggccccatcggctcaggccacctgattcttcccctggatacacatccggggacctggcaggaatcctgacccatgcccttgaagtcaaaccaccgtgcacggcgtcctgaatggagtggctcacatcctccgccacataatgactgagtttgcaccagaccttcggtgctgtcctgggccgccgagccgttcatccctctccccagcgtctgtggtgcaagctgtctttgggcgacagcgtgccatcatgctgctggagggccagaaggtgatcccacggcgaacactggccactggctaccagtattccttcccagagtctaggggctgccttaaaggaaattgtagcctaattaggtcattgcaagggcctgaggcctgttcctcacaggcttccaggttaggcaactgtgaataggctcagcgtcctgtagagagactgaagcatctggttcttagattcctctgcgcagtcctcgtatcccattgttctgttgatccaccttaatgtgtccaaggccgtaatctcatcacggcgggacattaatcatccaactcctgtaagattcacggtttggttctcaacagtgtccgcagataccccacggtccttacaggcgtgg

SEQ ID NO: 644789 - DNA, 361 bp, Homo sapiens
tgagtagcgattgtcggtggaaaaaggtctcattccagctagagagaatatcaaaaagcagtagtgctgctggaggcccagaagagactggagaagctcaggacattgtgctggctccaggatgacagcacccaggagctcccataccaggtcctcagcccttatgccacagtcccacggtctccatgttgaagcaaattgatgagttgcatttctttgagcccccaaagactctgcagtcaagcacatgtcccagctacacaggtacagccagtacttgtcactgggaagcactcggcttaagtttacaacctgtcttgcccaggctagtattcctgtttttcccccatgcctcatttcc

SEQ ID NO: 644790 - DNA, 161 bp, Homo sapiens
tgggcattagaagtacatatagtagtcgtgagctgtgtaaaaatgtgagcgtaatcgtgaatgtgagggatgagtattgaggtgtggaggtaaatagagaccagtaatgtatagcagtgttgatatttgttcgttgtttctattagatatggtagctcagg

SEQ ID NO: 644791 - DNA, 564 bp, Homo sapiens
ccccccctttttgggcagctgcccccgtttatgttgggcccggctggcaagctgccccccattactggggttttcccccctcttttcccggtggccccttacagcatcgccccccttcctgttgtcccaacccttttaaggtgctttctactagggggcgtcctcacagctttggatccccccctctttgggagtgtcccccctgtcgcaacagtaccccacgtgtgttataagtgatgaaatatttagtcctcggccttaaacccacttcgcgtgatataatatgcttaccccccccgattggcccccacgacaggcgagccccccgcgcgggctcccccacccttcttgagagggaatatcggggtgtatttcccccctctctgtaggaacagaatagtggtagggtgtaccactcttgagtgagaagagtctgggtggacactcagcgccacgacgccgattttgttgtgccgcccgcgtcattatgacgagccctcatgtttgtcaaaaaggtgaggcccaaaagtcaaggactgcctcatacggcgcaacataacaaag

SEQ ID NO: 644792 - DNA, 220 bp, Homo sapiens
agccttttcttatttagctctttagtaagatttacacatgcaagcatccccgtttccagtgagttcacctctaaatcaccacgatcaaaaggggccaagcatcaagcacgcagcaatgcagctcaaaacgctttagcctagccacacccccacgggagacagcagtgatttaacctttagcaaaggtgctaatccagtggaatcatgagatgtgtatgta

SEQ ID NO: 644793 - DNA, 112 bp, Homo sapiens
ctgcagctgatctaccggccttgagcatgccgacccggctgagcatcaggatgccaaagctggtggccacgctggacaggatatggctggcgataaacatgccgaacagcac

SEQ ID NO: 644794 - DNA, 199 bp, Homo sapiens
ctgaataggagcactcataaaaatatctgttatacaaaatctacaaataccatgtaagtccaatgaaaatactaacaggctattatcctggaacctgatggttgaataaacaatttatatggaagagtaacggaacacgaaccgttaaagtgcatttttgcatggataaccccccgccaggacgcacattgacaataca

SEQ ID NO: 644795 - DNA, 192 bp, Homo sapiens
  misc_feature (31)..(31): n is a, c, g, or t
  misc_feature (41)..(41): n is a, c, g, or t
  misc_feature (85)..(85): n is a, c, g, or t
  misc_feature (118)..(118): n is a, c, g, or t
ggaagtggggcctgataatagttcactgtancgtgctttangagtagtgtttttgtgcacttgccggggttttctctctgtgtgngaggggagtgatttaagcaatggtgtctggagnaagccttacaattttaatagactttttcttatatatccctcatttctttccctgaaataaaaatacacacaagc

SEQ ID NO: 644796 - DNA, 925 bp, Homo sapiens
gcgtggtggcgggcgcctgtagtcccagctactcaggaggctgaggcaggagaaaagtgtgaacccaggaggcggagcttgcagtgagccgagatcacaccactgcactccatccagcctgggtgacagggtgagactctgtctcaaaaaaaaaaaaaaaaaagggaaacccaaaatttacggcaaaaattttttcccagggatttaggaaaaaaaaattggccttggttatttctcaagtcaggtaactcaaagcaaaaaagttgattccaactgtgtagagttatgagtttggcactccaaaaatttggacatttacggctaaataaatctcagggaattttggctaaaattcagagaatacgggaagtttcacaatctacctattggtagactttgaaggttgcgaacacttacttacattatttaatgtgtaaactcaacctttagggaccgggaatgggtggcatttaaggctataatcgtgggatcgccacaattttcccaaaaatatattttaaaaaaattcacatacccttttttaagggaaaattatttaagggtttacaaaattcattattggcattattcaaggtaaaaggttactttgaagtgcttaattaaaatttccccaagttatttaacgtggtatgaggtttacttttactaaactaatgatgcctctgtgggtctcttagtgaagcataggctcggatttgggaccccgtaatttaaggctgtaagaatagaaatgggtattatagattcgaccgacaggggttaaattgagcgggttgggtaacttttgtgattttattaaatttggactaatttggcaggtttcttggcaagaaaagtgtgggaacaaggactcgttacggaaagggttcgaaaacgtttggtgtgaaagtgtatatcaaaaagt

SEQ ID NO: 644797 - DNA, 792 bp, Homo sapiens
  misc_feature (2)..(2): n is a, c, g, or t
  misc_feature (8)..(8): n is a, c, g, or t
  misc_feature (12)..(12): n is a, c, g, or t
  misc_feature (25)..(25): n is a, c, g, or t
  misc_feature (28)..(28): n is a, c, g, or t
  misc_feature (30)..(30): n is a, c, g, or t
  misc_feature (39)..(39): n is a, c, g, or t
  misc_feature (44)..(44): n is a, c, g, or t
  misc_feature (50)..(50): n is a, c, g, or t
  misc_feature (52)..(52): n is a, c, g, or t
  misc_feature (56)..(56): n is a, c, g, or t
  misc_feature (63)..(63): n is a, c, g, or t
  misc_feature (67)..(67): n is a, c, g, or t
  misc_feature (71)..(72): n is a, c, g, or t
  misc_feature (75)..(75): n is a, c, g, or t
  misc_feature (83)..(83): n is a, c, g, or t
  misc_feature (91)..(91): n is a, c, g, or t
  misc_feature (102)..(102): n is a, c, g, or t
  misc_feature (107)..(108): n is a, c, g, or t
  misc_feature (113)..(114): n is a, c, g, or t
  misc_feature (118)..(118): n is a, c, g, or t
  misc_feature (125)..(125): n is a, c, g, or t
  misc_feature (141)..(141): n is a, c, g, or t
  misc_feature (163)..(163): n is a, c, g, or t
  misc_feature (192)..(192): n is a, c, g, or t
  misc_feature (215)..(215): n is a, c, g, or t
  misc_feature (257)..(257): n is a, c, g, or t
  misc_feature (297)..(297): n is a, c, g, or t
  misc_feature (343)..(343): n is a, c, g, or t
  misc_feature (348)..(348): n is a, c, g, or t
  misc_feature (352)..(352): n is a, c, g, or t
  misc_feature (387)..(387): n is a, c, g, or t
  misc_feature (425)..(425): n is a, c, g, or t
  misc_feature (435)..(435): n is a, c, g, or t
  misc_feature (437)..(437): n is a, c, g, or t
  misc_feature (455)..(455): n is a, c, g, or t
  misc_feature (489)..(489): n is a, c, g, or t
  misc_feature (579)..(579): n is a, c, g, or t
  misc_feature (588)..(588): n is a, c, g, or t
  misc_feature (596)..(596): n is a, c, g, or t
  misc_feature (604)..(604): n is a, c, g, or t
  misc_feature (609)..(609): n is a, c, g, or t
  misc_feature (634)..(634): n is a, c, g, or t
  misc_feature (654)..(654): n is a, c, g, or t
  misc_feature (657)..(657): n is a, c, g, or t
  misc_feature (669)..(669): n is a, c, g, or t
  misc_feature (704)..(704): n is a, c, g, or t
  misc_feature (721)..(721): n is a, c, g, or t
  misc_feature (787)..(787): n is a, c, g, or t
anggcgcnccgnacccgccgccggnggngngggggggcnggggngcctgncngggnggggggngggnggcnnagngccgaggngggagggngacggggcggngggcnngggcnnggcnggggggnggggggggggcggggnggggggggggggggggggggancgggggggggggggggggggagggggggngagggggggggggggtggcggcngcgcgggcggaggggaggaggagggaggggggggcgggaggnggggggggggggggagacacaggatctcccaagcaccaancacaccagcactttaccggagtagaacctggcgcaaccgcgcttcncgctnactnacaaacccaggagcggagggccggggttctccacnatccatcccaggagggatgttatgggcttgcggacctnggggggccgngnacgggggcgccctccctnccggcgggggccattaaacccagtgttagccctnacggacgggccaaggggatttacattcggccccttggaaacggaggggaccttggagcctccctgggggacccgcgggcggggaccaccngcggggctnccaggatnccaccccnagctnccaagttgggggagggcggggcccngtggtggggcgggagcgagnctnggaggagccctnaccttggggaggggcggcagttgccgtggggagtngggctcccgccaggatnaccttgggtagaaacgggggaaagggaggacgcttgccagcgcggccgggaccccccccaaaagancacac

SEQ ID NO: 644798 - DNA, 185 bp, Homo sapiens
tatagtttgagtttattttaaccattgcaggaatttaaaactatcgtattctgggatataaatgtggtcatagaggcctgattttatacttaaacagggttttttgtggcttgaaaaacgtggcattttataaactaggcataagtgaatttaagccaacagtttaccgaatgtctccatatcta

SEQ ID NO: 644799 - DNA, 421 bp, Homo sapiens
gagtcggtaccttcctgcttctgctgctgaaataaactcaaactggccacaacaagtctgacatcttttctttatgcttttatttttttttttccctgtcaaggattctcactctgttgcccaggctagagtgcaggggggcaatctcggctcactgcaatctccaactcccgggttccagcgattctcctgctcagcctcccaattagctggctttacaggcccccaccaccacccccagattaattttctgctttttaagcggggacagggtttcaccattgtcggccaggctggtcttcaactcctgacctcaagtgatccgcccgcctcggcctcccaaagtgctgggcccacaggcttgagccactgcgcccagcctgctcttgctagatttttaaatttgtcagatcactaatgg

SEQ ID NO: 644800 - DNA, 644 bp, Homo sapiens
tgtgtgactagtaaatgctgcaggatgtgccatatcattgaacagaactaaagtctatgacagtggatatagctgctggaccattccatcttatatgtaaagaaatctggaattattattttaaaaccatataacatgtgattataatttttcttagcattttctttgtaaagaactacaatataaactagttggtgtataataaaaagtaatgaaatcctgagaagagttttatcttaggaaaatacatatatatgcagtgtgtgtgccaatgtggtattaacaagactaatagtgcagtttgatccttaccaatatcattacttaatttgaagtgttcattatcaccccaaaatataccttttctatgtactgttaaaagaaattggcttctgatgcatgaacatttacatgtacattgaaagtagtcccataatagaagttagtttaatacccaatgttagaccagtacatttacttcccttgaaaaaagaattaaagttgaaaggaattgtactttttcctttaaaaggcagtacttaacccaaacatctattttattaccctatatgtgaaaacctctattggtgtttaggtggaaaatacgccaaaattttaacttattccattaggttatggtgtat

SEQ ID NO: 644801 - DNA, 522 bp, Homo sapiens
  misc_feature (86)..(86): n is a, c, g, or t
  misc_feature (108)..(109): n is a, c, g, or t
  misc_feature (162)..(162): n is a, c, g, or t
  misc_feature (164)..(164): n is a, c, g, or t
  misc_feature (173)..(173): n is a, c, g, or t
  misc_feature (182)..(182): n is a, c, g, or t
  misc_feature (186)..(186): n is a, c, g, or t
  misc_feature (200)..(200): n is a, c, g, or t
  misc_feature (203)..(203): n is a, c, g, or t
  misc_feature (211)..(211): n is a, c, g, or t
  misc_feature (224)..(224): n is a, c, g, or t
  misc_feature (228)..(228): n is a, c, g, or t
  misc_feature (234)..(234): n is a, c, g, or t
  misc_feature (237)..(242): n is a, c, g, or t
  misc_feature (246)..(246): n is a, c, g, or t
  misc_feature (251)..(251): n is a, c, g, or t
  misc_feature (257)..(258): n is a, c, g, or t
  misc_feature (261)..(261): n is a, c, g, or t
  misc_feature (272)..(272): n is a, c, g, or t
  misc_feature (278)..(278): n is a, c, g, or t
  misc_feature (282)..(282): n is a, c, g, or t
  misc_feature (292)..(292): n is a, c, g, or t
  misc_feature (294)..(294): n is a, c, g, or t
  misc_feature (303)..(303): n is a, c, g, or t
  misc_feature (305)..(305): n is a, c, g, or t
  misc_feature (308)..(308): n is a, c, g, or t
  misc_feature (314)..(314): n is a, c, g, or t
  misc_feature (319)..(319): n is a, c, g, or t
  misc_feature (327)..(327): n is a, c, g, or t
  misc_feature (332)..(333): n is a, c, g, or t
  misc_feature (341)..(344): n is a, c, g, or t
  misc_feature (350)..(350): n is a, c, g, or t
  misc_feature (362)..(362): n is a, c, g, or t
  misc_feature (364)..(364): n is a, c, g, or t
  misc_feature (370)..(371): n is a, c, g, or t
  misc_feature (396)..(396): n is a, c, g, or t
  misc_feature (401)..(401): n is a, c, g, or t
  misc_feature (476)..(476): n is a, c, g, or t
aaatcaatgattggatatcagaaacaacctagcaaatatagctccttttggataaaagtagaagcctcacattcacctttaatgtnatatatacactttttccaaaannaatttcctggcaccacacaaacaagaacactggataaatgtatcacctgaacngnaggccacanatgctcacnagtntgtccctgccgtangangctttaanaaaaaatacatgnatcnccagcnctnnnnnngggncgggngcttcnntgngctcttcgccncctacncccntggggggtgngnggatctttncngcntggggncccantttttgcnccacnnggcccagnnnnaagggnctccagcacgcncnccaatnnccacactgtgagcggctcacttggnatggntgatgggccggagtggcgtcctcctgatgtggcttccttccagcctctaccacccctgggggcctcctccaaggngcgggtggtttgttgtcctcttgtgcccacacacacggcagggtgg

SEQ ID NO: 644802 - DNA, 252 bp, Homo sapiens
  misc_feature (11)..(11): n is a, c, g, or t
  misc_feature (36)..(36): n is a, c, g, or t
  misc_feature (145)..(145): n is a, c, g, or t
  misc_feature (204)..(204): n is a, c, g, or t
  misc_feature (215)..(215): n is a, c, g, or t
  misc_feature (232)..(232): n is a, c, g, or t
tgcagatggtngttctgggtaatcgggaatgatggnggagttcccatatcttggagagccttcatctggagcctccaatcagtgtccccacctccagtctctccccatccagagaccatgccagatgaagaaccacacaccaccnccccattggtcaggaaatgtaagcccagggtcctcaaggtgggcctcaggggtctccantggcttacctnatgattcccaggcaccntcctttccaggattctttag

SEQ ID NO: 644803 - DNA, 956 bp, Homo sapiens
gccggcataaaacttaaaagtgttacagtcagaggttcaattcctcttctgtaacaacatacccatggccaacctcctactcctcatgtacccattctaatcgcaagggcattcctaagtgcttaccgaacgactagaattctaggctatatacaactacgcaaaggccccaacgttgtaggcccctacgggctactacagagccttcgcttgacgccatagaagtcttcaccaaagaagcccctaaaaaccagccacatctaccatgcaccgtctacagtcaccgccccgaacttaagctgtcaccagttcgcgtcgttctactatgaagccccgccgtccccatacccagaccccctggtcagagcctgcaacctaggcgctccgtatttattctagccacctctaggcctaggcgtttactcaatcctctgatgcagggtgagcatcaaacgtcaaagctacgccctgatcggcggcactgcgagcaggagcccaaacaatctcatatgaagtcaccctaggccatcattctactatcaacattactaataagtggctcctttaacctctccacccttatcacaacacagagaacacctctgattactcctggccatcatgacccttggcataatatgattgtatctccacactagcagagacaagcgaaccccttcgacttgcgaaggggagtccgaactagtctcaggcttcaacatcgaatacgccgagggcccttcgcctattctcatagcgaatacacaacattattattataagaacctcacataaatcttctaggacaacattgaggcctctcctggagtttccaatatttgtccagactatttaactccgtttataattgaaggatacccgatcggttgacaattaactcttaaaatcttcctcccgtatttgaagtttcctaatcggtccccactaaaaaaagg

SEQ ID NO: 644804 - DNA, 115 bp, Homo sapiens
gtttccccccctttttttaaattattggccgttttatgggttggctttttccctttccttaattccttgggtttccccccttgggtccctttttttaaagccctaagggtttcca

SEQ ID NO: 644805 - DNA, 477 bp, Homo sapiens
  misc_feature (54)..(54): n is a, c, g, or t
  misc_feature (60)..(60): n is a, c, g, or t
  misc_feature (80)..(80): n is a, c, g, or t
  misc_feature (93)..(93): n is a, c, g, or t
  misc_feature (110)..(110): n is a, c, g, or t
  misc_feature (125)..(125): n is a, c, g, or t
  misc_feature (160)..(160): n is a, c, g, or t
ggcagcaatccctatcaaaagcacaaaaagtgaaagcaacccccagtacccatnaagggntgaaaggggtaaaacaacangtgtcctatgcanaacaatggaataatgancagcctttaaaaggnaggacgctgtgacatacgcctacacatagatgaanccttcaggacatcacgctaagtgaaacaaaccagtcacaaaagagaaataccatatgtttctgcttatatgagatcctcagtgtaagtttgtagagatggaaattagaatgctggttgcccaggagctggagagaaggggaaatagggagttattgtttaataaatagagattcagttttgcaagatgaaagcatctggagatggatggtgatgaaggttgtgcaacaatgtgaatatacttaatgtccctaactgtgcacctaaaaatagtctaagtggtaaatattactttacgtgtatgttaccacaatttatt

SEQ ID NO: 644806 - DNA, 299 bp, Homo sapiens
  misc_feature (21)..(21): n is a, c, g, or t
  misc_feature (120)..(120): n is a, c, g, or t
  misc_feature (130)..(130): n is a, c, g, or t
  misc_feature (132)..(133): n is a, c, g, or t
  misc_feature (165)..(165): n is a, c, g, or t
  misc_feature (168)..(168): n is a, c, g, or t
  misc_feature (187)..(187): n is a, c, g, or t
  misc_feature (191)..(191): n is a, c, g, or t
  misc_feature (199)..(199): n is a, c, g, or t
  misc_feature (222)..(222): n is a, c, g, or t
  misc_feature (234)..(234): n is a, c, g, or t
  misc_feature (247)..(247): n is a, c, g, or t
  misc_feature (256)..(256): n is a, c, g, or t
  misc_feature (293)..(293): n is a, c, g, or t
catagaagtggtgtttttttnccaaaaacaaagtgcaaagctgcttgaatcaggaggagattaacacactgaaccgctacaagagggcaaagctgattttttttttaacttgaaaagatngcaaagggananngaagtgtttaaaagagccatgtccaaacccanctncatggatagctcagaggtntccncttttggntcccccattttaactggccacancccagccacagnggggtttttttgncttcctatncagcaaaagttaatatccagatgttggccttggccanttgcca

SEQ ID NO: 644807 - DNA, 405 bp, Homo sapiens
tgattctagaggatctcccgtccataaggtgtgccagtggattgcatgttcattctagagcaattggaaaatacacccttgccaaagaaagtctaatgtcccctcatgtgtccggggttctggccaggtgtggtggctcacgtctgtagtcccggcactctgggaggccgaggtgggaggatcacctgagctcaggagttcgagaccggcctgaacaacatggcgaaaccccatctgtactaaaagtacaaaaattagcggggtgtggtggcaggcgcctgtaatcccagctacttgggaggccgaggcaggagaatcacttgaacctgggggccggaggtggcagtgagcccagatcgctccacttcactccagcctgggcggaagagggaaactccatcgcac

SEQ ID NO: 644808 - DNA, 328 bp, Homo sapiens
  misc_feature (7)..(7): n is a, c, g, or t
  misc_feature (155)..(155): n is a, c, g, or t
  misc_feature (283)..(283): n is a, c, g, or t
  misc_feature (285)..(285): n is a, c, g, or t
  misc_feature (288)..(288): n is a, c, g, or t
  misc_feature (310)..(310): n is a, c, g, or t
ccccccntcccccacttttctactcaacgccagggaacgcctccaaggtgatgggcggcaagtaacaattcattccctctcaccccacctggaaggctggactacttcctcctcccaactccggggtcccaaaaatcctccggtcccatttgctnacttacaatattcaattcactctgaccaaacttcctataaaaaaatccacggtgagccaaaatgaaaattacaaggcattaatacaagaacctggcaaccgcactggccgcccaaaaacttcaattgntnctnccccattccgcaaaaatttaanaaacaaaaaaaaaaaaaa

SEQ ID NO: 644809 - DNA, 259 bp, Homo sapiens
acatcccatatatatgtacaatgagaactcattttatctgtatcttctggacagttattgataactattccttctttatcgagctctctgttgtcttatctaagcctatctttggttcttatttgattttaaaaacactgattttctttctattaaacactgatttttattttcacgtttttatttgatgagtaatatcctgtgaataattccaaagtgaacactgggcataccctgggtgactacaatctccaaatgg

SEQ ID NO: 644810 - DNA, 402 bp, Homo sapiens
  misc_feature (42)..(42): n is a, c, g, or t
  misc_feature (98)..(98): n is a, c, g, or t
  misc_feature (394)..(394): n is a, c, g, or t
gcagaggcttaaagagtgcttattcactgaggcttgcccttncttactccttcctgggaacccatttggcaacaagtgaagaaacctaggccagcctncttgaagatgagggaccaacggagagagaggctctgctgtcctagccctcccacagaataagtaagcctagccaacaccacgtggagcagagatgaaccatctcagttgagcccagcccaaattgctgaccaaaagaattgggaacaaataaataattattgttttaagctactgtgtttctgggtggttttgtatataatagtagctacctgatacattgggatgaccccaattacttgaacttctcttaggcctgttttatcacgtgcaaataggggataattttagtaatttngggttgct

SEQ ID NO: 644811 - DNA, 184 bp, Homo sapiens
aaacccaaacgcctggccatcgacgtatctcgctgctggcgtacggcgcgcctgcggtgacggtttcgctcagcggcaggccgaggtcctccactgataaacggagcgatgaagcctgggctgcgatcgacagcggctgatattcctcagcgcgaatgcggttgtagcagcagggcggtcgacg

SEQ ID NO: 644812 - DNA, 790 bp, Homo sapiens
gagcgggcgggcggggtgcgcagggcccgggagccctctatggagattctgcctcccctgggacagatggcttcttgagcacactcccacgatgggtggctgctctgggtattcatccatggggttcttccgcggtgaagccagcttgtcgtgctgtcccccttgtcattgaagccatcatggttctggtcaattcattgttgaaagcctccttaaactcctggatggggaacgtggtcgaacatcacgaagaccatgtgtacttgtggccccttgtgctgtggtcgcttcttgcgtggtcttggcttttggtccacttggctgaacattgttgggcttcagggaaggaggtacctttggaagaggaaattgggaagagcgggagtgtacaacttccctaatgaatgaaggcagaatacgacgaagaacaaggaggaacaggacatggtcacgcccaaaggcacttggatccgtgtgggccgatcaacgatgtggcgaacagagacgggacgactgtacccacgtggtagaggctaacgaaggacgagggggcacagtccagaaccgcccgaaagagagaaggcagaacgctcgtggcaagagactaccagatgagacaaccgtatgagggacggggcggaaggtgcctaagaagccccggtcctcaccggagagggagcgagcgacgaacgaggtacacaagacctaaggagctggggcgcagaaagggccggggcgtgggggagggagcgacgaccgggagccagcgagaacccagggggacgccgag

SEQ ID NO: 644813 - DNA, 222 bp, Homo sapiens
tactactgcattcagcctgggcacagagcgagactctgtcccacagaaaaaaaaaaaaagaaatacaaaacttagctgggtgtggtagcacctgcaatcccagctactcaggaggatgaggcaggagaatcgcttgggcccgggaggcggaggctgccagtgaactgagatcacgccactgcacttcagcttgggccacagagcaagaccctgtcccccgac

SEQ ID NO: 644814 - DNA, 657 bp, Homo sapiens
  misc_feature (27)..(27): n is a, c, g, or t
  misc_feature (34)..(34): n is a, c, g, or t
  misc_feature (74)..(74): n is a, c, g, or t
  misc_feature (76)..(76): n is a, c, g, or t
  misc_feature (156)..(156): n is a, c, g, or t
ggttaacgcaacagcacaatggctggntgatggncgatgatgcccacggcacgggcgttatcggggagcagggncncggcagctgctggctgcaaaaggtaaaaccagaattgctggtagtgacttttggcaaaggatttggcgtcagcggggcancggtgctttgctccagtacggtggcggattatctgctgcaattcgcccgccaccttatctacagcaccagtatgccgcccgctcaggcgcaggcattacgtgcgtcgctggcggtcattcgcagtgatgagggtgatgcacggcgcgaaaaactggcggcactcattacgcgttttcgtgccggagtacaggatttgccgtttacgcttgctgattcatgcagcgccatccagccattgattgtcggtgataacagccgtgcgttacaactggcagactgcgtcacaaggctgctgggtcacggcgattcgcccgccaaccgtacccgctggtactgcgcgactgcgttaacgctaaccgctgcgcatgaaatgcaggatatcgaccgtctgctggaggtgctgcatggcaacggttaatcaagccattgcagcggcattggtcggcagccgcacactatgagccatgcagatctacagcgccagagtgctggacgccttt

SEQ ID NO: 644815 - DNA, 315 bp, Homo sapiens
  misc_feature (187)..(187): n is a, c, g, or t
ttagagtatcccttgtagaaacaggattcaccatgttgctcaggctggtctcgaactcctgtaccttgtgatccacctgcctcggactcccaaagtgctgggattacaggtgtgtcgccaccgtgcctggccaaaatatttttaactgtaatgattaatgaaaaaatgctgtatcaagaacttttanggcccacatctataagcaatatttaagcgcgaaacttacagctctagttatatattaggacagaagaaaggttctaaatttctttgtctagaagaaaaagcatagcacattaagcccaaagaaagtaa

SEQ ID NO: 644816 - DNA, 260 bp, Homo sapiens
tactactactactaattcgcggcggtcgacggctgaggcatgacaactgcttgaacctcggaggcagaggttgcaatgagccacctgagtagccaggactactggcgtgacgaccacgcccggccaatttttgtatttttagtagagacagtgttccgccatgttggccaggatggtatcgaactcctgacatcaggtgatccgcccgcctcagcctcccaaagtgctgggattacaggtatgaggtcgacgcggccgcg

SEQ ID NO: 644817 - DNA, 193 bp, Homo sapiens
ggcagtacgagaaagtgtagtgggaagaaagttagatttacgccgatgaatatgatatttgaaatggattttggcgtaggtaaggtctagggtgtatgcctgcgaatagagggagaatcagtgaatgaagcctcctatatatggtgaatacagctcctacttgataggacatagtgtgaagtgaggtacaacg

SEQ ID NO: 644818 - DNA, 139 bp, Homo sapiens
ggcagtcgagtagatactcggacgggccccgtcttgcttcccgccctgctgcgccccattgatcaagagaccatggaagtgtcagagattcagaatccaagagtgtctttaagttttcaactgtaaataaagttttttt

SEQ ID NO: 644819 - DNA, 368 bp, Homo sapiens
  misc_feature (76)..(76): n is a, c, g, or t
  misc_feature (105)..(105): n is a, c, g, or t
  misc_feature (123)..(123): n is a, c, g, or t
  misc_feature (167)..(167): n is a, c, g, or t
  misc_feature (171)..(171): n is a, c, g, or t
  misc_feature (265)..(265): n is a, c, g, or t
aatgtggccataaaataaaatgggatattgttcaagcagtgaaaggaataaagtactgatatggactacaacatgnatgaaccttgaaaacattatggcaaagtnaaagaagccagttacaangccgggcaccatggctcatgcttgtaatctcagcactttggganaccnaggtgggtgaatcacttgaggtcgggagttcgagaccagtctggacaacatggtgaaacccccgtctctactaaaaatacaaaaatcagttggncgtagtggtgtgtgcctgtgatcccagctactcaggatggtgaggcaggagaatggcttgaacccgggaggtggaggttgcagtgagccgagatctgccctcc

SEQ ID NO: 644820 - DNA, 1285 bp, Homo sapiens
  misc_feature (641)..(641): n is a, c, g, or t
  misc_feature (903)..(903): n is a, c, g, or t
tcaaaacacaaagatgtttggtttttaatggggagtttttttaaagtttccttttttttaaaaaaaaaaaaaaaaaattgttagggacaaacggcaaacctcacacttgccttgacgcaggggccgggtttctctctcctttgagggccttttacagatttgtcagtttacatgggcccctccattgcacaaccttcccattaccacccaattctgcctgccacagcaagagtgcagggcccctggggccccctgtgggaggatgcgggcgaaggggctcacggggctctccgaggaagtgtgtggctcgactctgtgggtgcaccagtcctcctgtggcggctttcccgtgagaatgagccttcctcaatctctccaagtgttcacggtgttcttctcttgtgagcctttgccaagcccaccgagggcgcttcagctactcacaccggcgcagaacttttcagtcaccccaggctctgctgttgaccctgtggtgcatctccagggcttctctgtgcaattttccggcctcacttctgtgttcggcaccaagatctcagagaggccccctctgtgttcttctcaggccctgtgggacttgacagcgcaggtgtgccaatctcctcactgtgggctcaaanggggccccgtgtgtgtggctcacagggctccctcccagggggctctctttctctgtgtcgccgacctgtgtgtgtgcagcggcggtgggacagagatgttgctcctcgggagaattttggctgttttgatacctccttatttgtagaacggggctcctttcggcctcataaagggtgcaccgggggataaacagggggctcataatttccttccttgtggcttgggacccccagggggttttcaagaaagacacccttttgnccctcgtgtgtgaagtgaccagagctgttgccccagtaacaacatccccgtgaggaactcatcggggcggagagagtgggaaactcccactgagggtggaactggcggaacgaaacaagaccccccaaggcccgcaaaacctattcatgcatattggaactaaccggcggctggaagacgacacacccgagtcattggtgtcttcaagacagagggaggcgcgcgggccaacccccaaccagcgagaagggaggtgctctccacatggcacagctgaagtcagcaccaccccatgttgtattgagaaccaggttgtattcggatggaaacaccacccaagaatgtgtctccgcgaaacgatgatcgtgcgtcttacacacag

SEQ ID NO: 644821 - DNA, 247 bp, Homo sapiens
aaggtctagcctctcgagagagatggaagcctccccatatctgtcaccagaatttgactcgatgccaggggaccatatttgtacaaagaaagctggagtctaatgatgatgatgatgatggaaggcacagctgctttccacaaggtgggatcttggactcgtgccggcacgaggacaagatccaaggagttacacgtgggagatccaagaataccaagccatctcggccagaagataggggaccagg

SEQ ID NO: 644822 - DNA, 369 bp, Homo sapiens
acccgcgtccatcacccctttgtaatcccatatggggcagacctctgtcctccagagcccctggccacctgcgagatgggtcttgccaaaatacacatttgtgcctcttgcctcttgcccacaaacctgaacagacacctgctgctcatgaaaccacatccctattacccaacctggtcctgaaaacccccaccatggcatgtcctcccacctcctttcccattgcgttccttcccccacagccaagtcaattcattctaaatttgatctgagattattggttctacccccttgcttaacctaatccctttttttaccacttggcaaaaacctaacctaaccactccacggaggagatgccaccaacgg

SEQ ID NO: 644823 - DNA, 207 bp, Homo sapiens
  misc_feature (33)..(33): n is a, c, g, or t
  misc_feature (35)..(35): n is a, c, g, or t
  misc_feature (65)..(65): n is a, c, g, or t
  misc_feature (93)..(93): n is a, c, g, or t
  misc_feature (98)..(98): n is a, c, g, or t
  misc_feature (132)..(132): n is a, c, g, or t
aaaagtctcgtattgaatgtaggataggtaagnanttatttgtgaaatactcgaatgcttcatgnaaatactttctgagtttgtatttttagnaaggnacattttggaggctgaggcaggagaatggcgtgnacgtgggaggcggggcttgcagtgagctgagattggccactgcactccagcctgcgcgacagagcaagattctgt

SEQ ID NO: 644824 - DNA, 259 bp, Homo sapiens
cgattatatgaaatagaagcaacttacccaaaacgtaagtacataaagtgtgtacagtcccacacagactagtacaggtttacaaattcaatacacagaactttaaccgtgctaaaggcgagaggaatctagacattctcgggtaaatctctactcaatctaaatcaacagcttggcttttcagcgacggaggaacggtgcgaagcgcagagcagtaggtgcgtgaactactcgctctatctgtattcacgttccactc

SEQ ID NO: 644825 - DNA, 116 bp, Homo sapiens
tgctgatacaccaaggtatggactttctttagtatgtatcacaaattggttcacttcattatggcaaatgccacctattagtggatagggtggtatggtggtatagggtggtatag

SEQ ID NO: 644826 - DNA, 399 bp, Homo sapiens
cgaacactgtatcgtacctatgctgatagccaaagccagtgatcaacatgagatatgatactaatagagacaagagaggatggtgccaaaaaagacctggaactcccagaggaagggcaagtgtgctgtgctcaaacacctctacacgacagacgtacttccttcctgtgatagaggttggtggatgctgaaaagctcacagccaggagacctggtgggtgtgaacaaatactcctatctgatcctggagacgctgcccacagagtatgactcgcgggtgaaggccatggaggtagacaagaggcccccggagcaatacagtgacattgggggttaggacacgcagattcaggagctggtgcaggccattgtcttgccaatgaaccacaaggagaagtc

SEQ ID NO: 644827 - DNA, 941 bp, Homo sapiens
ctcagtatagataatggataacgccgcgcgggctattaatgactgcagaaggacaaggggccaaaagcgggtgaacaccggggcacacacccgctgtggggcgcccccgctctcgcgccgggttgtggagaccgaagtgcgcacaaacccgagagggggccaaatgtgcccccatcaagaccaaagggggatgccccccggagattgcaaagtgttcctgaccgcggcgacgccccgtaattttggacgcaggtccccttccgagttgggggacacccaccaacctttgggcggtgggcgcttctgaaagagctcttctgcgtcgccccgatgccagccttcggccgacgaaaacaagtgctaaaagttggtgctttcttctaaaggagtttctaatctctggggcgagacaccccccccccccgaaggagggagtaaacctgctccctggcagtctgtccgccgcggagggaaaaaagttgcgtggcgagacaggaatcgccattctatcgaaaagcacaaggtaacaagaaagtcttctgtaggggaggtcgcccaaaagatgaaactgtttgtcatcggggagcgggccctctcccaagactacgatggaacaattggcccagacgacgagtcgttttccagtagaacccccagcataattgcggggaagaaggcacccacgggcctcacaatgggtgcgcccgttaccaagggcgattcacgaacacggtctggagacaagggtgaacgcatagagattgtaatggtatcacagaggagtccatgaaaaaaacagggatgaaaaagggtgcctcgcttgcgggagtaatatttgcggaagaaggtgcaccgcccgagacagagaaaaacacaggaaaattcccgctttgggcccgggaaatggtaaaagggggaaatttgaacagacccaacataac

SEQ ID NO: 644828 - DNA, 349 bp, Homo sapiens
  misc_feature (349)..(349): n is a, c, g, or t
aaccaatgtgatggtatttggggatgccaccttttagggctaattaggtcatgagggtgcagccctcatgaatgagattagtgcccttatcaaagtgacttgagagagctctcttgacccttttgccatgtgaggacatggtgagaaggacatagttgagaagaaagcagtctatgaaccagaaagtgggccctcaccagatgctcaatgtgctggcgaattgatctggacttcccagcctccagagctgcgaggaataaatgtttgctgtttgagccacccagtctatggtatcttgttacagcagccaaccaagacaggaccctcaggactgttctgagccccccan

SEQ ID NO: 644829 - DNA, 219 bp, Homo sapiens
ctagaggttcccaagcttacgagggagagccacagccagagcagaagaggaaaaaaaatcttccgaagacattatttcatattcataaaatgatagttatagaagtgggggaaatctatattcagtacattctacttactaaaaatgaagtataggtaaccactttaaaaagaataataacaaggttttgaagcttcatataactggacattcctcgtt

SEQ ID NO: 644830 - DNA, 140 bp, Homo sapiens
gacggggatctacaaccaccacgactaaaaacaaaccctgcacatagttcaccattcaatgcatctttttcaatttcaacagcacacacacagcaaacattcagccagtcatcttgcgacagcccattccagcattcaac

SEQ ID NO: 644831 - DNA, 164 bp, Homo sapiens
atcgggtcgagctcaccggcgcgcagtgtgggccagctcggggcgatcatcgagagcagcgcgtcgggcacgttctcgcgctggcccagctgttcgcgctggcgcttgctcagccagggcaggcccatcagcgccaggatgcgcccgcgcaggccccggccaag

SEQ ID NO: 644832 - DNA, 327 bp, Homo sapiens
gatccttaaaagcttatttctcagaacatatgtccggttatttatccggaataacattagaggtactcatagggagagttaaactcatgttcttacatatgtagtatttaaaataaagttcagataaaggaaaaaagcattactttgtaccttctacatctgaaagaacaatcaagagatcagtttttattttcacagtcagttgttcagtcaggctattattatctttaacactaataacctagaattgcagattaaaaagtcatatgtgagtgagctaagtagttcaaaaagaaattcatggaagaacacagtcaagctcatgca

SEQ ID NO: 644833 - DNA, 158 bp, Homo sapiens
agcttgtgggagagttgagcagcagcagagaactcattctcaaacatcttcttcttcaggcgctcgatggcctggtctggctttgttgcttactcctatctggatgacactcttgcatggcagagatcttcatcttcatgtcctccatgctcatggtc

SEQ ID NO: 644834 - DNA, 392 bp, Homo sapiens
gctgccattagccactcgcttctcgagtcgtgccccctagcggctttcgtcacgctggccctcgtagcgttcaacgaggaaaggaatcgtatcgtatgtccgctatccaaacctccatctttcgacccctttgctgatgcaaggtaagggtgatgacctgcttcctgctggcactgaggattatatcatatagaattcaacagagaaacggcaggaagaccttactactgtccaagggatcgctgaatgtatttacccgaacttcacaaacagaaactatgtgaaggcgtttaagaaaaagtttgcctgcaatggtactgtaattgagcatcggaatatgagaagtaattcagctacagggttgacccaaacgcccaaaggaaaccatatgc

SEQ ID NO: 644835 - DNA, 226 bp, Homo sapiens
cagataagaggcagaatacaagatagatttttagggcaatataaactattctgtatactgtaatggtggacacatgttattatattagtagttgtcaaaacccatagagtggtccggtgcagtggctcatgcctgtaatcccaaccctttgtgaggccaaggtgggagaattgcttgagaccaggagttcaagaccagcttaggcaacatagtaagaccccgatct

SEQ ID NO: 644836 - DNA, 229 bp, Homo sapiens
agagtataaaacatatgcatactaaatagaaaattaccttgatatttccctggaagatatacagttggtttatatgccgtctaatgatagtactactatttgtgcacgattgttagacgggatgtggaaaagcgcagacatctcggacgtgagcgtgatgactcgtgaataccgggctaccgaggcttcagcacgttccgtcgaatctatggtcatcagtcgtgtcatc

SEQ ID NO: 644837 - DNA, 754 bp, Homo sapiens
  misc_feature (5)..(5): n is a, c, g, or t
  misc_feature (8)..(8): n is a, c, g, or t
  misc_feature (568)..(568): n is a, c, g, or t
  misc_feature (618)..(618): n is a, c, g, or t
  misc_feature (631)..(631): n is a, c, g, or t
  misc_feature (637)..(637): n is a, c, g, or t
  misc_feature (674)..(674): n is a, c, g, or t
  misc_feature (684)..(684): n is a, c, g, or t
  misc_feature (699)..(699): n is a, c, g, or t
  misc_feature (723)..(723): n is a, c, g, or t
ttccntgnggatcctccgggctttaggaattcggctttagctgattctttcaaactggaaaccctgaagctgagagcccagcatggttcctggcaaacagcaggcactcaaatattgattggtttactgtatgactagtagagaccccaacgagcaaaactgtggcctaataaaattctggctcctctcccagacttcccctccctttgagaaatgccagaagcttcttagggaggctcttgccaacctagacatcacaggcactcatggggcagctccagcctcttcctcctgtcatcaccataatgcatccatatctacaatatggcaaatttcatatccttccaacctctttcctgcattattgatgggctgtgtgcactttttaaaaaatcaattagatcagggcgtggagctggagttcaaagaagcctttaaaagtctgctcttctgttttgctgttttgaataggcacagataaagctttccctctggtttgaataagccaagctcagtgctaagttggctctgattggccaggactaggtgcggttaagatgcaaacacnaagcaatataacccagtatctctgtggccattactaaagctaagcagcangacctggagcctnctgctntggagtggtcttcaatactgctgctgcttacgcgccnggcttggaanggctgtgaggagaangcaaggtagggtcttgattacggnggcattgcaagtaatcctctgaatgaggagt

SEQ ID NO: 644838 - DNA, 522 bp, Homo sapiens
tcggccctcttgatgcaagtgtcagtagctcgagactagccggtgtattagtcagtgttctctagcatagaaggattgcttgtggccagtagttcgagactagcctggtgctattagtcagtgttctctagagggacagaagtaacaggatacatgtatatataaaagggagtttattaaggaatattgactcacatgatcacaaagtgaggtttcacaataggccatctccacactgaggagcaaggaagccagtctgagtcccaaagctgaagaacttggagtctgatgtttgagggcaggaaccatccagcacaggagaaagatggaggccagaagactacatcagtctagtctttccatgttcttttgtctgcttttattctggctgtgctggcagctgattagattgtgcccaccccgattgagggtaggtctgcctttcccaatccattgactcaaatgttaatctcctttggcaacacccttcaatccaatcaagttgacactttgcatccagag

SEQ ID NO: 644839 - DNA, 449 bp, Homo sapiens
caaggtttccttgaccaggttgcccacaagttgccctttgcagcaaaggctgtgaaccgcgggactttaaagaagatgcggaaagatccagaggaaagagaacgtaaccaccagaacccctggacattttaaggaatagcccctgccaacatgctgggcatacggaaagtactgaggccatatgacttgacccccaaggggaaatactggggcaagttttacatgccccaacgtgtgtagtgagtgtaggaaataactgtatatagggtactgaaaaaaggattttgcatttttattccccccagcctaccccctgaagtttttggggaggttttaagccataactaaggagcagcctttgagtagatttttgaaaaacaatgttatttgttgatttaaaaaaaaaactggatttttattaaataaaatttaaacctcccttcagggca

SEQ ID NO: 644840 - DNA, 980 bp, Homo sapiens
tgggtggggggggaaaggggggaaagggggggggggtgggaaacttttttataaaaaaagggggggggggggggaaaaaaataaaaaaggggggtgtaggggggctggcaagcgcgagggaggggttattagcgtgtgacctaaattatcataaaaaaggagggtgagcgataaaaaacagaggtccctttggtaggaacaaagtatgtgtggtgtcgtcaagagttcagcggagaaaaggactgtgctcatatattgttgtgcgcccacgaaagaaagagtattagggggggagggagggggtggtataccacataatagatgtgtggggggtgtcagtcggctcctaaaaaaaaaaaatagggggaaaagggtgccggggggatttactccatgagtgtgtagacccccgaaaaaaaaagtggtggcggacccccctcgcgggaagaggaggcaacgagcggggggatccggggtgagcatccgccgactgggtggggagacaaaccaaccatctttggcggccgaggcggcacaaaggagggggggaaaaccaaccaagggggtgttctcggtcgtctcagcacaaaagcgggcggaagagggcataaagggcgcgccctcattattatgatggcgtggcggaccacaaccagagggcggcggggggaccccacaatcgaaaaggggtggggggacaaaatgcacagggcggcaaaagagggcggagttgggattaatgctgccccccgcgataagaagaatagttgaagactggctcgacaggggctgtccaaacaacagggcggcgaggtggggcgaacaaggaccggcacatgggcgggggctcccaccaaaacaagcagagcaacacagcggggggaatcagaactgatatctacgtcgcgactggactggtgcaaacttcacaggagaagcccagcgcagcggccgtataactaaccatgcgaaatcacgct

SEQ ID NO: 644841 - DNA, 608 bp, Homo sapiens
ctgtagttcaagaccagcctgggcaatatactatagcaagcccctgtctctacaaagaacagcttaattagctgagcatggaggcatgtgcctgtagtcccagctgctcggagggctgaggtgggaggatcactcaagcccaggagttcaaggctgcagtgagctatgatagcgtcactgtactccagaatggacaacagagcaagaccctgactctttaataatattcaaccaatgggacacttttcatttattcaccagggagcttttggccctggccacgagccaggcagaggtcggagtgcttgggatacgttagcgaacaaaccagacaatggctccctgccgttgcgcagctgacattgtaatgagtgtctgagtaggagtgaagatattgcccgttttgatcccagagcggcataaaccaaatgcgaaacataagtcgcgtagaatatacagaatgaagtctgatgtcagtctgattgagatactagcatttggcccaagacctgtaggtagagagagagcatgctaaacttctatggcgagcctggcagggacgtcctggggaccagacttcgaggccttcgctgatgatgcacacccgc

SEQ ID NO: 644842 - DNA, 1199 bp, Homo sapiens
gggagtatttaatcaggtgtggctatctgagaaatcaacttcgggggaaatgtaagattctgagctctctctctgtattgttctagccatgaatttgcctgcagaaacttgtaacctatgtgcctcaatatattccatagacacagtaggatccccctgccttctcccactcctcacacctcttcctaccagcggcataggccttctgcacaactactactcagcatacaatccacccgctcccatcgctccactcctacacgcgttatccaactctgcgaagcgtcgcccaccccgactgttcgccctcacccacgcgtccatgctacctacgctcgcccgtctacccctctccctcgtcactacagtaacaacttaacaccgcaccagacactggccgccaacacgccgcctcctcacctgtggctccacatccacctacatgctccagccagcctttctccctacaccactccctctctcaactgcgttcaccacaaccagctaccccacaaaacacaccactgaccctgcgaaacactaccttcggcgctcacctccactactaaccctaatgttggttgccccttactccatttaaactaagccacactgctcaacaattctacacactaacgccgccataaccatctctgtaacttcacctggagcacacgctcagacaaccacctaccatcctgcctgcaccacctgcaagctgcctcacacccgaactcgctctactacacccggcctggtaactctaccccacactacttcctacattcctgcacacgcatatccacataacctaaacaaacaagaacggtaatatttcacctcctacacctgacctaaacttcatctcccccctcacatctacctctcctacaccatcaccaccaactcacgccaccccaactcatctctatcacaccctatactctcttaacttcactccatacctgctctacctaccaccctcccccccaccccccctcctcgccccccaaccgcatccctcacccccacaccccacctccccccatcaccccacccctcccccctcatccaacacccccccacccccaccaccccccctctacccatccaccaccacacacaccccaaacccccactcccccccccccacaccccccacaaccataacacacatcacactcccccccccacaccta

SEQ ID NO: 644843 - DNA, 745 bp, Homo sapiens
cgttgcccttgctcttgagaacctcccccgcagttgggcgccggtttatttcacaaccgggacggaaattctgtttccccgcgcccccccccagtggttagaccagtgctatctcccggggacataataatatttcgccagctagcttcccgcgcacaaagttcttctacaacagtagtacgctgtaaccagcgggagaaaagcatatcgctgcactagaatgctgggtaaccaccaacgtcattagttgtgccacaacatcagaggccccaccttgtctattaatgggcggaccaaagagagcgggggtacaaatgctcctacctcggtccacatgccgcccgctccaaggactcctgacgacgccctttatagtcacttgtcacacaaatgctccgtgcgttgtttgtgccccccctggcaatattttatatagaaacagaaccaccttttagatccatgggtgtagatcgcgacagccaccgagagtgcttccacgcaactcgtgggagtatttccgccgaacatgttgtgtcgtcacctctgggacaccaactcgtagtagtcgacccgtcgggtcgcaagaaacgttactcaacaatgacagcgggcaaaatactagaatagacgacttccactagacaagcggcgctgattacacgcagtggtctcgccacactatttctcgccgataaagacctgtagcccgtgggagataataccctgttcccagttccacaaaaca

SEQ ID NO: 644844 - DNA, 167 bp, Homo sapiens
ctgatattctggcataaaaatgtgttacagttgggtgtggtgaatattttgtttggcatgaactcctgtcatacttttacacatacgaaaatgaaagcccagagaggggaaatgaggtcgctgagtcacacagtaattttctgttgctctggattccagtctggctc

SEQ ID NO: 644845 - DNA, 605 bp, Homo sapiens
tcgggcacaacctctcttctctaccagacaatacttttcaaatccatgaacgctctcctggcctacgattgcgacagactctgtcccaggatcagtggttctctcctccgtgagagtgaccttgctccacatccggaggggattccttgaggatatatcgcccagtctctcccccccagccctttgagggtcgacccctctcggagacttcctcgcaagcgccttgctgcctctctctgctggtgcggacctagggcccagctcttggcgggcacttctgcccagcgactgcgttatcagcagcagcccgccatgcgccacgcctgattgttccagctccaagagactaagcgacaaagaccccggctggggggagcgcggcttgggttgggctcttatcttccgtggagcttaggaaacgctcccacctcccccgggccctcgagggcccagcacggctgagcggctgaaaaccgtagccatagatcctgtccacctccactcccctctgaccctcaggctttcccagcttcctccccttgctacagcctctcccctggtttgggctatgtcagatcccaaaacatcctgaacctctgtctgta

SEQ ID NO: 644846 - DNA, 228 bp, Homo sapiens
catcatgaatctgcaaaaatcatttctgacattctgctacactttcggaatgtattaatctactagcccaggtttctttcctcccaccccctaatctcaatctgtagttatcctggtgtcctcagtgcaaacactttcagcatcattcagtccgcacatcattcagttctccattcaaccaccaacatatttattagcatcactcatttcataccagtcaaatatagg

SEQ ID NO: 644847 - DNA, 323 bp, Homo sapiens
atactctgcatatagctcagcatatgactgtacataaattatgctctaacagattaacttagccaaaaattttgtagagtagactaaagcttaactaagaacaattttcattctttgggaactacaataagtacgaacctgtgttgttcgtaccactggctatgtttctgagccaagattttttaaagcaattttcaactcacttttcagacctaaaaagaaaggctaaagcacacacacagtattttaaaaagtaaaaaacgaaagtaataaataaacaagaacttggctgggtgcggtgcctcatgcctgtaatcccagca

SEQ ID NO: 644848 - DNA, 112 bp, Homo sapiens
aagcagttatacagactcagaagttttgaaaactagcaaagaagactggatttggaaagcatggtctacaatgggtggtaaaattctgaagctatgaagaataacatgtttc

SEQ ID NO: 644849 - DNA, 368 bp, Homo sapiens
  misc_feature (349)..(349): n is a, c, g, or t
tgctgctccctcttcacctgcactgctgccccaagacactgtgttttgacctgatccagagtaagtgctctccaaggagaacgcttgcacggacctcctcacataagctggctaaggccaacggggggggatgtgaaatgtgacatggaggtgagctggccagatggctatacctgctggcgtctacagtcgggggcctggggctgctggccttttacccaggcttgtgtgctgtgaggaccacattcactggttgttccgcgggtttacgtgtgacacgcagaacggtacctgtgaacagggggcccaccaggtggcctggatggagaagggcccagctcatctcagnctgccagagccacaagcct

SEQ ID NO: 644850 - DNA, 707 bp, Homo sapiens
ccttgtgacagtgtgccaggacttcgaatcggaggtaggtaggagagtttacctagacgggcgttcgccaattggtgaagctgaagctgacctgaagtgtgatggtcgtggcgtgaccttatccactgcggcaagatatagtgcgcaggggcggtcaggtccctcagtgcgatgctgtgatctgtgagagctggtgccacctctgtccgttggcttggtgcctgagatcctcagcaaagctctggcccacgtggaggcctatatcgatttcggcgaggattgacaacctggaggatgggggtcctgtagcaagcctgacatctgaagtacgggcactgcaggtggccctgtggtgcacatctacgatgatgccaggcgctgggcagagtgctccgctcaggggcgcacgtagtggtcactggaccccccaattgctgggcaagagcagcctagtgaacctgctcagtcggaagcctgtgtccatctgtgtccccggatccaggaccacccgtgacgtgcttggagaccccagtcgacctggccgtgatttcctgtgctgctgagcgacacggctgggttgcgggaggggcgttggggccccgtggagcaggagggtcgtgcggcgcgcccgggagagttgcaacttcctggcaccgtcgtacctctgtgggagcccagagccccagttgacagcgtcagggcctcct

SEQ ID NO: 644851 - DNA, 333 bp, Homo sapiens
aaatttcaacttttcctttcaaaggtttttattacccaagttttttcccggccattccagtcaaattgggggtcattccccccaggggggttttaaatccctttccaacggcctaaggccctttgggtaaggggttttaaaacggtccttttttttttttaacagggttttgtagatttcaaatgactatgcaagggcctgggggccccctggttttgggccgggcctgggggtccgaaattccaaggcccaaacttggggggggggggggggtttccaaaattggttgtaaaaactttggatattgtttgttttaacccaaacagccctcca

SEQ ID NO: 644852 - DNA, 1256 bp, Homo sapiens
tgattcatggcaaccctgtggaagttccaccaagaggacatctgtcgccaaatgtgtaagcctctcgacaaatttgtccggcctattactttccgagagcctggggactttccctataataatggagactctgggcacccgaattgtctatcgtgttaccccgttcctgtgggggtcaggaaccttgtgtataggggaaaggggactccaattttcttccaaccccgtggggttccacaagtacaccccccagttggtgttcttgtggacgtgccccgtgtttttcgggacccaacgttaaatgtgcccccgttcaaaacagcttggtgtgacccaaggaattttgcccgagagatggtctaacgaatccacccgactgcgccataccttttttgcaccgggcactggtgtctgcccaagcccaagatattccctcgcgaatagtttccaacccggcaattctcggtagaaggtaccttttgaatgtcagcccctgttgcctgccccgtgcccattcaccacatcttgaggatcccttcccagttcacaatggttggctcgcctcttgatatctgggagaaaaccttatctcccccgaaggagagaactgggtttctcccccgaggccagggtgagcgacggacccttaccagaagcgatgcccgcccaccctttggggcttccatccctgggatgacacgtgtcccttgacacacacatcttgacaccttctgggaagagagattccaccagaaacccggtgtgaaaccccacaccagagtggctctcacccaggaacgccagaagatagggcccagaattttttggtgtgaaaagagctggagccacaccagaaataaaggcgcgcccatctcatttctttctgtgagaggcggacatcccacagaggtcagactggagactggattgtcccaacatccacatggcccactgcccgagggatgtgcctcggatcggaacttgcgcccaagactgggaagactcccagaagagaccattgcgttcccagactttcacagctttcgggaccatcacctacctgccaacggggccaatccgtgctcctcccagctgcccccagatgagggccccaccctgcctgcacactccgcgggctgactgggcccccagccccgatgatttttaacacagccttccttttgctcccacccccagaaatcactgtgaaatttcatgattggcttaaaatgaaggaaataaaggtaaaatcactt

SEQ ID NO: 644853 - DNA, 114 bp, Homo sapiens
  misc_feature (80)..(80): n is a, c, g, or t
aacctcttggtcagctatataccgccatcttcaggcaaaacccctgaatgaaaggctacaaagtaagcgcaagtaacccnacgggtaaaagaaaccgttatgggtcaaggtgta

SEQ ID NO: 644854 - DNA, 365 bp, Homo sapiens
atcccatccccccttgtggtctcagcccgcaaagccctcttcacctttgctccctgctttctccaggagtagctcttttctcatctagatcagtttcttaatttttaacatgcatacagatcacccaggggtcttgttaaaatgaggattttaattcagtaaaatctggagtgggatttgagattctgcatttgtaaaaagttcccagtgatgttgatgttgctggtctgtggaccacacatcctccagcaaggaactagtaagacagtggttgtgtttaatagtttgtgccaaaatgaaggaagactgtgaccacaaaaaggggccaggggagggagacaagctgtgttaagtggcctcaaact

SEQ ID NO: 644855 - DNA, 230 bp, Homo sapiens
tcgagaagcgccacaagtaacatgtctgtacacctgttccccctgcttcagagtagcttccagatccggtgagctactcgtcacagtggtgcgattgtcggcctctgagcaaggacagtgcgcttcaacgtgctcaaggtcaccaatgctgccggcactcgatagaaacagttccagaagttctgaggctggacatcggcccgttccctcacatagttcagcgtctgaca

SEQ ID NO: 644856 - DNA, 185 bp, Homo sapiens
gatcccccgttctgtccgaggttcgaaattattacgcacagtagactattgcactggtgatggaaagagcatctacggtgagcagcttccccgatgtagaacttcaaactgaagcactacgtggcctggctgggtgagcatggtcaacgcaggcaaagacaccaacggctcccggtacatgcaat

SEQ ID NO: 644857 - DNA, 175 bp, Homo sapiens
  misc_feature (77)..(77): n is a, c, g, or t
  misc_feature (98)..(98): n is a, c, g, or t
  misc_feature (107)..(107): n is a, c, g, or t
catagcgacgggttccagagtgttatggcacggattatcattctctaaattcttacaaaagaaagaacagtgggganaaagatgaggaaagcagaggngaaaggtangaaataaagtaacatgaatttaagtcattttcccccaaagtctcttaaagtatttaaatctctaactg

SEQ ID NO: 644858 - DNA, 364 bp, Homo sapiens
tgagacggagtctcgctctgtcacgcatgctagagtgcagtgatgctgtcttggctcactgcaacctccatctcccaggttcaagcgattctcctgcctcagcctcctgagtagctgggactacaggcgtgcgccaccaggctcagttaacttttgaaccttttttagaagagtgggggtttcaccattttggccaggctgtctcgatgacctcaagtcttctgcccgtctcagcctcccaaagtactgggattacaggcacgagacactgcacctggccaccttagacacttatactacaaaagaagaaagaccgaaaactaataaactaagagcaaaacttcaaacaaacacaaaaaaaaaa

SEQ ID NO: 644859 - DNA, 646 bp, Homo sapiens
atgaccccaatacgcaaaactaaccccctaataaaattaattaaccactcattcatcgacctccccaccccatccaacatctccgcatgatgaaacttcgggctcacctccctttggcgccgtgatcctccaaatcacaaggactatcctagccagcatatcaccagagcctcaaccgctttcatcaatcgccaatcactcgagagtaatatggtgaatcatccgtaccttcacgccaaggcgcctcatatcttatctgcctcttcctacacatcgggcgaggcctatataggatcatttctctactcagaaactgaaaatcggattatcctcctgcttgaactatagcacagcctcataggctatgtcctccgtgggcaaatatcattctgagggcacgtattacaaattatatccgcatcccatacatggggacagacctagtcaagatctgaggaggtatcagagaagccacctcaagatcttaccttcatcactggccttatattgagctagagatccactcctttttgccgaaaggacaaaaacccaggatactccatccggaaaacttcacttataaatcaagagcccggtattactttctaggatacattaccaactctggccgaatttccgcacttaa

SEQ ID NO: 644860 - DNA, 1635 bp, Homo sapiens
gcacgtggtagatgagctgaaaattgagatcaatcgcgccaagcgctctaggaactgtacccatggatcgtttggatagactaacaggcgaatgcgggatgcactcgaaagcgtgcagtctcactagaagtacagtttgggcgaaccagttggaccaagatacgttggttatcgtaaagatgcaattcatggcagggctccttcagggctggctgcagacactctcacatgacttgcgtggcaggtgtgtggctgttggacctgtttacttctgccttaccattgagtggccaaagcaaacgtgtggttgcatcgatcacccgagagtcagcaatcgtaatgagtgcaaacaaggtactgccttgtgtgaaggtcgtgtcctggcgtggaaggcttccgtatcccgtgatgccagtggctgaaggcaatggggtgcaagtcgccaggtaggctgaagaggaggataagccaaacaaggtggcaatcccatcacaattgctgcacaaggacgggcatcgaggaagcagaagctaccgtacggcacggaagaagggacgggcggtcacagcggacagccagtcgacccgtacaagccgcatgcctgcaatcggaaacaatacgcggcgcgtagatcccgcacgtcagcacacatcctcaaatctccgtgccgcacagcgaaaccggacgaatgaccaccgaagagaactaaagactggaatggacgcgccagcgaccaggagacgacgacagcaacgccaaagggcttggacacacacacgagaacaagggcacagaaattgaacctgcagcacgaggtccaccaccaagaaaccaccagcaacgcgagacctcccaaaactgctgggcgcttaccgcaagtggacggggaccgagcgggaaaaggcgtgacccacaccaaacaaccgacaaagcaatgcgtagcgcactgcaatgaaccacgacagagaagatagagaaaccaataggcacccgaaccaacacgcacggagaacaaaacaacacaggacaatcgcacaccacacaacacatacgcgcacaccaagaccacccaccagccaacaccgagacgacactaacatcaccccagagaccagcgcagtcacatgtgacacaccacaatcgctgaacaagaagcagtagccccaccagacaaagggaccacgagcgagactagcaagccacaggaagaccacggcagaccagagccaccaaacacacgtcgagcacaatccatggcacgaaacagtggaaacgatcaacagaaccgcgacgatcacccaaatgtcatgcgcacgcgggcaccccccaatccaacaaactcatggagacaagcaggaaagagaaagccggacgaacacaacagagaccacagcacacaacaggaggcaaacacacgagcaagaagaaagacgagacagccgaaacggacaagaatacaacgacaagaaaaatccgagagcgaagactccaacaacacaggacacgccacacacaaaaagaaaacagaacgagaaaaacaacgacacgacgaggaacagacgaacacaagcagaacaagaaaggctcaacagcaaacggcatgaagacaacagagaagcgagatacacacgcaat

SEQ ID NO: 644861 - DNA, 277 bp, Homo sapiens
tgtggcaggcgtggaggccatgcctgtctctcagcttttgggaggcggctgtgcctgggaggtccaaggtacagtgagctgtgtttgtgctgctgcactccagcctgggtgatggtgagaccccgtctcaaacaacacaatagacaaagagggagcaaacacaggagaaagtgcacgccttgggatcatcccctggccctccagggatcgccctgttgtgcacgcagaatggaccccggcctgggtgcattttcacatttctgtgacgtcagtcctg

SEQ ID NO: 644862 - DNA, 139 bp, Homo sapiens
tagcaggtgtaggcccacacatggaaaaaataataataaaacaaagcaaaacaggaaattatggattttagttgtatattggtttatgtattttttcttaagtatacagtgcacggtttgaaatgtaatgttagagata

SEQ ID NO: 644863 - DNA, 142 bp, Homo sapiens
ccataatttccatttaagaccatgtggatactttaggatacggacctgaccccacattgccacagaagaaggggtcagagtagaaccacacaagttagcggtattctccacacattgagtctcatctgaaatactactgagg

SEQ ID NO: 644864 - DNA, 894 bp, Homo sapiens
aatgtgtttagtctttcttgattactagggtttaagtcattatatagtggaatcagatggtgtcatttagtaaggattgatgagttcttgttttgaaaatccagacgtttcttttttctacatgtgagatagtcatccattattaacgtggctatgtcgatttgcacgacaaaaattaaagactagagctaaaataatgcaacgcgaggcggagaatagaaatgcattacgacaagaagattctcctcatagaacatggatctgtgtcacagggaaaaaacctttgcccttgaaatttgcactagtgagactgtacaattaattgtgcagtgaataatagctattttggtgtcctaagacattgcttcattcatgactattttcaatgttatttcattactgtacatcattttcttaagaagagatgataccagaagaaatggaaaatgaatgccggaattgggtgacacgtgtgttatctagctcaaaggtacctagagtatgtggcaagacatataccaccaatagtgcttcaaagagattgcactttcgtatgttagcagcgttatctgtgtagtaaacttattcttaattaaaactcactcactgtttactacatgttctggtagtgcattctgtatagtgagtgtgaatacctcacatcttattccatgttagacaaatcacgatgtttctgttttaattctaacccacttacttcgtttgcaaattttttgcactatccttttcccgtcgggccatggcgtgccactagagcgtcacaaaagcggaatccaaagggggcccgcctaaataataaggagctagacgggccggcgttaaaaagatgggggcggcaccacaaaaaaagacctaaagcgcgccaggtgttca

SEQ ID NO: 644865 - DNA, 101 bp, Homo sapiens
  misc_feature (96)..(96): n is a, c, g, or t
tgctgtgtactctaaggatccggatgcagtagattcacaaagaaattgaataggctgaatcacttttgatcctggtagtattcagcatactcctgntgcag

SEQ ID NO: 644866 - DNA, 989 bp, Homo sapiens
agcggacggatcgaccccgccatcccgccgtcccgctcggtgaccgtgagacacagccgggaacgcgactgatcagtgctacctgagcctggtgcctgcagtggcgaaatgcgtgtgctggtccgagtgcctcagaaattggacactgcatgcatgctgtgaatgtggcgctgactcatccctggctccctgcagtcccctgtgcagctgtgtatgcagccacatgtggtgcttggctggctggtgcatatgcctccccgcgcaccatccgaggacaccaaacccgagacgcgacccattaagcccagcgagcggaagatcacaggagacgcagtgcggtgccgggctggggtgcattgccgaggacgcggcggcaagttgagagagcagtgaggtgcagagcgaagggagagaaacacaggataggggagataacaagcgggggaaggcctaagaagtgtggatggttgaaaagtgttgtaggtaaaaggtgagtgttagcatcgattggtggtagatacattgatttggtacaccaagtaatggattacagagactgagaagtggttgatatcaatgaacaaagtaatacgtaagttgtttgattataggctgagtgagccagtgagaataatagctgagaagataagtcaggagctaagttcggcaggcgtaactagcgtggactatgaacgcgagtagagaggatgtggatatagattgaagcaactggaataagatggagttagtgagaagagggttaggatggagcgacgttagacacggaaccgagagataaatggtacgactatgaacaggcgggtaccaagtaggaatttaagagagcttaagaccaagtaaagactatcaccaggcgagtgcatagagagagggttgtccagtcagcagtgccatttgcgtgaagtggcggctaagaaaagatacgagatagagcacacagcttgcgatataataaggacatcgcttat

SEQ ID NO: 644867 - DNA, 437 bp, Homo sapiens
ggaagcatctaattccagtgtgcatcagcacttaagcaatgacgtttgcatagatgatgaaatgattgacagtaagtttattgtaaatggttcttacagagtatctttaaaatgtgccttagtgggaacccttgtcccatccgtaacaatgtgtatctctgattaataacgctgccatgtcccatgatcatcacatcatctatcgaatgtcttccccatgttataaatgaggtcacatatgtcgtgtgggtcgatgaattctgttgcctccagtgaccatggggcccacacctctgcccagggatgtccttgcgtcccattgaggtcttcccgcaaggcctctcagacccagatgtgacggggtgtgtggcccgaggaagctggacagcgtcagtgggcctgctgaggccttctcttgaggcctgtgctctgggggt

SEQ ID NO: 644868 - DNA, 665 bp, Homo sapiens
  misc_feature (348)..(348): n is a, c, g, or t
gcagtggtatcaacccagagtggccattaacggccgggggagaagggtattcctttattaaaatcttcctcatttggatttgctttcagttggttttcaatttgctcactggccagagacattgatggcagttcttatctgcatcactaatcagctcctggattttttttttttttttccaaacaatgggtttgaaacaactacgggaatttgtgtccacaaataagcttggaagtttggtgtgtagtatgcctcaaatataacgtgacgtgtatactatagcgggtaacttttcaaacagcccttagcacttttatactaatttaaccccatttgggtgcattggangttctctctttaacaaatgctggtggtgaaagacacagattacccagtagtgcttaccggctgaaaggaacacggtgtccgtgttggtaagggaacttccaagttttggtcggtaacatactgggacagaggtggtctgactcctttaaacaacacatctctaatctcatcatttataatggacctaaattttattacatcctggaagtattaccccattctctcgggtccttagatttttccacaaggaaccgcgacccccgggggtgcccaacgctggtttggcttcaagggacacaacaacgattcttttatcg

SEQ ID NO: 644869 - DNA, 479 bp, Homo sapiens
  misc_feature (48)..(48): n is a, c, g, or t
tgaatgcacacgtcacgaagacgttcctcagaatgcttctgtcttgtntacatgtgaagaagattcctatttcaccataggcaataaagggctcacaaatattttttgcagattctacaaaaagactgtatccaaactgctcaataaaaagaaagttttaactctgttacatcaatggacacatcaacaagtagtttctcagaaaacttctgtgtagtttttatgtgaagatacttcctttgtcaccattggcctcaaagcactcctaatatccatttacagatgtcacagaaagagtgtttccaaactgctcaatcaaaagaaagtgtttaactctgtgaggtgaaagcacacatctcaaagaagtttctccgaaagcttcggactagttttcatgtgatgatatttccagtctaaccataggcctcaaagggctaagaaatatccctttccaggttctaaaagaccaccatttccat

SEQ ID NO: 644870 - DNA, 510 bp, Homo sapiens
cagaataattttgttgatttatttttactataaggagataagagaaaaaatagctcacttggcagcacagaaaatgaataccatatggcaatattaaagcagaaaataattcatttctgatcagtagtgctttcagttttcatcagaattattattattattattattttgccactgtgaaaaagcagttaagcatgtaaaacttccctttagagagggttctttttggatagatcaatctggaactagcttctttttttttttttttaaaatgatacttcggtaaacccagcatttacaccaagattggtgggcctttggtgggcccattaactggggcttcacaccgattctccttacgaatctggtgagacttctaatatcttttatttcccttctcaccacagttgatcccctttggctttccttttctgctctccttttcaccctattgggagaatggggttcccccctggtacctccacgcgggacaacagagcgaactctggc

SEQ ID NO: 644871 - DNA, 387 bp, Homo sapiens
agcgtatgcaagaaggtcgtgggacactcagcaagctctatggagaccataaagcactctaagacgttcgaccggggcaatggtctggaacactggaccttgtggagaccctagagctgcagaacctgatgctgtgtgcgctgcaaaccatctacggagcagaggcacggaaggagtcacggggtgcgcatgccaggaaagactacaaggtgcgaatggatgagtacgattactccaagcccatccaggggcaacagaagaaagccctttaaggaagcactggaggaagcacaccctgtcctatgtggaccgtaggcacctgggaaggtcactctggaatatagacccgtgatcgacaaagactttgaacacggttaccgtgacctt

SEQ ID NO: 644872 - DNA, 638 bp, Homo sapiens
gctggacagccgtgaaagaaatgggactggtctttggacaggaggatggctgtgtcccctcctgaggtcagagggggacagtgcttccagacagggcctgcagctgagcttacagcctctcctgacatggccacgtgatgattggtcatgccttctgatgaatggctatctgcttatgtgcctagatccaccagagttgtcacagttacaggccagttactaggaggcctcttctgaatgtgacatgggaggagggtctccccttttctcttggggagatactgaggtgaaataggcctgcaccagccaatacagaggcagcaagtagggtcctgaagacactcacttggctgcaggagagaccaggggtttcctccagctgcctggttggtgctgctctgagaagataccaggctctgctctggtggcttcagggaggcaacctggacacagccagcagaagcaggtcatcgatggaggggtcagcctacaaggacacagcaagttcatgttcttggggaggtggagccaaggcacttggtgcactgcaaggaggtcagggaaacagagacagagaagctgttctccaaaattcagtgaccacactgtgttcctgcagtgaagtgtctctcagaatg

SEQ ID NO: 644873 - DNA, 367 bp, Homo sapiens
taggtcgcaacacactccataacctgaccttagaggcatggaggacactggggccatcctgtcctggcacagctggccaggccaccacacttgcttctctggtatacgccaggagcgctatgcccgatccatcatcatcggtggaaagcacataaatactctgatctttgccttataactaattatttacattgaatattttttacttatattagattgccttacgactaagttatgttacattgaatattttaaaagtatgtttcatcatttaagcattatatttgtttcttttagtaaacttttaagtggatgtcactatgcaagagacacacagtaaaaacataccgtcatacattcctttcct

SEQ ID NO: 644874 - DNA, 125 bp, Homo sapiens
ggttcgcgccgcaagtcgccgtgggccggttgaatcggttcttcgctgagcaaacggccgagacgctccgttgccgcgcgcacctcttcgtcgagtccgcgttcgcgagccgcttcgatcattcg

SEQ ID NO: 644875 - DNA, 415 bp, Homo sapiens
tcaccttgatgtaaatctccgtaccgtacattttgatcagatagacgtcctgccttatccggtggtctgcataggctgtcattgatttgtacaacattcgcgtttcaagggcgcagaccgccaaccgcatctggccgatgctcaattcaagttgacgagcgccctcccgcgcagttgccgtaaaggctctgaggcccagccggatgacttgcgccttgatcaaggccagatcgtaatgaggtgtgtacttttccataagacacctgagtccaataattaccctctgagggtaattttaccaatcgaaaatactgctcctttccctgcctaaaaaccctagtgcgttgcctttgtaggcgactcctaataggctgtaggaaaattcatcctatgattggacgaaagcgtaaagccc

SEQ ID NO: 644876 - DNA, 152 bp, Homo sapiens
atcccggtcatactggaccttctcggagcgagagagcaggttcaccatccgcttcttcacacttgcagcttcttcacccatttctcgtctctcatctacatcgccttcatcctggtccaggtgcaggtggccttatgccttaaatcccagca

SEQ ID NO: 644877 - DNA, 163 bp, Homo sapiens
cacacagcactcagggcgcaaggggcctgcggggtcattcgcatgtcgcacagcctgcagcactcagttccggcctccccgttcggcccaggtcgcacagggggttcgcgttggtctcatgctcagttgtggcagcatccaatccatcattcatggccccagg

SEQ ID NO: 644878 - DNA, 514 bp, Homo sapiens
cacgaggcgtcgtggcgctgagcgtcgaacatgcctgccgcacagccgttatacgcaaactcacgctcgacgacatcgacctgccgaaccggcggatcacccttgccggacacaaccaacggctcggtgagctcacccacatcgcgctgaacacatggctcgaccaccgccgggacagatggccccacactccgaaccggcacgttctactcacgacgaaaactgcattgcgcacaacgccggtcagtcaaaaatcggtgaaaccatcgttgagcgacaatggattcacgatcgaacgcatccgtgccgaccgaatccttcacgaagcgctgaccgcaggcccggacccactgcacctgtctctcgtcttcggcatctcccacaacaccgcacggcgctacaccaccgtggccgaacggctgctcagcgacgaactcgagcagccggtagaaccgtagtgccacccaacgccgccagactcagggcccgcgaacccgccgcagttatgaacctt

SEQ ID NO: 644879 - DNA, 155 bp, Homo sapiens
taggaaggaatggtaggtagtaatgataatatataaatagtaatataaagaaaggttaatgtaagggttggacggtagaactgctattattcatcctatgtgggtaattgaggagtatgctaagattttgcgtagctgggtttggtttaatccac

SEQ ID NO: 644880 - DNA, 328 bp, Homo sapiens
ggatgggggctctgctgtgtgtccgcctctatggggctgtcaggcggtagctactgcaccagccggtacgtgatgtacctgccacccgtctcactgcggccggatgatcttcaccacctgcccacgctttatccccaagtagcgcgccatagggtcccccgcctggatcctgggcaggtggttctctcgagagcttatatcgccgccagtcagctctgtcaactcctccttggtcataaccacgtgctcagggcactagctcgtgctccgtgatgttaatcatcagctcctgctgcagatactgctccaggatgtacttgggggccat

SEQ ID NO: 644881 - DNA, 590 bp, Homo sapiens
ttgagtgtcaattagcgcgatgagtagggctgtaactagatatgttgagtcactgctagagtacgatcagtgatatgtcgcatcaggagaaccgtggtcactagacacacgagagttctcccagcccggttaatcacgtgggcggagtacaggcgacgcgttagcgcaaggcttgcatagaccattcagtttggccgcgtcctgggccccagtcaggtacactgaactctggtcttcagctgggtcctatagtacgatcccggtcactgacgtagtgcttgcacttcctcaccctatatacaccacacaccgcccggtggccaacctgaatcgcttctgaaatcaaattccaggaactgcgcaagatcttcctgaaaggaagtccaattgtaagcctgggaagctcttaattcaacccccagtgcaagtgtaccaaatagccgggaagaccgccggaataacttcaaacactttaccggccttctgaaccacgggaagtgacgcttgacaacaagttgccaccacgactaacacagtactatcctcaaccacacacccatagcaaaacattgatgtatggccacgaagca

SEQ ID NO: 644882 - DNA, 187 bp, Homo sapiens
  misc_feature (1)..(1): n is a, c, g, or t
ncccccccccttttttccccagttttggtcctggccaggccatgtaaaaaataacccctgcccccaatttttctccccttttttccttccttcctacccccttttccctctcccttcccctgactgttcccccccgggggggggaacttcccctagccgtgccccccgtttttttttttaaaggaat

SEQ ID NO: 644883 - DNA, 595 bp, Homo sapiens
  misc_feature (595)..(595): n is a, c, g, or t
aacgaagatagagaacacgagacagaaggagtttcggcatgaaggagcaggatctgcaaagctgaaattgagaatgcttctgtgagaagggcagaagagaggtgtgggaaatggaactggatagactcaaggaatcatggatggcgaactaaataggaacaggttatggaagagactgaacgggcctggaaggcagagatcttatcactagagagcctggaccatgagttactggtactgaaactagaagacgccgaaaacgaggcagaactcgagccttagcttacctcaagtcaactccccgaacactggagacagttcgttccaaacaggagtgggagacgagactgacactggagttcggagtaatgaccaaagacatgttcgctagagcagacttgtaataaggtcatatccagcttagtgaggaaacggacgcgccagtcctgagcagccattcctcaaatccctacatcaacgaatattagcataccagacacatcagagtacagacttctatgccttcaggtgttacaaagagcagtccctctcgtggatcctcgggatgccctgtctcgattgaggaggtcacgan

SEQ ID NO: 644884 - DNA, 559 bp, Homo sapiens
ggttgactgagaatactgagtaagatataagacctaccaggaacctttaggaatatgctctgctcggtgtggtttgtctgctctgtttgccgacggagtctcgctgtgtcgcccgggctgcagtgcaattggcgtgatcgttggctcacagtaagctccacctcctgggttcgagcagttctcctgcctcagcctccctgagtagctgggattacaggtgcacaccgatcatgcatcggtctgatttgattctattgtttagtagagcatggggtttcaccgtgttggccaggactggtcatcgaactgcgtgaccgtgcatggatctgcccgccttggcctgccgcaaagtggctgggattacaggcgtcgagccaacattgcccaggtaaaactgtgtcttataacggagacgatggaggcagagtcgtgatcccagggctgaatcttccaggcctatggcatagactcaggaggcgtcactgagagacaggagcatctgcccatgacctgtatcccgacgtatctccaagttccattaccatcgcacatgatccaa

SEQ ID NO: 644885 - DNA, 339 bp, Homo sapiens
ttgtgagaatgaaattatacaatgcatttaaagtatttagcagccaggcatggtggttcatgcccataatcccagcactttgggaggctggggcaggcagagagcttgagcccaggagttcgagaccagcctgggcaatatggcaaaaccctatctcttcaaaaaatgcaaaaaattagcagggagtggtggcgcacacctgtagtcccacctacttaggcagctgagatgggataattgcttgaacccaggaagcagaggttgtagtgagcagagatagtccctctgcattccagcctgggggatagagtgagaccctaccacaaaaaaataaaaatt

SEQ ID NO: 644886 - DNA, 587 bp, Homo sapiens
acgattttcattggatataaattggtatcgaaaaaaacttcaacagttaaagtctataattttatcctatctcctcggtgcagcggaacatttcccttatctcatttctcctctgaatcaagaatggcaaagcagtaccttcggtagcgcggtcctcatcttcaagctcccagtctcttggaccagtccatctctacctcggggctcccagaccttttatgaagctacgggagagatctacttactccacagcaaccacagtcctttagaaccaaaccactttgggtgggctcataaaaacgacgggggtgaaggatgtgggagtggatacgcactctcaccttctgactgggttaagaggaggatgatgctggtaccacttctatgtcccagacaccaaactttagcatcgggacatgattaaacattactcctcagaggagtctcccctggccatcccatctgtagccgcctatcctttatcggagcacaccaattccttgactggacttatcacagcatgtgttgatttaatgtctggttccttccctaatctgtaagcacgatgagggccaggacttgatctg

SEQ ID NO: 644887 - DNA, 537 bp, Homo sapiens
gaggctgaaggtcatatcaagaatgcatcccatatacaatagctgcaaagaaaaaaataaaatacctaggaatgcacctaaccaaggaggtgaaatatctctacaggaagaactacaaaacaccacggaaagaaatcggggatgacacaaacaaagggaaaaacattccatcctcagggatgggaagaatcaatatcattaaaagggccatacgggccggagcaatctatagattcaaggctattcctagtcaaactaccaaggtcatttttggtagaactagaaaaaaactatggtaaaattcatatggagcaacaataacaaaaaagcccaagtagccaaagcaatcctaagtaaaaagaacaaagccaaaggcatcatactacccaacttccaactatactacaaggctacagtaatcaaaacagcagggtactgggtacaaaaacagacacatagaccacgggaacaaaatagagaacccagaaataaagtggcacaccggcagccatctgatcttggaccttcagcctcagg

SEQ ID NO: 644888 - DNA, 247 bp, Homo sapiens
caggatcccccccagcttttatgcattttgatactggataagtcacaacagcgcactggttcagaagcgctcattacctttttgatgtgcaacggaataacattgctatagctttggaagttacttaccgggaacgactgtatagagtatataaggaagtacagaatcgcctggactatcattatgtctcttcatgaacactatgcgtcgaatgggaactcgaatctacatattcttttgggtgggg

SEQ ID NO: 644889 - DNA, 1219 bp, Homo sapiens
aatttaaagtggtctctattcgaagtctctgctctttcacttaaacctttactctaagctgtccccctccactaatgccccccatctttgggagatgctcttttcctagttaatttaaacattgctgcgtttgcttagagagagagagagagagagagagaagagagagagagaaaggggaaaataataggaaaggaaagaggagggggggagagagaaaggaacaaaaaaatcttaaaaaggattcttagccaggttcctaatgttgctcctagcccttccacttctcggtgtgtgtgtgcgtgtgtgtgtgtgtgtgtgtggtgtgaaaataaaacatgcataaacttttggagcctctctccctcttctaggctcttctcccaacctctcttcctgctctcccttgccctgctcatcactttcccctgtttttttttttttttcctcccttcctcccctctgcctccctccacctccccctttttcttttttgctgaatcttattgatccagaaggtggctaattagcccttcccgtcgtgcctgggtaatgaagcacatgcggcactgaattaatcacagccattttttgcaggaaactaattagcagaataaagatccaaagacttttttttcttttcactccatcagctcccacttccagcgcgtcccctccgaccgctgcaggcgccaccgccgccgcctcctcctcctcctcctcccggcccgcagccgccgccgccgcctgctttgtatcccaattacagcctagagccgctgccgccgccgccgccgcttctcttccgttggcccctgcccgctccgggggctgtaaactccccgccaaccatgctgctcggcggcagcggcggcggcggctccggctcccccggctgcggccgcctcccgccccgggctccgccgagcgcgctccagctccgccgccgccgccgccgccgccgccgccgcccagcagcgcgtcctccgccgccgccgacccccgccagccgccgctgctgccttgatgggctccgcggcccgagcgcctctttttcgggattaaaagcgccgccagctcccgccgccgccgccgtcgccagcagcgccgctgcagccgccgccgccggagaaagcaaccgctgggcggtgagatccccctagacatgcggctcgggggcgggcagctggtgtcagaggagctgatgaacctggggcga

SEQ ID NO: 644890 - DNA, 669 bp, Homo sapiens
agaattcttgttgctaatgacactggcttcacagtgtcgcaacctggaaaggagaaggccctgatggaaagcagtcgccactgtggggcccatctcccttgctatggatcaaggccctatcgtccttcccagttctcaccaatcaaggccatttattttgaacccagactgcagccagccaaaacctggatcatggttttctggtggttggctacggctttgaaggacgccaattcgaatcaccagccagtattggctcgtccaaaaccagctggggtccccagaatggggctcgaatggctatgtaaaaatagcccaagaccagaaccaacccctgtggaatcgcccaccagcagccagctacccccatgtgtgagctgatggatggtgaggaggaaggacttaaggacagcatgtctggggaaattttatcttgaaactgacccaacgcttattgtgtaagataaacccgttgaatccttgaggatcccagttgagattttaattctgtgacatttttacccagggtaaaatgttacccctactttaattattgttatacccagctttatgatatccaagactccttgcttaattctaagacttttgaattttcattttttaaaaagatgtaccaaaccgtttgaaataaattttaattcgtatata

SEQ ID NO: 644891 - DNA, 181 bp, Homo sapiens
cgcatgatctttctcatggtgctgggtgctacgcgtgatctccttctgcatgcggtcggctatgccagggtacatagtggtgccccggataggacatgttagcatagaggtccttcctgatgtctatatcacacttcatgatgctgtggtaagtggtttcatggatgccagcagactccat

SEQ ID NO: 644892 - DNA, 220 bp, Homo sapiens
  misc_feature (70)..(70): n is a, c, g, or t
  misc_feature (93)..(93): n is a, c, g, or t
  misc_feature (145)..(145): n is a, c, g, or t
  misc_feature (187)..(187): n is a, c, g, or t
ggcggctatggtataaatacgcctcacactcagttctcaaccccctggacaaaacactatagcctacccncttccttgtactatccctatganggcataattataacaaggctccatctggcctacgaacaaacaagacctaaanatcgctccattgcatacctcttcaaatcagccacaatagccnctcgtaagtaacaagcccattcttcatccaaaa

SEQ ID NO: 644893 - DNA, 492 bp, Homo sapiens
  misc_feature (41)..(42): n is a, c, g, or t
  misc_feature (190)..(191): n is a, c, g, or t
  misc_feature (208)..(208): n is a, c, g, or t
gcagttctgatctattctaggtcagtggttcccaaaggagnntccctggaccagcagctgcacatcacctgggaacttcatggaagggcagattctcagccccaccccagacctactgaatctgaaatcctgggatggggcccagtaatctgtgtttgacaagccctccagtgtcaggggtgggcaaatnntctgggctcactgccantaacaaatggttttacatttgtaaatggttggaaacaaatcaaaacgaaaaacaatcttttgtcattcatgaaaatacgaaattcaaatttcagtgttcgtaaagaacacgttactggaacacagccatgcctattgacttctggattgtctgtagctgctttcagactacgatggcagagtggaagcattgtgacagttgtgtggcccaaagagcctagaatattcaccatctggccttctatggaaaacgcttgttaaccccggctctaggtgattctgaca

SEQ ID NO: 644894 - DNA, 178 bp, Homo sapiens
tcagacctggggtggggacggacgtggggggtccaaaacaatattgtaacgactcgataccttgccttccgtgggggatgtgaaacagacttggatcccatgcctgaaattcggtggcggatgcacaacaatcaaatgaccgtgggatccacaatagggtggggtcccacaccgttga

SEQ ID NO: 644895 - DNA, 204 bp, Homo sapiens
actctaaggatcccgtgatgttatccccaacacctgaaaacaggatgaaagcctgtttactgcaattccttttacccagtgtatcatgtctacctatcaacagaaaattacaaagcatacttaaaaggcagaaaatgcagtttgaagagactgaacaagcattagaaccagagtcagtcgtggcaggagtgttgggcgataaca

SEQ ID NO: 644896 - DNA, 167 bp, Homo sapiens
cccatcagatggtaagcgtgacagaatatagacatgcaaaggtcttgagatgcaggaagtagacgagacccacaaaaggcattcattgcgtcaagccttagcaagacatctctacattaacagagaaggactttaacacagctctggactgggcacacattatggag

SEQ ID NO: 644897 - DNA, 239 bp, Homo sapiens
aaaaatttttttttccccaaagcccccggccttttcaaaggggggcctccgggtccccttaaaaaccccccgggggcttccattttggaaaaattttttgccaaccgcttgggtgggtgggccaaaaaataggcctttttttttttctggaaatttggtttaaccttttactggcccaaaaagttgtccccttctggaaatgggttttggttttttttcccattaacccccctttccca

SEQ ID NO: 644898 - DNA, 1759 bp, Homo sapiens
ggcgtcggtatggtggtttctccgtggttcctgggtcgtgtgacggatgtagttgggtttgggtgggttggtgtggtgacctctctgtagtttgctggggtggtcagatcgacgtgtgtgacttggttgtgtcgtgtctgtgtgtggttgtgactccctgttagtggtgcccgacgggtgtgttctctccttgtatggtgtgtgccactggggtctggcggttgggtctgggtattatacgcgtcgtggcgtagtgtgttgtctttctgctgtggtggtgggtgtgggatgtaggatgggttgttgtgtggtgttgcttgccacacagccagcaccgaggtgtggtaggtggtgacgagaccgacggacggtgggtggatgagtaagtgatacggcgggccgccagcaacgagtagggagaatcagtaggtgagtgggggctacgcacccccttgggtgggtgagcgcctacgtgtgagtgcggcctttgttggttgtgtttgtgtgtcctctgcgtcggtgttgctcactacttggtctgttgatatgtgcgcgctcctcggtctgcttgtgcgaggttccgttcggtttgtgttgttgtgtttctcttctcgcttgtttgttgtgttggttgtgttgttgttgttgctcttctgtttggttgcgcgctgcaaggtgttgtgtgtgttgtttgttggtggagtgttgttcttctctgccactgttgtgtttgttgccgcttaggtggggttggtggaaggagggggggggggggggaggagtggggggatgggttcgccccgccggtgggtggaaaagcgcgtgcggccacacacggagggtagagagaacagcataaacccacccgctagtgtgtggtggtagagaggagaacacacatcatcagcacgcgcgtggtggaggtgtgcgtacaacacaccaccgcagtgagtagagagcgcgcgcagagagagagaggccccccaccacgtggtgtgagacacacccaaaaacacgcgcgcgcgtgggagagatacacacgccgcgcccgcgcgcgagagatatatatagacgcgcgcgcgcgcagagaggtggtggcgacgagagcgcgcgcgcgggtgtggggcagatagtagtgcgtgcgcgccgcagccgagagagatatcgacagcagcagagagagagaagagagagagagagaagagtgtggggcagcgagagagggcctccgcgcgagagcgcacacgcgcggcgcacagagcagagaggggacgacacacacaggtcactcagtgtgctgcgcgcgcgggtagagactacgctgtgtgcccacgcgcgcgtctctgtgtgtgagagatataaaggagagaggtcccccagcagcgagagaggctcccacacaccgcgcgcgggtgggggcagcacacacaaaacacccccccacacacaaagggagagggcgcccgcgcgtggcgccgcgcggggcggtgtggtgtctcccgatgagagaccccaccggtgtgtgggccgcgcggcccacacaaagggggagtgtggaaaagaggtgtgtagaacaccgcgccccacgcggtgccaccggcgcccacacaccccaccccccgggggcgcgcccacccaacacacccccaccccccccacccccgagatggcgtccccacccgcgccccccccccccccccgcgggggggagaggaacccccccgcgggggctccgtggccccccccggggacacccaca

SEQ ID NO: 644899 - DNA, 233 bp, Homo sapiens
gcgtttgtgtctcatctcacatttaaaaataactcctttagacaactaagatctagaccaggtgcggtggttcctgcctgcaatctcagtgctttgggaggccgaggtgggaggatcacttgagcccaggagtttgagaccagaccgggcaacatagtgagaccctgcctccaaagaaatgaacagacaaaagtcgacgcggccgcgaatttagttgtagtagtagtaggcgg

SEQ ID NO: 644900 - DNA, 216 bp, Homo sapiens
  misc_feature (14)..(14): n is a, c, g, or t
  misc_feature (30)..(30): n is a, c, g, or t
  misc_feature (47)..(47): n is a, c, g, or t
  misc_feature (54)..(55): n is a, c, g, or t
  misc_feature (58)..(58): n is a, c, g, or t
  misc_feature (61)..(61): n is a, c, g, or t
  misc_feature (187)..(187): n is a, c, g, or t
  misc_feature (203)..(203): n is a, c, g, or t
tcggcaatggcatnaagcggcgcggtgagngcgttagtggctaccgncaagtcnnaangtnccgtccggtctgcaccacgttcgtcagatggcgatcccacttcggcggtaaacatcaatatggggacgttagtcggttcttacgccagtgtcgcgcgcatgttagatgaagtcgcaagcgtgcctngtgccgaaggtaactnttaaccttcgacg

SEQ ID NO: 644901 - DNA, 136 bp, Homo sapiens
tgctgggattacaggcgtgagccaccgcgcccggcccctcctggtgattcttatgcaagagtttgctagctacactctttcccactgtgctggagggtctcactgtgggaaacggaagcccagagagggaaggtaa

SEQ ID NO: 644902 - DNA, 126 bp, Homo sapiens
gcgccagctggctgggcccagattagatgtcataggtcgacatgtgctaaaatccttacactgacaattccaaaatattctttttcctccaaattttcaagattttcattcttcactatcaaagtc

SEQ ID NO: 644903 - DNA, 198 bp, Homo sapiens
gacgtggtggcgggggctgctgttgcacctgctcagtcagaaatagttgtgtaatcgcctttgccaggcactgttctaggccatagggacgcacagtgacgacacagacaaggtcttgtcatttttgagtttgtggagggaggagacagacagcgaatcaatcaatatgaaaagtatcagctagagataagggctatg

SEQ ID NO: 644904 - DNA, 261 bp, Homo sapiens
aaaatgaaacattaaataaataatttagtcctaacatgaagcacactagcacagtagctcaaaaccatacaaggaaataaagaacattggcaaaaaaataaagaacacaggtaaatatacaagtcaataatatagtacttttggtttgaaactctttttttctatataatttaaaagtcaaatgcatattacaataattataaatattgttaatgggtgcacactgtataaagatgtaatcaatgacaacagcaatataaa

SEQ ID NO: 644905 - DNA, 1156 bp, Homo sapiens
  misc_feature (793)..(793): n is a, c, g, or t
ggtgaccagtaccatggtggtaggctgaacacaagcgccttacgaaaggcggtacaacgggatccaatgaagaaagatgtgttgatccatttatctagagaatagattggtctgatgtgagaatgcgcctgtctagtgttcagattatacataaaattatcggaaagagcgtctcgaacaccaagcgactccaaggaacctcaaacagttgtcagtctgattgcgtctcaaagggctcgttgtgtgtggtacgggtgtaggctcttgcctgattcgcaagagattgattgaagatcgcactactatgataacattccaaggcgtggaatccactgcgacgagcactgttgcaacgcgagtaaagagactgtgactaagacataatagtttcctccattcggcgttattgggatgcctgtgatccctgctagactacagacagggtttgtcttccagtaggtatccaacgacatatcgagggatgacgtactcgatgaggagaggtttgcccagcttttagactcggtgcatatggaacctaacacgcggtgtgcgtgtagcgtctggcatatgcaagtgcctgatttcatcgctagggtttgtgcttatttgagcttcaataaaaaaaccgcccacaagcgatttccccggtaccttgcagggcacaccgaatccactcccttttagttgacgtcaaggccaaccccacaacaaggcgctacaccgccacagaaaattccccgcagacaccggataagaacatggatctgcgtacctaccgtcagtgcatggnctccgcacgaacgtgggtgcccaaggacgcacagaactgagccttttcgagcaagcggacacccctcggtttcaaactaaacacaatgtggaccttctcccaagaactaccgacagtgtttgtcatcaccccccgacacttgtggcgaaccgataccggagctttaaggacctaagaatgcctgagatgctatactccctgtccgtccgctctatggacttggttccctctatcgggataaaggcaggacacaatgctatacccagagttgtcttcgtaagcaaaatagtcccacaacgtaacctgaaccctttggtggccaccgggcattgcccggaacgcatggccgagagttcccggacg

SEQ ID NO: 644906 - DNA, 305 bp, Homo sapiens
ttctcattaaaggtaaattaatgcaatgcaaattatatcctggtgatttttttttttaaaacaagatttttgattttggttaacagcaggcagggcgacttcattcttagtcttgggacccaaaaacggatggggtaaaaatatccctagattttgactatgagacttggactgactgtgtaggctttaaatatgaaaacctaagagcatttatcactgtctatcccaggaaacggaatatgctgggcgtttatacataaggaaagttcaaaggctaggccaaaataattagttacctagtagtt

SEQ ID NO: 644907 - DNA, 328 bp, Homo sapiens
acctctagagcacgcctggtatagttttaccagccaccttcatctgggagttagtttgggcgggggctcaaagtgattctctttggagtggggaggggatggaggttggactgagcccctggaggtaactggccagcatggcgtgttgctgggtctggatagtcccttttatacctgggcagagacaattgtgaaaaggtatcaaaggggtgggggaacaggcctggctgctgctgctgctgcttttatcttgaaaagacacaaggtgaaactaatgacacaagtgtgtccctctggggattcattttgatctttggtttgtctcggg

SEQ ID NO: 644908 - DNA, 843 bp, Homo sapiens
  misc_feature (207)..(207): n is a, c, g, or t
  misc_feature (215)..(215): n is a, c, g, or t
  misc_feature (222)..(223): n is a, c, g, or t
  misc_feature (242)..(242): n is a, c, g, or t
  misc_feature (244)..(244): n is a, c, g, or t
  misc_feature (258)..(258): n is a, c, g, or t
  misc_feature (266)..(267): n is a, c, g, or t
  misc_feature (270)..(270): n is a, c, g, or t
  misc_feature (272)..(272): n is a, c, g, or t
  misc_feature (275)..(275): n is a, c, g, or t
  misc_feature (277)..(277): n is a, c, g, or t
  misc_feature (282)..(282): n is a, c, g, or t
  misc_feature (285)..(285): n is a, c, g, or t
  misc_feature (289)..(289): n is a, c, g, or t
  misc_feature (292)..(292): n is a, c, g, or t
  misc_feature (298)..(298): n is a, c, g, or t
  misc_feature (302)..(303): n is a, c, g, or t
  misc_feature (310)..(311): n is a, c, g, or t
  misc_feature (314)..(315): n is a, c, g, or t
  misc_feature (319)..(320): n is a, c, g, or t
  misc_feature (334)..(334): n is a, c, g, or t
  misc_feature (336)..(336): n is a, c, g, or t
  misc_feature (510)..(510): n is a, c, g, or t
atccgcctaccttggcctccaaaagtgctgggattacaggcatgagctactgcacccggcctaaccaggctggagtgcagtggctcatgcctgtaatcccagcacttttggaggctggagtgcagtggtgggatctcggctcactgcaagctccgcctcccagattcacgccattctcctgcctcagcctccccagcagactgggantacaggcncccaccnncacacccggctaatttttntntttttagtagaganagggtttnnccntnttngncaggntgntctnganctcctnaccnngtgatcnnccnncctnngcctcccaaagtgntnggattacaggcgtgagccactgtgcccggcaagaatttttttatcgataacatagtgagctctctgcctcttcggaacgatgtccactttgcttatgatcaacccaagcaggactcttctctccctggacgcctctcccctggtctggaatcttccagttctgccagaattggnctttcccagatgctgcaaacttccagttgaacccctttttctgtgtggcccctggggctgcgagaccaaaatccatgagttctgtgtacccctcagacctttgcgaaggtgacgagcagggtcctgagaaccaggcagcagctcctctccctggctgaacccctgtccagcctactcctcacagaattgtcagctgactttcaccacaggtggtctttcttgctgagccctgcagctgtcccaatacacaccagaagtctgtcactatggcgcgctggcatgtcaccgacgagagcagttgacccgtctccactgggattctgcaacaagatc

SEQ ID NO: 644909 - DNA, 360 bp, Homo sapiens
acacacacacacacacacacacacacacacacaaaatcactgctgtgtgtttcttcccctgaaggattagggttaactcgggtttgtcttggcttccgagccttggcttggctcttctcagttgggttttgccttaaccacatgagccccccatgcctgccccccctgcggccttttgtgttccccgatgtctgggctgtgtcctgccgggattcccagccttcggggtcagccgtcgagccacttgctttgctcagttctgtgtttcagccacatttccacggtggaccctgtttgttttaaatattctgttcccatgtcaatcagtgacgataaatacagccttgatttggatgaaaa

SEQ ID NO: 644910 - DNA, 440 bp, Homo sapiens
caaacatcacatgttctcacttatttgtgggatctaaaaatcaaaacaattgaattcatggagatagagaatagaaggatggttaccacaggctgggaagggtagtggggaaggggggagttaggggaggttaggatggttaattagtaccaaaaaaatacttagaatgaataagagctagtatttgatagcacaacgggggactatagtcagtaataatttagctgtacattgtaaaataaccaaaagagtataattggattatttgtaacccaaaggataaatgcttgaggggatggatacccaattttccatgatgtgattattgcgcattgcatggctgtaccaaaatatctcatgtaccccataattatatacacctactatgtacccccaaaaaatttttaaaaaggaatgaaataaaaacatttgagtttaag

SEQ ID NO: 644911 - DNA, 173 bp, Homo sapiens
  misc_feature (13)..(14): n is a, c, g, or t
  misc_feature (118)..(118): n is a, c, g, or t
  misc_feature (128)..(128): n is a, c, g, or t
  misc_feature (155)..(155): n is a, c, g, or t
ctggaatttacgnnttatctttagagattgggaagaccctgatggaggacgtggagaacagcttcttcttgaatgtcaatttccaagtaacaacagtgtgtcaggcacttgctaaggntcctaaattncagcaaggctacaatgctatgggattntcccagggaggccaattt

SEQ ID NO: 644912 - DNA, 351 bp, Homo sapiens
  misc_feature (41)..(41): n is a, c, g, or t
attaataacaaatatatccccaaaagcagatatggactgtnccagtttattccctatgggttacggcaggtaacaatttttctcgactggtgcattcccaacctttgtaagtccaaaaatatgtaaccaaagtggtaggtaactttagacttagcactttccctaaatggcatacatcgaagggcatcaattcaagagcaaaaatggtttaactcccccaaacccacctatgtggtcattccagccttaaaaccgtccaggtttttgagctccctgtaggaaaggccaggccttaaaaccaaggcgttttggatatttttctgtgggccatgagtaaaagggggttttcca

SEQ ID NO: 644913 - DNA, 171 bp, Homo sapiens
ttttttcttctttggtagtgatgaagtttcgccatgttgcccagactggtctcaaactcctggactcaagtgatccacctccctcagcctgccaaagtgctgggattacaggcgtgagccaccacgcccggcctatctcttgtttttaaatcagtctggggcatctttgct

SEQ ID NO: 644914 - DNA, 297 bp, Homo sapiens
ccaatacagtttgtgataattggccagtttttacgaacaactagattcttcaaattagagaggtgacgaatacggatgattactatgcctcatatgctgtgtgctcttagacaggaatgaccgcagactacaaagcatataagatatactgagcctctacagattgcctgctcctcatagtctctcctatttgtgtattaccctgctttcgagttaataccaatttaattctatagtttactctgtatgctctgcctatcaactttgtagcttcattattgtaaaacatattccaga

SEQ ID NO: 644915 - DNA, 822 bp, Homo sapiens
  misc_feature (553)..(553): n is a, c, g, or t
  misc_feature (621)..(621): n is a, c, g, or t
  misc_feature (646)..(646): n is a, c, g, or t
acattctgccagcagcgcatccggggggcaggcagagaccttaggcacagctcagaccccgggccccgccgcctctggcttcgcagtgcccctgggcgatcacagactgtcaggacccgactgcagaggaagctacagggcttctgccccattggcccctctggtctccctgaggcccaaggaatctagtgctgtctgccccccctgcattctgttgggcaggagtggggagtctaatttggccttggggaggcctgtggagttctaagaagaggcagtgtctgctgtgcccagccttgaaggcgagttaggagttgcacagtgatgacaggcagaggcaggggcagaggatggaggcagaaccgggactgtttctcctgtgcgtgatggaaggttgcgagcagaccaaagccaggggcagaggatggagacagggccaggactgtttctcatgtgtgtgatggaagtttgcgagcagagcaaaggcaggggcagaggatggaggcacagctgcatgtgactgtttcttgtgtgcatgatggaaggttgcgancagagcaggaattccaccggtttgggtgcagacaggtatgcctctgcctggaggggaagggaaggtgntggtggtgactgacagcctggagcnctggcggtgggtgctggattctaggtggctcagagggcacgcccgccccggctctaagcttcctgagagcagctcgtcatttcttgggggcctcatgggaagatcatggttgtggccccaccaatgcccacctgggtatggctcaaggagcaacagtgcagagaggggcggagcag

SEQ ID NO: 644916 - DNA, 899 bp, Homo sapiens
caaagcagaaaaaagaattttaatctgaagactggacttttgaactaacccagtcacacaaaaattaaaaaaaaaaagaattaaaaagtctttgagaaataagggattatgtaaagtgaccaaacctattagttatgggcattactcagagagaaggagaaaaagcaaataattggtaaaacacatttgaggggataactcaagaaaattttcttaatcttgctagagagacagacatccagatacaagaaatcaagagaacacctgcaagaaactataaagcatgagcatcaccaaggaatatagtccctagactacccaggttcaatggctaaagaaaagggcacctgaagaaaaagttggcatcttaaagacagctggagaaaaaggtcagatcatttacaaagggaactctatcaggttaacagacttttcagcagaaaggttacaagccagcagaaattagaaacctattttttagcattcttaacagaagttccaattaagagtttaatatacaatcaaactatgcttcataagtaaagagaaataaaatcttttccaattcagacactaagataattcgtcattatctagaccagccttacaagaaatccttaaaaagtttaaaccataagcactactcataagaactgacacgactgatacctggtaccaaaaaaacacacctaaggtacataagccagagaccctataaagcaaccacacaaatagaaaactacaaaaagatcccagttatcaaatttcacaaaagaatcaaaacctcccatattcagtattaacccttgaatggaaacaggtctaagtaccccacttaaaggccacgagtgaagagggtaggtaaaatagaccttttgactacggttcagaagccatta

SEQ ID NO: 644917 - DNA, 499 bp, Homo sapiens
ccataaatcttcattccttgggaagccacttccattcccacccttaagcaaagttaggaaggaattctccttcccataaaaggacctctcctgagaggcaaaacctgttgcctcccccacggcttcccttttggctcattccaaacttggccaaattggggaaatgggatggaggttgccctgcatcccccctcctttgcctgagtgtgtttttttaatgtcagctggcatcatacaaaaaacaggaaaaacaaacccccaaaacttttttggtggtcaaaaattccctgagtgtctgtcctcaaccaaacctgctttgtgtttgtgtttttaaactttaaactttggaaaaaaatggggagggggggcaagggaaattttgccctaaaaatgcttttcattcctctgtttttattgggtcctgtttttcgggaaggtgggggttgggggaaactttaccttgtgtttttgtcaataaactcccattttcccaaaatta

SEQ ID NO: 644918 - DNA, 184 bp, Homo sapiens
tcgaaaagaggaggtgcggttcggactgcacaaaacaatttaacaaccccacttcctttccgaggaacactcttcacttcgtagctcccatcttcaccggcggcaaacctcagcagggaagaaatgctgcgctgcaacagcttgaccttcactctgcactgcggtcttgaccggcagtccagga

SEQ ID NO: 644919 - DNA, 294 bp, Homo sapiens
  misc_feature (111)..(111): n is a, c, g, or t
  misc_feature (124)..(124): n is a, c, g, or t
  misc_feature (208)..(208): n is a, c, g, or t
  misc_feature (265)..(265): n is a, c, g, or t
ccgtgagcaacaatatgagcaactacaatatgagcaacgacaccatgagcagctacaccgggagcagctacaccatgaacaactacaccgtgagcagcgacgttgtaagcngctacaccatgangaacaacaccatgagcaatatgagcagctacaatatgagcaacgacaccatgagcagctacaccgtgagcacctacaccatganctacaccgtgagcaatgacatcgtgagcggcgacactgtgagcagctacaccatgangaacaacaccacgagcaacggtatgagca

SEQ ID NO: 644920 - DNA, 330 bp, Homo sapiens
  misc_feature (198)..(198): n is a, c, g, or t
tttttttttgaaacggagtcttgctttgttgcccaggctgaagtgcagtggcataatctcagctcactgaaacctctgcctcccgggttcaaacgattctcctgcctcagcctcccaagtagctgggattacaagcatgtgccaccatgcccagctaatttctgtattttagtagagacaaggtttcaccatgttggncaggctggtctcgaactcctggcctcaagtgatccacctgccttggcctcccaaagtgctccgattacaggtgtgagccacccggcccagcccctcccttgtgtttcaaccaatcggaagtgaatttaacta

SEQ ID NO: 644921 - DNA, 647 bp, Homo sapiens
agcggggtggttgcattcgaggttgcgcgccggtgagtgtcactcccggcgctgagagcatattgctgctttctgccccgccgtctgtctgcgggcgctcgagcggaatgcttcctttcagtgacatggagtccagtcccaggctgtgggtgtgagactagaagacagagaagctgggccatgagaggccgggagtccccatggggcctgctccgagctttctgtgcagcggctcgatacctcgaaggcactcgggaccgaggaggtaccgagcgccgacgcgccgtaccatgtagtggcgttgcccgccgactggatgccatctacccatcagattgcgggagctgatccggagcatccggaggagcccgaaacctagctgaagaaggacataatgatctaattgaatgtgctgacaatgccggtcatctttgagcacgaatacgacggctacatatcgcgagagtcggaatgtgagcaaaattactgtatatgcacatgctgggctacccctggctcaccttttggaacaagttggcagtgcctcaagcttattgcctctcaagaatttacaagaccaacgcattgggctatctaggggcaatgctgctgttagatgagagacaagatgtccatctctcatgacc

SEQ ID NO: 644922 - DNA, 496 bp, Homo sapiens
  misc_feature (258)..(258): n is a, c, g, or t
tcgtgaccggtcccatgcacagttatttcaactgtacagttggctcattaaaagagaatgaaaagtacagagaaaatatttgttaaaaatctcatcaggctaggtgaggtggctcgtgtctgtaatcccagcactttgggaggccgaggcgggtggatcacaaggtcaggagttcaagatcagcctggccaacatagtgaaaccctgtctctactaaaaatacaaaaaattatccgggcacggtggcgggcgcctgtnatcccagctacttgggaggctgaggcaaggagaatcacttgaacctgggaggtggaggttgcagtgagctgagatcgtgccactgcattccagcctggtgtgacagtgcaagactccatctcagaaaaaaaaaagtaggagctaggctaggcacaggggctcgtgtctagaatcggagcacttgggaaggctgaggtgagaggattgccaggggccaggaattcgagaccaacctgtg

SEQ ID NO: 644923 - DNA, 958 bp, Homo sapiens
  misc_feature (1)..(1): n is a, c, g, or t
  misc_feature (4)..(4): n is a, c, g, or t
  misc_feature (7)..(7): n is a, c, g, or t
  misc_feature (24)..(24): n is a, c, g, or t
  misc_feature (27)..(27): n is a, c, g, or t
  misc_feature (34)..(34): n is a, c, g, or t
  misc_feature (39)..(39): n is a, c, g, or t
  misc_feature (43)..(43): n is a, c, g, or t
  misc_feature (49)..(49): n is a, c, g, or t
  misc_feature (51)..(51): n is a, c, g, or t
  misc_feature (58)..(58): n is a, c, g, or t
  misc_feature (60)..(60): n is a, c, g, or t
  misc_feature (66)..(66): n is a, c, g, or t
  misc_feature (72)..(73): n is a, c, g, or t
  misc_feature (88)..(88): n is a, c, g, or t
  misc_feature (92)..(92): n is a, c, g, or t
  misc_feature (102)..(103): n is a, c, g, or t
  misc_feature (106)..(106): n is a, c, g, or t
  misc_feature (131)..(131): n is a, c, g, or t
  misc_feature (133)..(133): n is a, c, g, or t
  misc_feature (143)..(144): n is a, c, g, or t
  misc_feature (160)..(160): n is a, c, g, or t
  misc_feature (163)..(163): n is a, c, g, or t
  misc_feature (165)..(166): n is a, c, g, or t
  misc_feature (174)..(174): n is a, c, g, or t
  misc_feature (180)..(181): n is a, c, g, or t
  misc_feature (186)..(186): n is a, c, g, or t
  misc_feature (190)..(190): n is a, c, g, or t
  misc_feature (194)..(194): n is a, c, g, or t
  misc_feature (201)..(202): n is a, c, g, or t
  misc_feature (211)..(211): n is a, c, g, or t
  misc_feature (213)..(213): n is a, c, g, or t
  misc_feature (218)..(219): n is a, c, g, or t
  misc_feature (223)..(224): n is a, c, g, or t
  misc_feature (226)..(226): n is a, c, g, or t
  misc_feature (229)..(229): n is a, c, g, or t
  misc_feature (233)..(234): n is a, c, g, or t
  misc_feature (238)..(238): n is a, c, g, or t
  misc_feature (241)..(241): n is a, c, g, or t
  misc_feature (247)..(247): n is a, c, g, or t
  misc_feature (250)..(250): n is a, c, g, or t
  misc_feature (257)..(257): n is a, c, g, or t
  misc_feature (259)..(260): n is a, c, g, or t
  misc_feature (264)..(264): n is a, c, g, or t
  misc_feature (267)..(267): n is a, c, g, or t
  misc_feature (277)..(277): n is a, c, g, or t
  misc_feature (286)..(287): n is a, c, g, or t
  misc_feature (298)..(298): n is a, c, g, or t
  misc_feature (302)..(304): n is a, c, g, or t
  misc_feature (308)..(308): n is a, c, g, or t
  misc_feature (311)..(311): n is a, c, g, or t
  misc_feature (314)..(314): n is a, c, g, or t
  misc_feature (332)..(332): n is a, c, g, or t
  misc_feature (335)..(335): n is a, c, g, or t
  misc_feature (337)..(337): n is a, c, g, or t
  misc_feature (339)..(339): n is a, c, g, or t
  misc_feature (341)..(341): n is a, c, g, or t
  misc_feature (344)..(344): n is a, c, g, or t
  misc_feature (353)..(353): n is a, c, g, or t
  misc_feature (366)..(366): n is a, c, g, or t
  misc_feature (370)..(370): n is a, c, g, or t
  misc_feature (377)..(378): n is a, c, g, or t
  misc_feature (385)..(386): n is a, c, g, or t
  misc_feature (395)..(395): n is a, c, g, or t
  misc_feature (418)..(418): n is a, c, g, or t
  misc_feature (422)..(422): n is a, c, g, or t
  misc_feature (432)..(432): n is a, c, g, or t
  misc_feature (444)..(445): n is a, c, g, or t
  misc_feature (551)..(551): n is a, c, g, or t
  misc_feature (956)..(956): n is a, c, g, or t
nagntgnggcttaaaagggcaacncgngcggganccttnctcnctagtngnggggggngngggggngggggnntgtgtggggaccatnaggnacctcccctnngcntgtggccatgtaccgctacctgggngnaggctgttgnngtcccggggggggggngcngnnctgggctnggggtnngccgngctnggcngggttgnnggggtgggncnggggnnaggnngnggngggnncggngcngggggnggnattgggngnncggngcnactacagggngggggtggnngagggggaggnggannncaanttnttnaagatggggggggggttnttngntngnggngccagcatngtggaggacaagntggnggagganntgagganncgggagagngaggaggagaaggggaaccgggngggngggatcctgnggatcatcaagnnctgcaaccatgtgctgagtctctccttccccatccggggcgacgacggctcctgggaggtcatcgaaggctaccgggcccagcacagccagcaccgcacgccctgnaaggaggtatccgttacagcactgatgtgagtgtagatgaagtaaaagctttggcttctctgatgacatacaagtgtgcagtggttgatgtgccgtttgggggtgctaaagctggtgttaagatcaatcccaagaactatactgataatgaattggaaaagatcacaaggaggttcaccatggagctagcaaaaaagggctttattggtcctggcattgatgtgcctgctccagacatgagcacaggtgagcgggagatgtcctggatcgctgatacctatgccagcaccatagggcactatgatattaatgcacacgcctgtgttactggtaaacccatcagccaagggggaatccatggacgcatctctgctactggccgtggtgtcttcatgggattgaaantt

SEQ ID NO: 644924 - DNA, 96 bp, Homo sapiens
tgtgtcttttaaaaaaataaacagctttatggagacataatttatacacaattcacccatttaaagtgaacaatttaatgacttttagtatagtca

SEQ ID NO: 644925 - DNA, 530 bp, Homo sapiens
  misc_feature (251)..(251): n is a, c, g, or t
gtaattggaatttctagaaatattaggggaagcaactttatacgcaaagcataacagaaaaataaggtgtattttttctttgaaacctatgaaatatactggccaggcgcggtggctcatgcttgtaatcccagcactttgggaagctgaggcggtggatcacctgagctcaggagttcgagaccagcctggccaacatgttgaaaccatgtctctactaaaaatacaaaaattagccagtcatggtggcnggtgcctgtaaccccagttactccggaggctgaggtgggagaatcgcttgaacccaggaggtggaggttgcagtgagccaagatagcaccactgcactccagcctgggcgacaaagcaagactctttctaaaaaaacaaaaatgaataaacaaaaaaactatgagacagaaaagatgggtttttgttaaaataaaaaataatattgttttagtttgaaaattattcaaaggttgtttcaaaatgaatcaataaaaaacataaaactgaaaaaaaaaaaa

SEQ ID NO: 644926 - DNA, 247 bp, Homo sapiens
atttgtaaagcggggttcccatgggcaggggtgtactcctgcctcaagtatgctgctgcctcaaggtggattcaggtgtactcccgccagccagtcctttttggccagatctgtcccagtctgatgcctcctcctctgggcttctttttcaagatttctcttccttcctcctcttctttgggatcctgggtgctgtcccacctccttgtaggtgctttcccatagggcccttctagacaataatagg

SEQ ID NO: 644927 - DNA, 444 bp, Homo sapiens
tctcacacctcttcactggataattgcaagtaacctgactgataccccttatctccctgcagaaacgcacagcagacaaatacaacaatcatatgatttattaaaaatataaatcagatcatatcatccttctgatcaaaactctctgaaggtcccctatggcaccccagaatttgtggctcctgaagtgatccaatatgagcccatcggatacgccacagacatgtggagcatcggggtccaatgctacatcctaatcagtggcctatcccccttcatgggacccaacgataacgaaaccttggccaacggaacctcagccacctgagacttcgacgacgaggcattcgatgcgatctccgaagatgcccaggatttcatcagcaatctgctgaagacagatatgaaaacccgcctgcactgcacgcagtgacttcagcatcc

SEQ ID NO: 644928 - DNA, 266 bp, Homo sapiens
gtcgactaaattagttcaaagtcattattagaaggttatgagaaatgaggttggcccatgagctagaagtacttatagattaattagaaaaaaaatagttcagtcttgtttcacaagattaactcagataaaatatgataaaattttattagctgaatgggatttatatagcatctcagagcagaagctgggtgtccaaagaattctctacaggttattgttgaaatattccccagtactagaagtgtatgctcatacaaaagcta

SEQ ID NO: 644929 - DNA, 882 bp, Homo sapiens
accatcaggcgtggttcattggtggagctgcggcgatgaaatgctgcaccatattgggttgcggtgaaagaaacagctccagctgctgctgacggaactgtaatcactggcggcataggtaccagaaatatcccactcacccgctgaactcaggtgctgatagttaccgctcacctgggctccattgtccggacgatcggattgcagtccggcagacatgcccagctattacgttcatccagcgtatcgttccacgacatgcggtgtatggtgctgtggctactgttttgcatgtcatagccaacccgaccaccgttaccgaagggagcgaaatcgacagataaatctggttgtcgcgatctttatcttcgtagtgggtcgtattgaatgacgtcgaaatcgagatatctctccagtcaccaatatcaacattaaaacctgctgtgatgttggcggtcgtggaggcgtctgcattccaccaggtttgatgtagcaggttggcgtaaagattgaggtttagtggggtaatcggttggcccacggataagctgatcgtctgtttttcgtcctgcgcatcgctgtcgttgtatttgtgatccagatagttggcgtagctgtgaaaatgacgatctgagaagcgataagcggcgagcgaaatcgtgctgttggtggcatccacttgtttgctgtaattaaaacggtagcttaagccccgctcgtcctgctgagtatcaaaatggctactggcccaggtgacatcaaaggacagtgcgccaagccacagcatattttgcccgatacccattgcggcagaatggtagtcatcatcagaaatcagcaggccgccgtacagcgaggtgtttgagagcatcccgggggatc

SEQ ID NO: 644930 - DNA, 176 bp, Homo sapiens
actatatatagacagattagccttcaattgcaggtggagaatggaattaatatgttaacatttaaagatattttagaaatgatatttttaaaagagagtccaaataaaactgctttcattctgattattttgaccagaaattgggctgctataatataaatgaataatatgttagg

SEQ ID NO: 644931 - DNA, 1061 bp, Homo sapiens
gggagctttggtgtccagttaggccagcgggagcagtctcctgatttattgtgatctcattctggactctggacctctctgttcttcaagcatcgtgtcactgtgaaatcctaacgcccctgtgtcctacagaccgacggcacaacagacagctgcccatcccatgccatgctctaccctctgcctctcaccaggagacactctgggcctccaggacaattgctgcttgccggctcttatttttctaagcaatatgtgatggagaaaaataacatatttatagggattaggtaaccaagggttactaagaagatgatcaagggaacaaaaaatggttaaatgaggtctagctgaagtcgacttgaaaacacaattgacacctcaggcaggagggcactgacccacagcccacacaacctcaaagggtcagagcgtcaagtgacttaaacttctgaggcaggaaacaggtgccatctgggccacactacggcagggacagcccaccatgcctaaaaggaccccaaatggtggtcagtaagtaccctaacatgtgcaggccagcagggccccatctcgtagtaaaaccacgataggtatgaagtactggcaacaacatgctgcatggtaccagagctccagaatagatgccatcagtcaaaacacacgtgaataaccaaggactgctgagtagccttccatggggggtcaaactggactcaaaaacactgggacaactggccatccaaggacaccaaaagatttaaggagctagacactgacctgtataacaacctgactgtggccatggagggggctcagaggaacacaaatagaacacatagccccatgcaatagaaacacatcccaaatgaatgtctagggacacgacaatgggacgactcacggagaaagggagatgcccagtactagggaatacacaaagatcacacgcaggaactcaccccagaaacccagacagtggctgacgaacagaggacagcacccacgtgagcccccccttatacacagcacctcacgggggcaccaaaacccacaaaacg

SEQ ID NO: 644932 - DNA, 718 bp, Homo sapiens
  misc_feature (459)..(459): n is a, c, g, or t
  misc_feature (697)..(697): n is a, c, g, or t
atcaccgccgtacgcctgatttagccgctaatggagataattaaccactcactgatcgacctacggaccgcatgcacaatgtccggatgatgaagctactgctcactccttggcgcttgtctgagcctacaaatgaccacaggactattgctagccatgcactactcaccatacgcctcaaccgccttttgatcaatcgaccacatgactcgagacgtatcttatggctgaatcatacgctaccttcacgtcatagtcgcctcaatattgtttatctgcctcgtgctacacatgggacgaggcctatagtacgcatcatttctctactcagaaacctgggacatgggcattatcgtcctgctcgcaacgatagcaacagccttcataggctatgtcctcccgcgaggccatagatcattctgaggcgccacagtatatacgatcttacgtatcggcatnccatacattgagacagaactagttcaacgaatctgactaggctacttattagacagtccgatcctgacatgatggttaaccttgcacttcaagttacggttcatattgcagaacttgcacactccacttggcaatcctgcactgaaacggaatccaaccccctaggaatcaccaagcattgcggattttatcaactttcatcgcttacaaccactcgacaccgcccctctaggttganctcctttgcttcttcctcccc

SEQ ID NO: 644933 - DNA, 320 bp, Homo sapiens
gaattcggcacgggagacgtaaggctgtgttctcaggatgaccgagtgggagacagcagcacaagcgggggcagagccccagaacataaggctcttgggaaggtggcgcccatctaatgtaagataaatcacattccctacaggattacatacagtgtggagtgtttccaagcccctccatacaaacaggctgtctcccacactgctcaaatcgataatcccctttggggccccatacttctcatgatgacgccgcacacacagagttttatttttcattcaaagcttcttatacacccttaaggggcccctttagggct

SEQ ID NO: 644934 - DNA, 319 bp, Homo sapiens
gctcgacggggggaaggggactggagtataacgtttttaagggggataatgaaacttaggcaacgtccgggaagactgtaaccccatagtactcgaccagtgaggaactggggaagagacctgcgtgctaggagataaattacctgctgtacctgccccgggtgtgcctgcctaccagacacctgatcttgcaagactgccattgaaagtctcacttccgctgttcttcatgtctctgagtccattcatcgggtttggacgggtgaatgtgtttctcacacattgttctacatttctgcaaatccctttatggtcgacg

SEQ ID NO: 644935 - DNA, 373 bp, Homo sapiens
ttgatagacaatgactttatgtatatatgtttgtctattaccagacaacatatgactatctcataggctaccatattttgaacatgaagcacagataattctctgctagcttctaatcaactagaacaatccgttacaaaaaaattagtcccaagcactctgagagactgaggcacgaggatcactttagcccaggaattcacgaccaacctgggcaacatagtgagacctcctcgtctctacaaaaaaattaaaaaataagctaggtgtggtggcatgtaccccatagtcccagctactcaggaggctgaggcagaaggatcccttgaacccaagaggtcaaggctgcagtgagctgtgattgcaccactga

SEQ ID NO: 644936 - DNA, 106 bp, Homo sapiens
ccacggagagtaagacgatcatcaatggctgacggcagttgcagccaagcaacgccagaaagcctggcttcacgctcaggagaaaacgctacctctcttcctcgtg

SEQ ID NO: 644937 - DNA, 340 bp, Homo sapiens
tgacagcagacgcccttgccttgtttccttccttatggggaaagcatccaatcttttatcattaagtgtgatgttatctgtagggtttttgtgatgccttctgaaaagttaaggaagttgttttttattcatagtttgctaagagtttttatcacaaacggatgttgaattttgtcaaattcttttcctgcatctattgagatatcataagattcttttttttgtagtctgttgatacgatgaatgatactgatgtttgaaggttgaaccaaccttgcatttccaggataaacctcattttgtttgtcccagaataaatagattacttcagaaaaaaaaa

SEQ ID NO: 644938 - DNA, 184 bp, Homo sapiens
ctgccgccatcttggtccgcgttcctgcacaaatgccggcgacacaagaaaccgtccctgctacagagcaggagttgccgcagccccaggctgaggacagggtctggaccagattctgacagtgatgattcagtaccagagcttaaggaccagggttccacccagggacccacaaaaaaggccc

SEQ ID NO: 644939 - DNA, 267 bp, Homo sapiens
ggtacctgaaacaggctgatgcaggagaatggcgtgaacccgggaggtggaggttgcagtgagccgagattgcgccactgcactccagcctgggcgacagagcgagactgtctcaaaaaaaaaaaaaaaaaaaaaaaaaaaggaatgtgtgtgggaaaatgtgtatttgggatcaccaagggtttaagggtaatttttccccaagttttaggttcctatttgggcaaaccggaaaagtgtgtggttggggcttaaatatattaaaat

SEQ ID NO: 644940 - DNA, 145 bp, Homo sapiens
cttacatgtttcctgcacttcacaattactgtttagctcataactatactattctaaaaataacaaagactgccaaacttacctcaataaatgtccaatattcccatctgtttccctttcctaaataaactgatggaatattttg

SEQ ID NO: 644941 - DNA, 990 bp, Homo sapiens
attgagagaggaagacgagagcgacaagaggatagtggtgtgacctattgctatcactactctatcgatatgattgtgttagtttaacattttgggcggtcattaacttacgttcgccgtggctatatacgtttcgtcttatccgcagccttccaaacaccgtggtcccactcattatctccccgtccgcttttctgggattatactcttgtcagagatgccacactttatgctaaacaggtgtgcagtagcgctacccttttattggtaccccccctgaaatatagggttccgggaatgtggatcatatgccccagctgatcggaaggaagatatattgcgcgtcccctgtctccttaggaggagatctgatttatctttaaaaaggcagctgcttctgaggcccatgccaaggaccccttctgcgcacctgaccacagaggtacctttgttgttggatgtatttaagcgccagtactcccatgaggacacactctctggtggcactgccatatttctgggaggcactttgataaggacggctggtccctgtggtactcagagtatcgcttccctgaaggactcactcaagaccttcatgaggctgccatttcatcactggatgttccacgcgactggagccaactgaggagagaatgccttcgccagggtcatccgttttggaacccagccataatgcagctccactttctggaatctgggtcttccgaggccacggagcttgcctttccgctgagtccccgattggcacggtggactacgagtcatacacatggcggaactggatcctggcagcgaggagaccccgacgctggttcgagagtacttttcctgggagggggccttccagcatgtgggcaaaagccttccatcagggccagattttcaagtgacatctcttgccatcacctagctgcctgcacctgcccttcagggagatgggggtcattaaaggaaactggaccttga

SEQ ID NO: 644942 - DNA, 317 bp, Homo sapiens
acacctgactcagtgcagcagatccgttgagctgctcatctgtagctgcgtacgcgcctcacctccctcaggctgttctcagctggccttcaatttctcatggagtccaggtcgatctccagggatggactgtacgtctcagctctgtgagcgtcgtctcagcagctccaacctcagcagactgtgtggtgaccactgtggtgctctcctcaatctgctgagtacagtacttgtctagctcctctcggttcttccgagccagctcgtcatattgggcccggatgtctgccatgatcttggcgaggtcctgagatttg

SEQ ID NO: 644943 - DNA, 801 bp, Homo sapiens
gctttacttgtttcacgagggggcgacaatgtcctggggccacaccggggccgaaactccttgtcagggtggctgtgacccccgccctgttgccttgtttattggaaccggtgggcccccacaatgtgcctctaccgcttttggggtcaaccattcgtagcggttcatctgtcgcgcgatcacctgggggggaccccgcgacccagggggttcccccccgtaccacggggggtttgttggcccacggcgccggtggctcccccgtctagctggcatggtaagggcccctttctcttcgtttcggggcccagggggcgtggtggagagccgatggaggagaatccacgttctgggggggccagcctgctggagaaccaccaatctgggcgggtgttctacagctgtgttctttggggtaaaaaaggcgaggagaaaccgcgtatttcctcctgtctgcacgtgcaggatcatccgcgcagtcgtcctcccccgcgggccccctatattatggctatgccagaatcgcctcaatttctccaactgatttctaagaaacaagatttctcccccgactaatgcatttctaaagacaatcccccttccaacatagacgagggtatagataacccttcgtgcctcccagtccccccacagtttcacgcctccgtcgttaccatcccccactgttctgtcaggcacccaacgcgtcgccctgttttgtcttcagtgagacagcagtcgctcccccaatcaaataaacaagaaggctgcccaaaattaaattttcggccccacaaaaca

SEQ ID NO: 644944 - DNA, 293 bp, Homo sapiens
tgcctctgatagtactagactcttcttgtgcagtttctgctagtggtgtctactgcttgtcctagcctactagttgtactagcctactagatatagtcctagcctactgctcccaagtagctaggagataacaggtagcccatcaacacgcccggctaattattctactattcagtagagacggggtttcaacgtgtaggccaggctggtagtcgaacttcttacctcaggtgatccacctgcctcagccttctaaagtgctgggattacagacctgagccaccgaacccagc

SEQ ID NO: 644945 - DNA, 267 bp, Homo sapiens
cgtgttagaccagggattgggaggcatgaggggggtggatatgaggtcaggaggttcgagaccagggtgaccatataaggtaagaagcgccgtctctactaagagctacaaagaattagccgggtgtggtggcgtgtgcccgtagtcccagctactagggaggctgaggcaggagattcgcttgaacctggggaggcggaggctgcagtgagccgagactgcgtcactgcactctagcctgggtgacagagcgagactccatctcac

SEQ ID NO: 644946 - DNA, 250 bp, Homo sapiens
caagaggtatgtttactataaaagctattgggtaagctagttatattatattggtggctcaggagtttgatagtgggtgggcagtgagagtgaatactaaaatgtgcagggtgcctaaggtgctgtgagtgtaaatcactgcaatgagtaagggaaaggaccctactacggtgtagaatataaaatgtgtcctgagctctgttggaaccaaccctacccatttggggcttgaaattcaatgttagacctg

SEQ ID NO: 644947 - DNA, 482 bp, Homo sapiens
  misc_feature (13)..(13): n is a, c, g, or t
ctgtgttactaanagcgtaaggatgatgtagctttaggcataacttgattttggactcaaaaaagttctcagagtcagtcttttggctcagattcatctgggttggctctgtacttaagagccagttaatgacctcaatggcttcaagctcacgtcatcacaacatctagtccagcatttgaagagagagactagcaatcactgaaagctcaaacaaaagttgcatcattgagtctccttggtttagattggtctggtgtgggtcatggctcatggtgtttttgaataccagaaatcttaggttattataatgtaaagcaactttatgtttaaatgcttgtgccacagtgaagtttcattatgactgctgcaacagttggccaccgttggaaattttcgtcctataaattggagtaaaattttagatattgataaaatttctctttctgttgctttccacctctgcagtcagtaagattaca

SEQ ID NO: 644948 - DNA, 458 bp, Homo sapiens
tgcacggtgctagaatccgaagcgattctatacaaagcaacgtttagtgcctttaggtgaatatattccactatccggtttactgaaatgggtgttgactgccatgcagaatgatccgtcgataagtggtttttcacgtggtgaacaacagcaacaaccgctttctattcatcagcagcatttaggcgcgtccatttgctatgaagtagcttatccaaacttaacacgtcttaatgcccgccaaagtgatttcttggtgacagtttccaacgatgcatggtctccgggaactgcaggccctttagaagatttacagatggttcaaatgcgtgccaaagaaaatggacgctggtttatccgtgccaccaatacaggcgtaactgcgtttattgaccatcaagggcctatcgtagaacgtgccccacaagatgtggcaaccgtgcttcgctggagaactg

SEQ ID NO: 644949 - DNA, 386 bp, Homo sapiens
  misc_feature (16)..(16): n is a, c, g, or t
ttccttaaaaagcccntctgccaagaagtgccaaagtgcgaagggaaagtaacagcttgacccgtcaccccagccccaaactgctcagtgccccagacctctactgcgtgtggcccaggccctgcagagtctgccccaccccctcacagcctcctttcacacttcctcactgcatcagtttgcctttgtagcaataatgcttagaaacaaatcacccggaaactctggtttcaacccgagtatgtatttagctcacaagccgcaggtcaggggtcaggctgggctcagcaggtggctcttctgtcctcgcaggggtcactcgggactcactcactcgtctagggctgcttggctctccgatgccatcaggcagctctgtcccaacc

SEQ ID NO: 644950 - DNA, 353 bp, Homo sapiens
  misc_feature (244)..(244): n is a, c, g, or t
  misc_feature (323)..(323): n is a, c, g, or t
  misc_feature (348)..(348): n is a, c, g, or t
gcaaacagtttcagtctcaactgaagcctcctccttgaaaagaacacggcaagacggacagagaagctatatcattgatttgagggaggacaaagtcaagcagggatagtagcgtaattactgctgttgctgctttctttttcataatctaattcagtctctggaacggcccgcaacggccagacgatccagaatcaaccccactgtaacctcctcccgtggagaccctggcccgggtacacgnatgtggagacatggacaaaccattggaggatgtgatcccattttatcccgactccacaaagtggttctgaacctgacanagcaagaggggacgaagtgggaagncacag

SEQ ID NO: 644951 - DNA, 307 bp, Homo sapiens
tgtctgaggatgcactgtcttctttgtaacattagttagtgccatgcagaactgtcacctgtccttaaaacccatgactacaaacctgtcttaggaacttgacctttgcgacacagctactttgcctggctgcatactggtaccacccactgcgaggaggagagtcttgcagtccaacctaactttctcccagccagcaactctgtggtacagtgcgcgactcaatctttggggaaacaagaagaagcccacatgctagaggctggtgtgagcccttacctatggtggctgcatccatgccaatcaa

SEQ ID NO: 644952 - DNA, 507 bp, Homo sapiens
tttgcctaataaatgcaacagccacaggcaactgacacattcttaaacacacttggtactacccaggtcattcggttcgtttcacaattattagcatggcaaatcaggtcagcggagacagcatgctggaaacaatttcttccttcaaagaagcagtcatcgagcaagaaaccgcagctgcaagactgccatggaattcttacaagaattaaatagcgatgtactctggaagttttgtggacagagagtccagaaaacctatctagacaatgatccctcaatttatctgtaggtttacctgttgtacagtatgcaactcagcttcctgaaagcacttcactacgcttagacagatgtcctactggaattcccagatacctcttattgatctgtaggacatatggactagataggtaatatgaggatcattctaaaagaacatccagtaatagaatctcatccagatactgcattagaggatctacgactagataaagcaaattcctg

SEQ ID NO: 644953 - DNA, 297 bp, Homo sapiens
gacgccattatcaaagattcgcacagtgtggaaagtgacaggaccgtagttgccactgctgtatcgggcaggactgctttaatcactcttctctgcgtcctacctgtatcctgctgattggtccattttacatagagctgattggtccattttacagagagctgattggtccgtttttgacagggtgctgattggtgcttttacaattcctgagctagacacaacagatctccacgtccccaccagggtagctagatacagagtgtcgattggtgcattcacaaaccctgagctaga

SEQ ID NO: 644954 - DNA, 227 bp, Homo sapiens
gcaggtccggagcaagttgtcgctgaatattggtacggcatagcgaagctccgaagtctccgacgagcacagaagtggatgatataacagaataagcaagctcatttgggcacagccctcaaaggccaacccttttggcggtgcttctcatgcaaaaggaatcgtgctgcacaaagtcggagttgaagccaaccagccaaatactgccattaggacgtgtgtaagga

SEQ ID NO: 644955 - DNA, 544 bp, Homo sapiens
ggccgggcgcggtggctcacgcctgtaatcccagctctcagggaggctaagaggcgggaggatagcttgagcccaggagttcgagacctgcctgggcaatatagcgagaccccgttctccagaaaaacggaaacaaaacaaaaaaaacaaaggaccaaaacaaaaaaaaaacaaaaaaaacaaaaaacaaggtgtgtggcggcgcgcgcccgcgcggccccgcgagaaagaggcttctctagaaacacaacgcggtgtggggcgcgcgcgggggcccacaggagggaagagaggagaacagggggcccaagaggggttccccagagggagaaacgggggcccagaggaaaaggggggggggaatctccaccaaaaaaaaaaaagcccgcgggggagaaacccgagggggtttgaggaaaaatctccaaagaagggaggcgcttagggaggcgcaaatcagggggagcctataaacacaagggggagcccaacaggaggcgcctcgcagaatatcaaaattagacgcccacgggcggggggggac

SEQ ID NO: 644956 - DNA, 1200 bp, Homo sapiens
ctccacgtttacttcgcggagttaaatagtggtcgaaatagcgcccctgggaacctttgggacagaactttttttcccgggggcgacaaaatggggcctttcaaaaattccaaaagaagatatggtgtctgtcccaaaggaaagtttcgttcttctgtgcaaacaacttgtcgtcctggggtggacacagccgacaagcgaggggacccccccccccaatggagagaagcacgccttggggctttccaaactggcttacagggttggagtttattcccgtgggagcccactccaagggccccaatatatatggccctcccggtatatatttgccgccgcgcggtatattgggaatttgcgcacaacacccggggctctaaacacattggaaaatggcaaaagttttgtgcctgaaggccctgaaaaaggggaaaaggagtttgaatttcgccccctctttgggtgaaaaaaaagctctgggaaagaaggggccccctaagaatttcttgaaaagtttctcgggtagaatagcctgcgccactctgtgtagagaatatggggttctcctggggacaagcccccacatgggtgggtgttttgaaagagagccttctctcacagagactatatccaccccctttttgggctctcctcttttgtcgtgtttctggtgaatatatgaagaccacagacacacagttgtcggtgtgggtggttcactccacaagaccacaggcggaacacacgagaaggctcgcctcggagagctcggcacaaggtgtcacccacaagttctcgccccacagagaaagctctcacagagagagggtcaaataggaaaaattaattcccctcataaaacctcgccacaccccacacttcttaatccacagtcggtgggagaagaacaccggttctccaagagaactcgtgttgtgttcacaagtgggcccatttaaagtgttaagtgaagtaaaaagagactcggtgtaaatgagtaacacactgcactcgtaaaaccttcagaaggagaaaggagaaaatgttttgtggagaccacactttgggtttcttttttgcgtgtggcacagttttaaagttaattaagtttttaaaaatcacgtgaactttttaatgggaacaacttgacccaaaatttgtcacagaattttgagaccccattaaaaaagttaaatgaga

SEQ ID NO: 644957 - DNA, 251 bp, Homo sapiens
tgctggttacacaacaatctgactgtacttactgccactgaagtgtacatttaaaaatggttacaatggtacgtattatgttatgtgtcttttggcacaatgaaaacagctataaaaggcatccttgcaaccactggggctatctgctattctggcattattattacttttcttacgtgtactaaacctattgtggttctatacattatatacaaagaggatactgtccttattcttaggcgatgctttct

SEQ ID NO: 644958 - DNA, 425 bp, Homo sapiens
  misc_feature (344)..(344): n is a, c, g, or t
gcttgtggtgaaggggggcaaaaaaaagaaccaagttttgaagttcactcttgatggcccccaccctgtagaagatggaatcatggatgctgccaattttgaccagtttttgcaagaaaggatcaaagtgaccggaaaagctgggacccttggtggaggggtggtgcccatcgaaaggagcaagagcaagatccccgtgccatccgaggggcctttctccaaaaggtatttgaaatttctccccaaaaaatatttgaagaagaataatctccgtgcctggttgggggtagttgctaccaccaaaaagagttccgaattccgttccttccagattacccaggccnaaaaaaaggaggaagccgaggattaaatttcatttatctggaaaattttgtatgagttcttgaataaaacttgggacccca

SEQ ID NO: 644959 - DNA, 877 bp, Homo sapiens
gtcagcatacccattgtgcccaggaccgtggctatgaaggatgagttactctgccagcttacccagagcaatgaggagcaggctgctcaatggcaaaaggaagagatggcacttacagacacatgcaggtcagaactgcagctagacaagcaagctgtcctggccaaagaggtgcgggacctgaaagagaccttggagtttgcagaccaggagaatcaggttgctcacctggagctgggtcaggttgagtgtcaattgaaaatcacactggaagtgctcctgggagtcgcagcattgcaggtgtgagtaatcctctaaggcacacttgtagaggaaccgtaacggactaaacttggcccagcacctatagcagaataaccgaggagctaagatcttggagaaaagacggacagtactctcagaaagctaggtggctgcggtgactgagcagactacatgagcctgactctctttctactagacaaatactaaaggagcaagactgaactaagagacccttctgctgagtacggccgtgtcctcccagccaggaacaccctctgcctaaagtgacaggaccttcctgggaagcatcttgacagtagtggcagatgaggaatcaactcctgtgcccttgcttggaagtgacaagagtgcttacagccgagtagcatcaatggtttcccttcagcccgcagagacccaggcatggaggagagcctggccagaacatgaggtatgatgactacgtgagcttcagagtcttggttccctgctacaagagtctaaagaagaagccatcagggactctggcagcgaaaaatttgtgagctgcagctaaggctgcaggccaaggaagaacagcgtcagggagtca

SEQ ID NO: 644960 - DNA, 235 bp, Homo sapiens
  misc_feature (33)..(33): n is a, c, g, or t
  misc_feature (46)..(46): n is a, c, g, or t
tctttgtatgtgtgtccgtgtgtgtgtgtgtgnggtatatctgtgnttgtgtgtctctgtgtctgtgtgtgtctctgtctctgtgtgtgtctatgtgtatctgtgtgtcgtgtgtgtgtggtatgtgtgcttgtgtttctgtgtgtttgtgtgtgtctgtctctgtatgtgtgtctaggtgtctgtgtgtgtgttagtgtgtctgtgtgtattgtgtgtctatatgtctctaagt

SEQ ID NO: 644961 - DNA, 349 bp, Homo sapiens
  misc_feature (18)..(18): n is a, c, g, or t
  misc_feature (38)..(38): n is a, c, g, or t
  misc_feature (73)..(73): n is a, c, g, or t
gtgaactcaacctaaatnaaaaaccaaaaacccctganaaaactttctctttgccgtttcctcctttaaaaanaaaaaacaaaaaacaaaaactgaaagctgaatccttccatgtcttctatgcatctacatcttaaactgtgggcaaaagagaaggattggtcagagcagtgtgcaatatgatccaactaagtctcctcccttggcccctccccaaaatgtttgcagtgttatttttgtgggtttttttttaacaccctgacacctgttgtggacattgtcaacctttgtaagaaaacccaaataaaaattgaaaaataaaataaaaagaaacccatgaacattcaaa

SEQ ID NO: 644962 - DNA, 567 bp, Homo sapiens
ataataatgctgagtaaaagccacaccaataaaaaatttgttttttaagacggagtctcactctgtaacccaggctggaatgcagtggcgtaatctcagctcactcactgcaacctccacctcccaggttcaagcgactctcctgcctcagcttcctgagtagctgtgaccacaggcacacaacaccatgcttggctaattttggtattttaagtacagatggggtttcaacatgttggccaggctggtctcgaactcctgacctcaggtgaactgcctgccttggcctcccaaagtgctggaattacaggcgtgtgttaccatgctctgccaaaaaaaaaattttttttttttggagagggtgtctggtcctggtggcccagcgtggagtgcatgggttcaatctcagctcactggaacctccgccgagaaagctctcttatggtcttggcccctagctacagataaggcacccagggggcaagaaatttacggcgtttggaagagaattcccagattcctatccaggctacaggcagggcccatgttatggcctggagccccttt

SEQ ID NO: 644963 - DNA, 771 bp, Homo sapiens
atggcacatgcagcgcaagtaggtctacaagacgctacttcccctatcatagaagagcttgatcacctttcatgatcacgccctctataatcattttccttatctgcttcctagtcctgtatgcccttttcctatactactcacaacaagaagctaacataatactaacagtctcagacgctcaggacactagaaaccgtcgtgaactatcctgcccgccatcatcctagtcctcatcgtccctcccatccctagcgcatcctttacataacagacgaggtcaacgatccctcccttaccagtcaaatcaattggccaccaagtggtacctgtaaccctacgagtacaccgagctacggacggactattcttcaatctcgctacatagcttcccaccaattattccgtagtaaccaggtcgactctgcgactccttgacgttgactatcgagtagtactcccgatgtgaagcccccgagttcggtataataattacatcgacaagatcgtctgtgcactcatgtagctgtcgcccacatttaggcgtttgtagaaagcagcagtgtcaatctcccggatcgatcgtatgactcagaagcgcagcatgtatcagccagcatacacggacgcgtggggtactagctgacggatcaattgtctctgaaatactgtggagcaaaccaacagtttcattgcccaatcgatcctatgaatttaaattcccgctaaaaatctttctgacaaattaggggccccgtattttacccttat

SEQ ID NO: 644964 - DNA, 1289 bp, Homo sapiens
tcagtatgctcgatccacgcgcttcggatctttgcataaggaagcgagaacgcgcctaggacatgaacttactagagaatgcgactatgcaggataatgagcgatatggagaaagagtctgggccctggtgcaataaaagaccaaacaatgcaagaagaatcagagagtcctgttgaaagacccttgaacgagaacccaactaataaaatgacccaagaaagaacttcgacagagtcaagtaccattggccaggatcaaacgcttatggaacgtgatacagagggtggtgcagcagcaacattacattgcaatggagtgcattgcaagtcacttacatctatactcagaacagtaataatgaaaccattgagacatcaaacgaggactctacacatgctcaatgactgtcgatgtccacaaatctctgaatcaggaatctcagtttcctaagctcccaaaatggagcacagccagcacatctcaagaaacagactcttgtacacctataacatctgaggtgtcagaacaaccatggctgtgcccagtcttccctccaagtgtaggtcagatcattcagtgaacaacaacactaagccaacttcacagacagcattacgggcacgagatacccctgtgaacactgaacaacacagcaaagaaccataacgggaccactggacctaccacaggacaatccaacgggtgcacctttccttgtcactccccttgagccaaacaatgcacgaaaagctcaaggcggaaagatcgctgacccattggcataactggccatggatcgagatgacccataaccagttcacacggcaagaaatatacaaaacacatgccaagtatcgttaccatctgtaacgttgataatacgagcacatgcgctaaaataaaccccatgatgtatcatatgcgaacgaccggcactcaatagccctcgcactgggacaaacgctgaaaccactgggcagaaccaccaaacagtcacgggaaaagaaacgagcgacaatatgcacaaaacacactgacagagccgacgaaaactcgatgtaacagaggtcccacaaacaccaaacgcacgagctgaacaaacacaggaaatacaacacaaacaaagcagcgacatcgacaccacaccaaaacaagcagcagagcagtgacaacaaccacagaagcaagaactagtcacaaaaaaacaagtcgcagctataacaccacacacagcgtacagactcgcacgtcataacaaacaggatcaataaaacccagcaatatacat

SEQ ID NO: 644965 - DNA, 158 bp, Homo sapiens
tattagacaaagtaagtatcatagccatggtgtggtactataacaaaatacctgagacggggtaatttatagaaaacagaaatgtatttcttcacagttctggaaactgagaagtccaaaatcaagacaccagcatctgttacgctggaatggaatgg

SEQ ID NO: 644966 - DNA, 318 bp, Homo sapiens
gccaggctaagtgcagtggcgtgatctcggctcatgcaacctgcgcctcccgggttcaggcaattctcctgcctcagcttcctcagtagctggaactacaggtgcgtgccatcacacccggctaatttttgtatttttagtagatagtgggtttcaccttgttggccagtatggtctcaatctcctgacctcatgatccacccacctcggcctcccaaagttctgggattacagacgtgagccaccacacttggcctaaaaagtaaattttaataatatattttaactcatatctagaatgttactttattgtgtgat

SEQ ID NO: 644967 - DNA, 106 bp, Homo sapiens
caatgcactgttcattaattcaatcttaattactgcatattcattacttcttcctcctttttgcaaatgctatggtagactagtctgtggaaaatgagctccaagc

SEQ ID NO: 644968 - DNA, 131 bp, Homo sapiens
catggttatcggcaattcaagttgccgttatcagctgtatatctactctcaggcggtacacgtgctagctacatgtgggcccttatcgcccattatgagtgacgataatcttaactcatggccgacgaaaa

SEQ ID NO: 644969 - DNA, 739 bp, Homo sapiens
ccacgcgtccgaatacatctgtgtatccatgacttgttaattatgaaaactgttttccacagggggccagaggtgatgatgtttaattttcttctatacaggctagctgtatatggtcataaaaaacttggcatagttttttttttttttttctcctctctctcttttaagggagctatttctctgttgggtttggtggtgacattctggagccttctaatttaattggtttggctccgtgctattggattaaccagggtgacacttgccaaaccgggtcagttatcacccaaatacagcctgaaggctagaacggaagtgaatttccggggacatacatgtggtgaatgactcagagggtaaaaagagtttctaaattattaaccaatttatttaaaattgaaacagtgtttagcatttttaatcttctcttttaattattggtatacacagtaattatgagatgatacccaaggtgcaaaatttatgtgtatgtgtactaggtagtatttactggtagtttgacgggagtgtaaccggaagagagaagaaatggataccaggttatttcagtattcatatggggtcttctcccctccacacccaatttccttcaattgtctcctagattagaaataagtatggtttctctgagcggttccaaatcgggtggcaggatctccagacttttcctttcccatcattcatggttcccccttgggggtaacgggaataattg

SEQ ID NO: 644970 - DNA, 448 bp, Homo sapiens
  misc_feature (7)..(7): n is a, c, g, or t
  misc_feature (71)..(72): n is a, c, g, or t
  misc_feature (81)..(81): n is a, c, g, or t
  misc_feature (92)..(92): n is a, c, g, or t
  misc_feature (95)..(95): n is a, c, g, or t
  misc_feature (111)..(111): n is a, c, g, or t
  misc_feature (117)..(118): n is a, c, g, or t
  misc_feature (135)..(136): n is a, c, g, or t
  misc_feature (138)..(138): n is a, c, g, or t
  misc_feature (155)..(155): n is a, c, g, or t
  misc_feature (158)..(158): n is a, c, g, or t
  misc_feature (161)..(161): n is a, c, g, or t
  misc_feature (163)..(163): n is a, c, g, or t
  misc_feature (243)..(243): n is a, c, g, or t
  misc_feature (247)..(247): n is a, c, g, or t
  misc_feature (424)..(424): n is a, c, g, or t
taagtcntccagctatccccagaccagctagacacatcccaagcatggtcatgttagcatcaatgtccagnnatactcagntctcagaatcnttngttagtaccacttttnccactnnccccttatattccacanngnattcacagccagcgggntanctntnccctccctacccccaccaaagcctggggaatcacagacagcctttttacagctcctctttctcggcccccttcttctggnaggnagtgaggatgtttaagctcttctggagctcctccttcttcccgtcactcatcttgttcttctcaatcagcctggcgatccgtgtcatctctgatgctgggaagtcctccccttggtctaagatcttccccatgatcttcaggtattgctcggcccacttcttctgagtctccttcanacttgagaggttatcttgcccctg

SEQ ID NO: 644971 - DNA, 454 bp, Homo sapiens
  misc_feature (91)..(91): n is a, c, g, or t
  misc_feature (99)..(99): n is a, c, g, or t
  misc_feature (159)..(159): n is a, c, g, or t
  misc_feature (214)..(214): n is a, c, g, or t
  misc_feature (312)..(312): n is a, c, g, or t
  misc_feature (324)..(324): n is a, c, g, or t
  misc_feature (326)..(326): n is a, c, g, or t
  misc_feature (407)..(407): n is a, c, g, or t
cttgaagcctgctgatcctcccattgttgatacggttcctggcaacccgatgtgtgttgagacccttcctaaagactacctcaccaagggntcgctatnctgattcgtgatatgagacagacatttgcggtgggtgttcatcaaagcagtggacaagangcctcctggacctgccaagttcaccaagtctgccaagaaagctcagagggctacntgaatattatccctaatacctccccccccactcttaatcagtggtggaagaacggtctcagacctgtttgtttcaattgaccagataagattagtagnaaaagccgggtnantgataacaatgcctcgtaccaccctcagagggaaaggagaatgttttgtggccccctttggttttcttttcctccgtgtgncagttttaagttattagtttttaaacctcccacacccaaaaaaaaaa

SEQ ID NO: 644972 - DNA, 675 bp, Homo sapiens
  misc_feature (394)..(394): n is a, c, g, or t
  misc_feature (402)..(402): n is a, c, g, or t
ggggctcccgggggcagactcaggtgcttccagcaggcgcgggccgtggggctggcgggcacttccgccgccttcctgtcctcgcgcctgcaggacctgtccagcatcgtgcgccgtgccgaccggcaagccgtgcccatcgtcaacctcaaggacgagctgctgtttcccagctgggaggctctgttctcaggctctgagggtccgctcaagcatggggcacgcatcagctgctttgaaggcacggacgtcctgaggcaccccacctggccccacaagagcttttcgcatggctcggaccccaacgggcgcaggctgaccgagagctactgtgagacgtggcggacggaggctccctcggccacgggccaggcctcctcgctgctgggggggngggggggnccccaaaggggtcttctctgtgggcagagtgccgcgagctgccatcacgcctacatcgtgctctgcattgagaacagcttcatgactgcctccaagtagccaccgcctggatgcagatggccggagaggaccggcggctcggaggaagcccccaccgtgggcagggagcagccggccagcccctggccccaggacctggctgccatactttcctgtatagttcacgtttcatgtaatcctcaagaaataaaaggaagccaaagaaaaaaaaaa

SEQ ID NO: 644973 - DNA, 427 bp, Homo sapiens
  misc_feature (279)..(279): n is a, c, g, or t
  misc_feature (367)..(367): n is a, c, g, or t
  misc_feature (391)..(391): n is a, c, g, or t
  misc_feature (411)..(411): n is a, c, g, or t
  misc_feature (421)..(421): n is a, c, g, or t
ttgagatggagtttcactcttgtcacccatgctggagttcaatggcacaatcttggccctctgcaacctgcaaccttcgccttccaggttgaagcgattctcctgtctcagcctccccagtagctgggcttccaagtacctgccaccacacccggctaattttgtatttttagtagggacagggtttcactgtgttggccaggctggtctcaaactcctgacctcaggtgatccgcctgcctcggcctcccaaagtgctgggattacaggcgtgacacncacacccggccatgaatcaaccagtcttcttgatgtagtatcagaaatacttaggatgtagctttaaaggtctatatgaaaatagggntacttgtacttatctcggggaaanttttccaaatatttaaaacnaattttaaantaaaag

SEQ ID NO: 644974 - DNA, 891 bp, Homo sapiens
tggaaatggagtttggctcttcttgcccaggttggagtgcaagggcgcaatctgggctcactgcaacctctgcctcccgggttaaagtgattctcctgcctcagcctcccgagtattggggattacaggcgcctgccaccatgcccggctaatttggcatttttagtaaaaacggggttctctccagtgttgggctcaggtgggttctctaactccgtgaccttcgagggtgattccatccgcctcagccctcccaaagttccgggggatcacggggcggtgagccaccacaccgtggccatagctgtgtcttctcttatgggtggattaaactcgtgcattgtgctcccctaagaactcagatattacgtggtgggagtgcttcaaagggggtgtgtggtgttgctgtgtgtgtgtccagttaatccagaaatattcctcccaggaaaatagaagaccccaggagggaggtggggcaacaactctttatctgctaggggcagacagatcttcatgaaaacacattatgacctccagaactcgatgtgctccaccagccggccttagctggtcaaaagccacacctgggaattccctggtgaagcccccagtggaatagctcagtagcaggacgtggtagaactagaggatcctttactcacaggggcatctggatgtcctgagtgaagggaccagaacagaccctctgtgggagaccactcccggttgtgtaagtgaggtccttgcatggtaaacatcttgaagaagggaagaggtgtgtctggtgaagtcctcaacaaagcagaccccttgatttggagtcaggcgcacaggggtcatccgaaggggcctatacaacatgtcgcgttgccattggttgccaatgggcgg

SEQ ID NO: 644975 - DNA, 268 bp, Homo sapiens
aacgtagccggcctcctcgagaagcccggcgatgcgctcggagtcatggacattcatctgacacccgtaggtcacgactcgataggtcggggcctcggtgtgctgcaaggtgttattgggcatggcgcacacactctacgtcatgtactcgtcgcaacgtgtactcgctgacgaacgtgccgatcacaccaccgtctgaagcacgagcagtatcccgccatagacgaggacaaataccaccaacggccacacgaacttcagccagtgt

SEQ ID NO: 644976 - DNA, 455 bp, Homo sapiens
  misc_feature (283)..(283): n is a, c, g, or t
attgctgacattgtgtggatctcgtggtgatctcatcgtggctagacagtagtcgcaaggaaattctccattttcctaagggtgggggctatagtgtaccttattcgacgagggacttacctgtaccggtgaggcatacgccctagactcctaaggcggcagctgctaggtcttaggactagttagggatcattagcatcaagactctacagactaccatactgagaagatattccaccccgataggggcatgacaaattatcagtttcttactgctcccaangccaactatcccattcccttaagttcttgggttgttacgtggcacatcgcagaacagactcagaccaatgtcctgaattccagctagggtagttctagaaactttagcaagctccatcttttaatagtttttattatgttagtgtcccctatctcgcgcgatcgaagtagtg

SEQ ID NO: 644977 - DNA, 435 bp, Homo sapiens
  misc_feature (91)..(91): n is a, c, g, or t
  misc_feature (222)..(222): n is a, c, g, or t
aaagtcggcctgttccagaaggacctgtcccccccaccgcagggcccgaccctgccctcacggctaaggagtggttggggggtcgggatgntgggcccctcctcatctccctcaaggatggttacgtacccccaaaaaaccgggagtttagggtcaaccggggcctggacaccgggcgcagaagggcagcaccaaaggccagtggcactcccagctcggatnccgtgtttcggctggagaagaaaattcggaagctccaggccccggtgcaggagctccaaaagcgcttggacaggctggaggagacagtccaggccaagtaaagccccccagggcctccagcagggtcagccattcacacccatcccctcccctcccattcccagccccatggcaaaaaaaaaaatcataataaaatggctttattttttggta

SEQ ID NO: 644978 - DNA, 431 bp, Homo sapiens
ttaatgctcgacaccatagcaggttgctgcctcatgagaataagacatgtgtctgtaaactcttctacttctaagacccttattatatattttttttttggtagcaaaattccatggaaaagttgggtttcggtctcagagaagctaagggatttttcttttttttttcttttggactctgaggtcttcctcttggcggcgctggtttccagttcatctcggcaatacctacccgatcccggaagtcccggaaggaggcggggctgggcaccaccaaagaggagatcaccagggatgccgagggccgggatgagatggaccatgcggagagggagctggcgcggaggccagatcctcgggtccgggggcctgaacggtatacagccacgaaaaagaagatctggtcgagcttgtggggggctcctctagag

SEQ ID NO: 644979 - DNA, 689 bp, Homo sapiens
aggctgggtgttatttcgttaggtgctgaaggctgtggtgcgcggatgtgcccattcccacgtgaagcgctacgctagcatacgctcggctggcggctcccagctcgccgcaggagacagtcccggcagcagcgggggaccggaagtggctcgcggaggctcagaagctagtcccggagcccggcgtgtggcgcctcggagcgcggtgacgggccatgtccctaatctgctccatctctaacgaagtgccggagcaccccatgtgtatcccgtgtctctaaatcatgtttatgagcggcggctcatcgaggaagtacattgcggagaaatgggtaccgaccccatcaaaaccagctctctccgagggagcagcttcatcgaccatcaaagtttgctcacccaaaatccgggcccaaagcctccctcagccaccagcatcccgggccattctgaaagcttttgcagggattgaggtgggatgcagtcattgttgcacagtttcactctgcggccagcaggctgcaagacaacccggccaagagcttgtcacacgctcttgtaccaagcacggatggccggcctgccggtgtccatttgcccggtctcaccaagggaatgtcacttgctgcccgagaaagctctggctaaccctgaaaccacaggctgggcctcatttgtgccccaggctg

SEQ ID NO: 644980 - DNA, 784 bp, Homo sapiens
aactatgtaaatatatacccacccaatgtaggagtacccagatgcataaagcaagttctgaaacacctacaaaaagatgtagataaccacacaataatagtgggatactacaacatgacactgacagtattaggcagatcattgagacatacaactaacaaaaacattcaggacttgaactcaacacttgactaaatgggcctaatagatatctacagaactctgcatccaaaaataacagaatataaattattctcatctgcacatagcacatactctaaagtcaaccacatgattggccacaaaacaaccctcagcaaatcaaaaaaaaactgaaatcataccaaacatactctgtggactacagtgcaataaacaatcaacactaagaaaatgtgcttacaactatgcaattactttggaattaaacaacctgctcctgaatgactttgggtgaaccatgaaattaaggcaaacatcaagtaattctttgaaactaaactctagtatcccagagataccagaatctcgtgggacaaaggctaaagcagtggtaagagggaattttataggtgatgccccacatcaaaaagttaaaggatctctaattcataactaaggttcacccgggaaaattagaaaacagagcaaacaaggcaaaagtaggagagaagaaataccaaataagagtgatgaaggaatggaagggacggcaaagtaatcccatttattttaaggataaagagggaattgtaaataaaaacaggggggcagtgcttaaaag

SEQ ID NO: 644981 - DNA, 363 bp, Homo sapiens
tgagctactcggactctttattagaacaatcaatcattttcctttggacccacaatttttgcctctgctgcagccactttgtgagtgagcatgaatatgtctgtgtgaacacacaggcatgcgtgtgtatgcgcacgtacatgggccagaatgaatggatgtgtgtgtgtgaggcatacctcagatttttcttttcttattctgtgtcaaaatctcttttctacagattctccagggtttaagcactgcctgctgtataaaaaaccttcatccattctacatagttcgcatgaaatgttccttttaacaaccaaacaattgttaagtgttccataaaggttatgttgaattttaaaaaaaaaa

SEQ ID NO: 644982 - DNA, 114 bp, Homo sapiens
ttgatctgagaggatcccccccatgagcgagagctgtttcccggttaccacaccaaggcgcgggcggtgatgaactttgtggttcgctaccggccagacgagcagccgtctctg

SEQ ID NO: 644983 - DNA, 146 bp, Homo sapiens
acagaggaggaagcatcccaccagctggttaagaatactgaatcagggctgcagcccttgtgtgaccccgctctgggctgctattgaatacttctaaaactaggcattgctgactggagtatcttggtctaggtgctattgaaact

SEQ ID NO: 644984 - DNA, 305 bp, Homo sapiens
agctcgcgaccctccgacgaggattcagaagctgagatgggaggattgctcaagccctggagttcgagagcagcctgagcaacatggcaagacccccatctctaaaacatttataaaaattagcagggtgtggtagcttgtgtctgtagtcccatctactcaggaggctgaggcagaggatcgcttgagcccaggggtttgaggatgcagtgagctatgatcatgccactgcactccagcctggggcaacagagtgagatcctgtctttttttttttttttaaatgcttatttaaaaggccatta

SEQ ID NO: 644985 - DNA, 276 bp, Homo sapiens
cccctctcacagatccagcagcatcctgccacggggaactcacttgcgatagctcactcaaggcatggccagactcgtgaccgagtgcatgaccggaacgtgaagaatatgtaccctcctccttccttcccctactaacacaagctgcgcactggtgcaacattcttggcggcggtgcctaccccccagcctgaagcctgacagagctactaactcccttagccccagcactcccatcaccagcctcaactgcaaacccatcaccaatccccacta

SEQ ID NO: 644986 - DNA, 128 bp, Homo sapiens
tctagtcgtgacggggatactcaggaagtaagagtagaaagttgtacattagagccttttacttacagtttgcctaccttttctggggtggcacccgagggatgccttagggtctttataagtagatt

SEQ ID NO: 644987 - DNA, 128 bp, Homo sapiens
atcatctgtatagtcagtgcagagataatcatgataataattactcactggctttttaaaaaaggaaacaaaatacaaaacgggaaagcttattagttttcctcgaagaaaagttggtactcggatct

SEQ ID NO: 644988 - DNA, 423 bp, Homo sapiens
tcttttaagaaggatataataaattaaaaataattttcttgaggtcagactaaggaaaagtcaaagatatacaattgccatctctccaaatttattgattttatttatttattatttattattattattatttgagacagagtctcactttgttacccaggctggagtgcagtggcacgatcataattcactgcaacctcaatgtcctggagtcactgaagcctctcaagtaccttggactacagttgtgtgccacaatgcccagctaattttttttgtactttttttaaagacagtattttgccatgttgcccaggctggtgttgaactcccgggctcaaactatctgcttgccttggcctcccaaagtgctgggattataagtgttagccactgtacccagcccaatttactgacttaaaa

SEQ ID NO: 644989 - DNA, 237 bp, Homo sapiens
cgtcgttacctgtgggcagacagaaccgagtcatatttctcttctttcagaaagcgaacaggagaaatatcgctgaattcttttctcagcaaggaataaccctggaaaaaggaaggaatgcattcccaggaggaggtctctaaaatggccactctaggattgtctgtcttatgcagttgcaggataagggatgaaatactccctggtctcctgcagcacccccaggcttgttcagga

SEQ ID NO: 644990 - DNA, 296 bp, Homo sapiens
ccaagagaacatggtgcagaagctgacaaatcaaaagcacaagcttctaaagggcatcgaactaggcagtctgatggacaatgaggtggacctgccgatcgaggacattaatcagaatgtccttctgatgacccccccagactctgactcaggatcccaggatggctactctccctactccattgactctgagccaggaagccctctattgaatgatgcaaaggtcaaagatgagccagactctcctcctgtggcgctgggcatggtagaccgatcacggattcttctgtgtgtcc

SEQ ID NO: 644991 - DNA, 105 bp, Homo sapiens
  misc_feature (77)..(77): n is a, c, g, or t
gtgcgctgcagctccttcaagttattcttagagctggagccacaggtccgaggacatcatgtgcaaatgctacgggnccaaggtacggctcatgtctcaagacgg

SEQ ID NO: 644992 - DNA, 506 bp, Homo sapiens
ggaggcgggtgtgcagtgcgtgctggggccggctagtggcgccggagccgcacgcagccgcgtgggctccgagaggcgcgcactggggctgggactgcgcgtgcgccgccgctgcgagcgccactgagccggtcgcggcaacttcaggagtgcacagcgccgggagccatggctgatgctgctcagagacccggagccatgatgtgggctgctgccgtgagcctcagttcgatgagccggcgcctattgcaacccagctgtgctcacgagtgcccagtgcgtgcccatccgcggtatggctgttgcggctttccaggcttgcacccccacttgggaatggtgcacctggggcttagcaggcttgcctgagtgctgcccggggggaaggaacgggcggagcgacgatgatggcctagtgcgtgggagctgtgacaacaaggcgggcgtggagaacgaacttgggggaccaaggagagacaaggccccttgggagaaagaggtgcccg

SEQ ID NO: 644993 - DNA, 274 bp, Homo sapiens
aaatgcagtgcagtaatgctgtggctgagatggcacctccacgaacgtctatgtgctgggattagcgtttgtgtagtcaccaatggtgtcggtggtggcttaggcggaaggatgccaagtgtgtcctgggagcttggtttggatggtggtaatctgcaaagatccagggtctggtacaccccacaggccaagcgtcctgagctgaatgcaccattgattgcgtgtctttggcattgcctgtggggactgctcacctccaagtgccagggttgca

SEQ ID NO: 644994 - DNA, 463 bp, Homo sapiens
gtgtgtcatgcagagcgcagctttatgtcccgcccagccggccaggtgaaggaagaggcacgtgctcctcagtagcagccggaggcaggggggaggtcggaggtcgtgcaggtggtttgtgtatcttactggtctgaagggcgcaagtgtgtttgttgtctgttatgtatcttgtccttctgatcggagcatcacctactgacctgttgtaggcagctatcttacagacgcatgactgtaagagtaggaaggggtgggtgtcagcggatcacttggcatctttgaccaccttgaaaaattacaccctggcaagctgcgttaaagccttcccccatcggtgtacttgcagagttgagctggcaggggaggggctgagagggtgggggctggaacccctcccggggaggagtgccatctgggtcttccatctagaactgtttacatgacgataagatactcactg

SEQ ID NO: 644995 - DNA, 691 bp, Homo sapiens
  misc_feature (518)..(518): n is a, c, g, or t
gggggcgcctgagatctctatccgcaagggagggcgatcaatttggccaagcgactataacagggactatccggtataccttctgtataaggaattctctagaagacctttgcaaggagagcaagctggacccgggaaccggccgagctacctatgagcagctcatagaccacacgccggtggtgtatcaggatagaagggaagatccataggcagatgcgccaaccctaccgatcctagggatagctgtgcatccacgatcgaatattggtataacgctagatctgctcacgaaaccctataaatcccgtggctgatcgaactgttagtccaaagaggaacagctctatggacactagaaaaatgccttgtaaagggaggttaaagtattcacccccatactgggcaaaaactcagccacgatttctgaagccgtcaaatttggcccccacttccgtcattgaggccattaaacagataaaattgttattgcgccaatggcaaccacctaatacctnttgacggttcttcgaccgaacttatatttagcttaaggatcccagcggcatcgcacaataatgcatataattgccctgttggaggtctatgacactttgtattacatttccctaccgggtaaaccatgacgtacctggggtaatttccgccaccccagtttttttttcccgaa

SEQ ID NO: 644996 - DNA, 332 bp, Homo sapiens
  misc_feature (178)..(178): n is a, c, g, or t
gctgactctagaggattcattggatagcggatagcggccaagtacgtgatcgatgtggacacagcgttctcttgcacctccctggacgccgtggtcaactatttcgtgtcgcataccaaaaaggcgctggtgccattccttgttagaccgaggactgcgagaacggtgctaggctacngtggaacgccgataagggagaatggcgagacatgtgtgggtggcgccctccgctccgggcccaggtcctgcaccctgcacaggtggccccaagccgctgtcacctgctctagacaggacaagctgcccccactgcccctcatcgcttattcaat

SEQ ID NO: 644997 - DNA, 239 bp, Homo sapiens
cccacagttttggtgtgtgtacttcggtaaatttctttgtggccaaatattctctgaacaactcacaaacaccagcttgaatcctgaaaatagcttggttggtgacggttctcaagtcaatgacacggtagtctaatctggtgtccaagttgaccacgggcaaacctgcagcttcagcttcagcttcggaacgggaggcatcttccaaaaggattggcaatgcttctggagtctcggaa

SEQ ID NO: 644998 - DNA, 595 bp, Homo sapiens
  misc_feature (226)..(226): n is a, c, g, or t
  misc_feature (229)..(229): n is a, c, g, or t
  misc_feature (232)..(232): n is a, c, g, or t
  misc_feature (237)..(237): n is a, c, g, or t
  misc_feature (246)..(246): n is a, c, g, or t
  misc_feature (248)..(248): n is a, c, g, or t
  misc_feature (259)..(259): n is a, c, g, or t
  misc_feature (474)..(474): n is a, c, g, or t
  misc_feature (480)..(480): n is a, c, g, or t
tatgtgtgcccaggctggagtgctgtggcccaatctcaacccaccacaacctccaacctccccggttcaagcaattctcctgcctcagcctcccaagtagctgggattacaggtgcctgccactacgcccagctaattttttgtatttttagtagagatggggtttcaccatgttggtcaggctggtctcgaactcctgacctcaggtaatccacccgcctcgacntcncanagtgntgggattgnangtgtgagccantgcacccagcctgaatttgaacttctaaagaggtataatttggtgcaagataggtggaggttagaccaaagggagcattttctagtggtccgggtaggtaggtgccagaatagaaaaaaggaggccagaacattttagaggtttgagttcgaggctagaggcagctcagcttcctgaataagcctaggtagaggagcagttggcctgcgtgaggnggaggngaggaaggctgtgggcgggagaggagaacagtggcggagaagcaaggctgaggaaagggaaggcagagcgggaggagcctaggagggagaccctgagaagagaagggaggacata

SEQ ID NO: 644999 - DNA, 794 bp, Homo sapiens
ctgtttgaaggggcccacgagttgtagtgcgcgggataaacgctttcgatgcaaccaagcttgtaagaggcggactgtccctgtcttatgaagatctgggtagaaactcactctaatgaaagaattccggggatgtccagtgacagggaagccatatgcgttactgttgcagaagggataagctcgcttgcatgagagtgaacgtatggaaacgcctggacgacaatcaggagatagacagcgctctaatagaagggatacagacaacggctcgactgcacttgccctcgcgtcttcagaaaacagctagtagtagctccagaggaagtgtcgatggagatagagtgccataaccgcacaacaagagaagagaacaagtcatacaagacgcgccagcgaggttacctacagcgagaatagcgaaataggagacgaccctagtgcgatctgcgtgtctgccgaacccaagaaaaagaaatcctatgatccaaggaggagttggatgaagtagcgatccgttcgagagtagaacgcgcttggcagcagccaggatgcgccgatagacggaacgagagtcgacacccaaggaggagacagcgccaatgaccgctgacggaggcaggaccacagaagtggctgcaaggaaaagaggtgattctccgaagaaggagccggtcagacagtgggcctgaagaggccggatggcaagagcagctccaagaagaagaaaacagttccataaagcatcccaggaagagtagaatgcaaatgacagttctcgtgggatacgggcc

SEQ ID NO: 645000 - DNA, 486 bp, Homo sapiens
  misc_feature (319)..(319): n is a, c, g, or t
tggtattacagatctatatgtcagagaaaataagaatttcagaagaaaagaatcctatgtcagaatcagaaatatggaaaaatgagaaggcccaggaatggtgctccatgagattacatggagagtattgggttgcaggctgtttggaggtgtaaaacctttaggcaggaagagggtgaggtgtgggtgaaaagagctgaggagcatttcaagagaaacgttatcagaaaaggactctgcttcaacaggagagtgcaggtgacaccggaattccacatcagacctgtggacacttgaggtaatggcaggaccgtcctgngtaggaggcaggggacctggcagagaggggaagctggaggtatgaggcctggaaggaaagtacatagttacgtgcacagtgaagggaaggaagagggctgaggacagaatcctggcacaggcaaagaagtcagtgaagaaagatctaatgggaagggactgggtggc

SEQ ID NO: 645001 - DNA, 376 bp, Homo sapiens
ctaaacagcttataggggattgccctaatcctaataatcggggtgaattaaagggtctaagggctttcccaacatcaaactcctaatattactataacactaaaaaacacattcacacaaaatattatcttaaccactccgactcatacacaaataaacactaatatcaagtaacaacgcaaatctccccatttaatattaactcaaacatcatcactagtctaacattactctcatatttacaatcttccactcacccaaatacaacaaattatcaaatcacatcactaattcatacttccttaccccacttctcgcaataagcatcaaacactctcacacaattccctcctacatactctcacacctttacttc

SEQ ID NO: 645002 - DNA, 1302 bp, Homo sapiens
  misc_feature (541)..(541): n is a, c, g, or t
tctttagagggttgctcaaatcccgtgtgtgctacatcatatatgtccgatgtataagttgtgaaaatatattattattacctctaggaggagtttttccaccagggtttttagcgctaacccgtgaatgttttcctgtggaaggtccatgaagacgactatattccttatccgggagggccgttttcaccaggcctctgttcctggcacaaatttttgggtgggcacaaaattctgatagtcgttaggttgtcaccccaaggggccactatttgttaagttttgggccaaaccggaaattgccctttaaagttggggtaaaaaagggccattcttgggttttcccccctaatggatcttaaaatttgggtgacacattgttgaccacatgtcaatttcccggaagatttgggcgtttttacctgttgatgtaagaatggagagaaatttaaggtgtgttcccataattccgtattacccattaccctggtaataagaaagttccccaaaattttagagtttgttttaaaaaaattgctgnctccaccttaacataaaatttttgctgttttgtgtaaaatagccttttaaaaaagcccataaacatgttacaaaaattgttaagataacactggtttaatttctaaagctatccctggtggttttatgaaaaaatggttacaagagactgaggcacggagaaatgttttgtaattaagagaaaaggtaatttaacccggagaagatatgaggaaatatatgagtaatcttgccgaaatataagggccccttcacaaagctcttaataatatacggttaaaagacctcttggcccacactttttaaaaggaccactaatattttagatatttcctctttcacagtatttttcttaaaacacccctctttgtataaccacacaagtgttcttcgatagtgatcccccctcattatatttgggttttcttgtttatagccacttgattggatttctgtgataaatgcacaggcacattacgcacatagtgagccataattgtcgagttgtttccttgtgttgcttgtgtctcttttttggggcacttcacttgaaacacattcactttgagaatagcactatgtgtgtcttgaagtactttgtttttagcactaaatgttgggcacttttatcttaagtgtttggatggaaacactttgtgttgtttagctcttcactttgctttgtataatttaataaatgacccttattttccacggaagcctacattttgtattgccaccataaatttattttaagctgta

SEQ ID NO: 645003 - DNA, 647 bp, Homo sapiens
tccaaaccaaggctgtatcaggtcgttcgctggctgagggcatattctagggttgcagatgtgctagtgtgcccgcgcatggctttgctccgagcaagtgcagagaaggcgacgtgtgaggctatctaccatccctcctgtacaaagacactaatcctggagggtcaagggccgacttatgacttcattcagccttcattgttttctgctgaggacccatcatcccaaatccagccactaacagggttgagtgtcttgaacatgaaggtgcgaggcggggaggccacaagcatggagtcgcatgacagacgactgccaagaggacatggttgttcagagcaagccatctgagtcaagttgcaggcgcctcagttcagcctcgaggcatgcagtggagtgttgcaagtgttcgagacggggcctagctgctgggctgactgtcactgtgcgggagagcttcaactggaaaccctaatcactagctttcctgctagtagaaaccaccagtttacttaggaatctcagctgactgggtgcctcagtcagggctgtgcagagaaacagcaggagagacagagattgagatctcaaggacttgccttctgcagtgggtgagtccagcgggcaggtctggactccgtggacag

SEQ ID NO: 645004 - DNA, 122 bp, Homo sapiens
cggttattagaaacgttggtcttgagaaacaatcactgaagataaaggctacttgggagtgccagacgggtggatcacttgaggccaggctggtctcaaactcctgggctcaagcagtcctc

SEQ ID NO: 645005 - DNA, 140 bp, Homo sapiens
gtcggtaccatctccctctctcacgcgcatatctgctctttccctctctcacggtctctccttttcttctctgtttccagctgttgccgctccagctgcttctgatgcttctcctcccgggcctggctcttctgatgcag

SEQ ID NO: 645006 - DNA, 198 bp, Homo sapiens
ccacctcagcctcccgagtagctgggactacaggcatgcgccaccatgcccagctaacttttgtatttgtcatagagatggggtttcaccatattggccaggctagtcttgaactcctagtcttgaagaccttgtgatctgccctccttggccccctaacccggctaagtttttaaaagtttttgtagagataagggt

SEQ ID NO: 645007 - DNA, 153 bp, Homo sapiens
  misc_feature (11)..(11): n is a, c, g, or t
  misc_feature (22)..(22): n is a, c, g, or t
  misc_feature (75)..(76): n is a, c, g, or t
  misc_feature (87)..(87): n is a, c, g, or t
tgtgtgcatgntggctcgaagnctgcctcagtatcacccaccttggctcccgaagtgctgggattgcaggcatanncactgcacctngcctttcatccaccttagtcatcacttcctttcttctcttccagttcattgcaacacggtctctca

SEQ ID NO: 645008 - DNA, 115 bp, Homo sapiens
tttttttgaaaaaaaaacccccccctttggttggggggggggaaaaattttttttcggggggaaaaaattggcgggggggggttttttgcccttttaaaaggggggtcccgggta

SEQ ID NO: 645009 - DNA, 83 bp, Homo sapiens
ggtcacaatcctttgatatctccagctcaggtccgcgcaaggcactcggaggcggcccgggcccggccgggggagcgggcgcg

SEQ ID NO: 645010 - DNA, 368 bp, Homo sapiens
  misc_feature (127)..(127): n is a, c, g, or t
  misc_feature (289)..(289): n is a, c, g, or t
tgatatggagtctcaccctgtcacccaggctggagtacaatggcgtgatctcagcttactgaaacctgtctcccaggttcaagtgattctcctgcctcagcctcccaagtagctgggattacaggtntgtaccaccatgcctggctaattttttgtatctttagtagagatgaggttttgccatgttgcccaggctggtcttgaactcctgggctcaagagatccacccactcagcctcccaaagtgctaggattacaggcatgggccactacacccagccagtaattnctttttgtaagtattattctactttatgcgtactacttatggaccagaattttcagaagggcaagtacccctgcagcat

SEQ ID NO: 645011 - DNA, 748 bp, Homo sapiens
agcggtggaagtcagtgtggcgattcctcagggatctagaactagaaataccatttgacccagccatcccattactgggtatataccgaaaggattataaatcatgctgctgtaaagacacatgcacacgtatgttcattgcggcactattcacaaaagcaaagacttggaaccaagccaaatgtccaacaatgatagactggattaataaaatgtggcacatatacaccatggaatactatgcagccataaaaaatgatgagttcatgtcctttgtagggacatggatgaagctggaaaccatcattctcggtaaactatcgcaaggacaaaaaaacaaacaccacatgttctcactcataggtgggaattgaacaatgagaacacatggacacaggaaggggaacatcacacactggggcctgttgtggggtgaggggagaggggagggataacattagaagatataactaattgaatgaggagttaatgggtgccgcacaccaacatggcacatgtatatatatgtaacaaacctgcacgtagtgcacatgtaccctaaaacttaaaatataataccacaataaaatacacaatacataagtgaccatgctaaggagcaaacgaagatataaacagtttttaaaatctgagaatcgtaaagtatttgacaactggagaaatataaagcatatctaaacacagtcttttgcagagccatatgtgccaactgggagcctatgtacag

SEQ ID NO: 645012 - DNA, 139 bp, Homo sapiens
ctagagcatcccgtgctatcactattatctataacattatcctttttttttctccatcactttcacagattattcttagacatgcctcgagtattctgacttgccgctaacacctttttttttattgtgaaatggagtc

SEQ ID NO: 645013 - DNA, 111 bp, Homo sapiens
ccctagaggatcccggtcattttctacaccatcagaaagaattcctgaaaatttataatagaacgaactttattaatgcagaaaaataccccaggtgttaaaatatatgaa

SEQ ID NO: 645014 - DNA, 1190 bp, Homo sapiens
gccggagcccgctgcggccagcgcacggccctcaccccgtatcgcgacccgcgccccgccggccgagcatgggcgcgcgcgcctcaggcgggcccctggcccgggccgggctcctgctgctgctgctgctgctgctgctgctcgggctgctggccccgggcgcgcagggggcgcggggccgcggcggcgcggagaagaacagctaccgccgcacggtcaacaccttctcccagagcgtcagcagcctgttcggcgaggacaacgtgcgcgccgctcagaagttcttggccaggctgactgaagagacttcgtgctgggagctggactactgtcgtgcgagaccacctgatggacaacgtcatcggacccgcaacctccacggcattgtccctacgcgaacatcgaaccagtcctaccaaacactgaccccaagaataaacaacacacacagaaacatacagaggctccaaacaagcacaggaccaagagcacgacacacaggactggaacagggacgaaagaaacacacacctgaaaccataacacggcagacagaagacaccaagaacacacacgagaacaacaagaaaacaaaaacgacgacacgagaaaaagatggaaagaaccgaacacagccaaaacacacagagaatacaaaagacgataaaacaccagaacagcggacagagacacaaaaagaatacactagcagcatagaaaaactccaatgaaaaagagaagataacagcaagagggaaggaaacaacaggagcagaaacacaacagaggcaggatgcacagcacgccagagacaacacaggggaaggcgaacacgaaacaccaacaaccacaccgaacacacaaggaagaaacacaacaaagaggcaaacaacacacagggaccagacacgacaacagggacacacaagcacggaacacccagagcgaaaaaaaccacaagagaaaacacacacaagaggaagagacgcggaaaaaacggacagggcaaaaaaaccaatgagaaagaaaaggcagaacgaacagcacactgggaaacaagacgaactcgacggaagcagcagaagcaaaggcgaagagacatccaaagaacaagaaaggggaacgaccgaacacacaagagaaacaaacagcagaaaagagaacacaagaccgacacaacagacagagag

SEQ ID NO: 645015 - DNA, 100 bp, Homo sapiens
tacgggacccctgcccgctcgcggacagatttgttatccctgggatcatgagcgtcggtcttgcccacaggtcctgtgctgcgacgcacatacatacgtg

SEQ ID NO: 645016 - DNA, 232 bp, Homo sapiens
ttcgatgtgcagaggaataacattgccctggccttggaggtcacttaccgggaacgctacataaagcatataaggaggtaaagaatcgcctggactaccacatctctgtacagaacatgatgcgtcgcaaggaggaagaacacatgatagactgggtagaaaagcatgtggtgaagagcatttctgtacagcaggaaaaggagaccattgccaagtgcattgaagatctaaa

SEQ ID NO: 645017 - DNA, 291 bp, Homo sapiens
gggggggggggggtggggggggggggttttttaaaccaaggcttttttttttccccccctttttcggggggggcccccccccccgtttttttccccccttaaaaaccccgggggcgcttcccccccccggttttttcctggggcgggggggggggtattttttttccccggggacccctttgcccccttggccctttttgggggcccctttaaccccgttttttccaaaaaacggggggggggcgggccgggttttcccggggttttttgcccccccgggcccttttttta

SEQ ID NO: 645018 - DNA, 222 bp, Homo sapiens
  misc_feature (52)..(52): n is a, c, g, or t
gctatttaaagcaccagtctggggtcgcctgggcccctgctgaccccttccnccagagcagccagcccagcccgggaacaacccgaaattcctctcccttcggaataaaagcctttgcagagtcaagctccacttgaagctcactcagtaatatcctttcaatgtgttttaaattgttttgacggccttttttgtagaaataaaaattgcccttagaattta

SEQ ID NO: 645019 - DNA, 605 bp, Homo sapiens
  misc_feature (587)..(588): n is a, c, g, or t
ggctcggccctcatgcccatgtcacaggggctctgtggggccgctctggtgaagtccatcaaatcaggattcatcccgagttacaacacctctgaggcctgcaagagggctacgccccagcaattaccccacggatctatctgcatgagctcatgcatgaagcctctcactgatttgctatttgtaacaacggcacaaggctggagagaggctaaatgttctttcatatggcatgtcctcacacagatctcctgacacaggcatattttcactaaaacaacaaggcacacagcaatacaatgtgtagcatgactttgtgcaggaaaggggcaggagaggaggtgccacctagtgttctctgcaggatgtgcaggcgacgctgcagcagcagctgcgtgtttctctgggatcctttggattgttatgctccacaaactcagaaatacactacttatcccagaggcactggctggccatgtctctggttctggggagtaagggaccagcccagctgaggacgcggtggacagcccagggaggaggagcactcactgcaggaagagcttcttcatcatgttgtgacatgnngtgaggtccgagctcct

SEQ ID NO: 645020 - DNA, 165 bp, Homo sapiens
tctgtagtcttatttcactacagattgaactagggagataattttcttcttcacagacaaagatctttaagtttcttttctctgattatttgatcaaggaacaaagctatattacaagacatggcgacaaaatccaggctgttcatttactagccaacccctcaa

SEQ ID NO: 645021 - DNA, 223 bp, Homo sapiens
taatgtggtggtcgtgcaggtaaaggcttactaaaagtgtgaaaacttaggcttggattaaggcgacagggatttctaggatagtcagtaaaattaaatattggtggaaaatgataatgtgtgtaaagggaaggttaatgggttggatattggctaggtgtgggccgcttccaattagtgtgcatagagtagtgtggcctgggcgataatgtgtttagcgcgg

SEQ ID NO: 645022 - DNA, 1052 bp, Homo sapiens
gcagcctcgctccgtgccttctgcgcgcctgggatccctggagcctgcctagtgttctgtgctgctcccgcccaggccggtgcccgccgccgctgcgccccaggcaggtcccaggcctccggctgctcccggcctgaagccccgagtgcgagatcgagcgtccctgagctgcctgacctgcagccctggatcagcctgcggcagcgctggcctggaacagagtgtgtctgcggttgtacagccctgcgaggcctcggaagaggagctgggcctggtgcacagcccagagtatgtataccctggtacagggaggacccagtgttcctaggcaaggatggatgctgcagggcgctgtccggacagttcgacgccatctacttccacccgatgtaacctttcactgctgcgcggatgtccgcaggggctggactgcagcttggtggacgctgtgctcacctggagctgtgcaacacaatgggctttgccactgttgaggcctcccgggcaaccagtggccagagggtctgtgctgccaactgggtttctgcggtgtatcaacaagctttggccattcatgcagcttgacctatgccaagcgagacaacaattgggctacaacgagtggatcccctcggtcgttgaacttggtgctgttgccacccattgtctccagtgtggatcccaaggtattcactttgggaggaattgatccccaagcgtccctttcaacttttacattccctttgggaaccccgtggttaatttgatgccagttggacgcgcctatcctatggcgaccaaatttcctcgtttgccaacaggaacgttcaaaggaagttcgcacgcgaccgagcagagtatgggaggcgagggcgctacccacgtcgcgcacctaccgggaattaacagctatatgtacaaatccccccttagcccccttgtacacgccaagcgcgtctagcgccaatgctgttaaccacctgccattagaccattcacgtttggacctatcgctctattccacttgtcagccgtagacgtggatcccgaac

SEQ ID NO: 645023 - DNA, 107 bp, Homo sapiens
  misc_feature (28)..(28): n is a, c, g, or t
aatcattggctcacatggagcttttagncaagtgctcatcgccgtgcacagcccaacactatttcttattcatctctcttcaaaattgtccactgaaggcaattcca

SEQ ID NO: 645024 - DNA, 603 bp, Homo sapiens
actgtaccattatttggttcctggagttatacactaattttcagtatattactgttaaattaccaacacaaggcaatttatttgaaagattccgtttatcctgccatgtgctctgaaaagcagcaggaaacgaaatccttgtgactgtgtatcagcttcttgcagagcatctctgttttccttgtgtccttgtgtttcctacctttgtgaatcagattccgttttagtcaggaagacttctgtgggaccattcttagtaacctgaaatttcttttttaatggcatgaagtggattgatcatgagcaaatgatgtgcttatttctccctcactgttggaatatctttgaactgtgctgtttttcaactatggggcagcaacaaagtgttgagaggataccattatttaaatcagtaagttattggtattactcttataacattagatacctatatttaaatgaaaggccaattgtgtacactatacattcatattctctctgtgcccaagtttaggacatgttaggatataggagacttaatttcataataatgagagcattttttattttactaaaggcatttttataggtcaactatctttc

SEQ ID NO: 645025 - DNA, 184 bp, Homo sapiens
  misc_feature (153)..(153): n is a, c, g, or t
caattataaagatctgtagagcaaaagactccatatataaggtataaagatgacagactggaaaaaaatattatctatgtatataaagaatacacatccacagattccgtatcttctgggatgtaataaaaaagccacctcaaaacaatatgnaaaatgccaaaaacctcaaaaggaaagtggc

SEQ ID NO: 645026 - DNA, 1011 bp, Homo sapiens
gcctgttttaaacgagtttcttcaactccagtcagaccaggtcttgctggtgtatccaggacagggtatggaaagaggggctcacgcttaactccagcccccacccacacccccatcccaccaaccaaggccccattgctaggaaatgaacgaggccacttccttcggataatcctgctggaggagagattattagtgacatgtgcagttgggttgcttgctagaatttatttaaaaaaacaagcaatttaaaatcttatttaagttccaccagtgcctccctccctccttcctctactcccacccatcccatgtgcccaccattcctcaaatccatctaaagagaagccgacatgactttggaaagggaggcgctggggtagaacctcccagtgctaatctcccctgggaccgtcgccgaggaatcctctctgcccaattctgcgagggtcgtaggacaccatttaggaagccatcacggtcgtccttaagtacgccgacgagaaccgtgtctcacaccaccttgggccttagaaagccacagacaaaggtagatgccaacctctcctgtcaaagagaagtactcaccgcaacatagagagacggcggagcccaaagacacaggattaacctacaaagaagaggatgccacccaaacaactatcagttaagaagccagatagaataaaacgatccagccataacaattaagataggtggaatggcctgcctgcaaactgaccgaaatgcaataccccaagaatggccgtagacaaagcaaactgtgggatagatgccaggactaacaagaggacagggaccaaccagacgactaaacagcaagtgaactggctaaataccatgatcgttacaagcgacaacaggggaagggagacccacaatccgataacacatagaggacgacagcaacaaagtacaagtagcaagtaacaaacaggggaaaaaactaaaagacacccggtgcgttaatagctgcacaagttgcttggt

SEQ ID NO: 645027 - DNA, 97 bp, Homo sapiens
cttgttccaaaaagtagtaaccggatggaattttggtatttacaggcattggtgctaaatgggaccttttatgtgttaaaataaaccttgtttttga

SEQ ID NO: 645028 - DNA, 954 bp, Homo sapiens
  misc_feature (25)..(25): n is a, c, g, or t
  misc_feature (74)..(74): n is a, c, g, or t
  misc_feature (115)..(115): n is a, c, g, or t
  misc_feature (123)..(124): n is a, c, g, or t
  misc_feature (126)..(126): n is a, c, g, or t
  misc_feature (131)..(131): n is a, c, g, or t
  misc_feature (150)..(150): n is a, c, g, or t
  misc_feature (171)..(171): n is a, c, g, or t
  misc_feature (181)..(181): n is a, c, g, or t
  misc_feature (193)..(193): n is a, c, g, or t
  misc_feature (200)..(200): n is a, c, g, or t
  misc_feature (211)..(211): n is a, c, g, or t
  misc_feature (227)..(227): n is a, c, g, or t
  misc_feature (259)..(259): n is a, c, g, or t
  misc_feature (261)..(261): n is a, c, g, or t
  misc_feature (267)..(267): n is a, c, g, or t
  misc_feature (278)..(278): n is a, c, g, or t
  misc_feature (281)..(283): n is a, c, g, or t
  misc_feature (334)..(334): n is a, c, g, or t
  misc_feature (344)..(344): n is a, c, g, or t
  misc_feature (346)..(346): n is a, c, g, or t
  misc_feature (348)..(348): n is a, c, g, or t
  misc_feature (375)..(375): n is a, c, g, or t
  misc_feature (392)..(392): n is a, c, g, or t
  misc_feature (423)..(423): n is a, c, g, or t
  misc_feature (463)..(464): n is a, c, g, or t
  misc_feature (466)..(466): n is a, c, g, or t
  misc_feature (476)..(476): n is a, c, g, or t
  misc_feature (483)..(483): n is a, c, g, or t
  misc_feature (537)..(537): n is a, c, g, or t
  misc_feature (573)..(573): n is a, c, g, or t
  misc_feature (687)..(687): n is a, c, g, or t
  misc_feature (708)..(708): n is a, c, g, or t
  misc_feature (761)..(761): n is a, c, g, or t
  misc_feature (827)..(827): n is a, c, g, or t
  misc_feature (835)..(835): n is a, c, g, or t
  misc_feature (949)..(949): n is a, c, g, or t
gcaactaatcccaatactccgaatnggtcgcaggccgacagcaatcccctgaacgcctgcagggctcttatcangcgaaggcatccactgtagaaagaggcgacacaactctacncccaaaanncnccaanaggcccctcaaagcctacngaacaaaaacatccttcaacnggaaggaacnggcgctgttcanagaaagngaagacatgcnccgctttaaaaaaacnatcttctcaactcttgaaaataaacctctttncnctcgtncccctggaacngannngtccttggagaaatatcgcaaacagaacttccttcaatgcaaacagatctncaaatataantncntcaatatcgaagaatgtttcaaaaacnctctaaaagtccccgcnttgattcaatgcctagacatgtataaatctnctctagctgccaaatacctcctccatagcttggttttttnntnagcagtttanagttctngttctgaaagacatctcacatatattcaaaagatcttcaggatggagatttttngatgttttgctctgaccgaattaagccacggcagtnataccaaggccattcgcacaactgcccactacgatcctgccactgaggaattcatcatacattcccctgatttcgaagctgccaagttttgggttggcaacatgggcaagacanccactcacgcggtggtgtttnctaagctgtgtgtgccaggggaccagtgccatgggctgcatccctttatcgtncagatccgggacccgaagacccttcttcccatgcctggagtgatggttggcgacataggaaaaaantcgggcanaacggtctggataatggtttcgccatgttccacaaggtcagagttctcgccagagccttctgaaccggatgggagacgtcaccccgagggcactatgtcagcccctttaaagangtaag

SEQ ID NO: 645029 - DNA, 498 bp, Homo sapiens
  misc_feature (26)..(26): n is a, c, g, or t
  misc_feature (34)..(34): n is a, c, g, or t
  misc_feature (38)..(38): n is a, c, g, or t
  misc_feature (61)..(61): n is a, c, g, or t
  misc_feature (72)..(72): n is a, c, g, or t
  misc_feature (89)..(89): n is a, c, g, or t
  misc_feature (97)..(97): n is a, c, g, or t
  misc_feature (170)..(170): n is a, c, g, or t
  misc_feature (372)..(372): n is a, c, g, or t
  misc_feature (410)..(410): n is a, c, g, or t
  misc_feature (432)..(432): n is a, c, g, or t
ctccccccggacccctgtcccttccncccccccnaaancaccccccctaaaaccccctccnccactttccantccctccaccaaaaaantaattgancaccctccctctagccgctggggaagtccccacactgaaacaaaagaaacagaaaacccctgtccttccccancagttgagttcctagggccagggagaacagagtttaacaagataaggaaaaatatatatgtagtatgcctgccaagttaactgcctgtgtgggaaatcccagcagggggtgggatgtgtgatttgaattgagggccacactgccccaggtcgtgctccgtcaaggggtgacaggagcaacaggggtggctgagtaagggctngcagctggaggcaacagcacatgcaaaggccctgagcnaggatgtgctgcaataaggccntgagggggacagtgtagttgggggtgaggaatgtattaaaagatgagattgccttctaaaaaaaaa

SEQ ID NO: 645030 - DNA, 219 bp, Homo sapiens
gtctgccttctgccaggcttgtcagacatacttctggtgggcactgagccgaaactttatgatcaaaaacccctccctgggttcctttgaaccacttgacatcattttaatttccttctcctggcgtaagggggtaagggccaaaaaatgcctaggcaattttgaaaagaggttactttgccttaaaacctaattttttactaccagctcctaacgttt

SEQ ID NO: 645031 - DNA, 2012 bp, Homo sapiens
agcgggcttacgcagtcccagcctccgcggcgcccccaaatgccgcactgttgcgtcatctcagcacatccctccttatcgcacatgcccacacaccacacaaccacgctacacaccagccgagacaagcacgacaagcgaacacacccgcaccgccacacgcacacagcacagcgcccagaaagcaacggcaacgcaaacgcgagcgactatatacacacacacacacctccacaccaacctaaattcacacaagacaaaaaaaccacctcaaccaccaacacgacacaccctacacataaaaaccatcaacacacaccacaccaccacaccaacccacacacaaaaaaaaaaaacaccacaccctacaaaaccataaacacccacctacccaccaacacaaccaccatacaaacaaccacacaaaccatacacaacaccacacacatcaataaacaaaaccacacatcaacacaacccaaaaacgaaaagcagagccgacaaaaacaagccgagctacagacacgaggcaacgacacagagacgaggaacggacggcacacaagccgagacaagccacaacacacgcggaacgcccaacacaacaacgaggacacaccagagcaggagaccgcgacggcgggacgaggcgcagagccgaccgcaaacagaccccaagcccagcggctgccgacaccccacgacgcgacgaaccagcaccgccggcaagccaggggccaggtaaacggacacagacgccgcaggacgacacatgccacgacgcacaacaagcggccaggccgcgagcgacagccgagaccgacgcaacagaagaggcgcgcacaagcgaccaggcacacccccccgagagacgacggagaactaagaagaagaaagcacgcgaccaggcggactcgaggagcgacaggcaggggccacgccaggagcaccgcacatgcgcgacgagcggggcacaccagggccgctacggcccacaacaagggacgggctgatagcacacccgaaagccggagcgaggcgcgcaaacaagaacagccccatgcgatcacggagagccacgcgcgaggggagcgagatgaagcagacgcagcgcggcgggagggtgcagagcggcaacggcggaggcgaggcacggacagcgcggaggggcccaggagcagacaaatcggagagacgaggacgcgggcacagcgcagagacgagggcagataggcagatagcgaagacgcacagccagacgaccgggacccgcgcagagcccacccgccacgaccacagaacacagagagacatcagcccaggcgcacagacgacgaggtgaggagacagacgccagcacacaaaacgacagaccctgcgacgccaaaggcgccgcggatagagccccagcccaggtcaacgaggacggagcccgctacacgacacgagcgagcggcacgaggccacccagcgccgaggccggcacagaacccggccacgcaccgtgagaccgctgctcacacgacgcacccgacaagcgacaacgaagactccagagaacgaccgacagaacagacagcccgaaaggaacgcgagagcagacgcaccacccaacggacaacgacggaagacagcgaggagccactagaggcgcagagccagaaaccagcgagtgaggagagaagctccgaaagaacaccgatgcaccaactaccccagaccccacaccagacgacagccgccacagcacgacagaaccatgcgcaggccgcgcacggaaacaacgtacgcgggacaagctcgacgcgaacacgcagcgagaaggccggagcgacggccgagcgcgagagcgcagcaacagtgagagcggaacgacaccggggagcacgcgggctgcacggccggacgacagaagcgagcgagacacgcgacgaggagacggcccgatggcggccacgggagagggggaagacgaacctcgggacgcaatcgagcgccccgctcgccccaca

SEQ ID NO: 645032 - DNA, 404 bp, Homo sapiens
cacagtggttagtttttgtgcgggattcggtctcctgagatgccggcgaggggtcgcccttaggctgagcgagatggtgctgatgttctaagcgggtagctggaaatgtgaacggctgcggatctgtcgcaagatccacagtctcagagactcggcagcaacttccatgtcttatgatccagagaagctccaaaaagaaagcaggagggagaggggaaaaacaatactacattctcagcagagggctctgcgttaccaaaaccacccgcaacaaaggaatattcagtgggatagtttttaaagggacactcagttgccctctgccttttccccatcctcttcgttccacaggtctgaaagccctggtagctcttcctacaggccttctggcccatcagggcagt

SEQ ID NO: 645033 - DNA, 136 bp, Homo sapiens
atccgttacaccgctacggtggcaggcacgctctctgcccgtgagcattcaggtcaggccgtcacagccgtcttcaggtcacctccaggcacaggccgcgtgcggggggatgtatgggctcctgctgccttggggg

SEQ ID NO: 645034 - DNA, 508 bp, Homo sapiens
atatacaacaagtttcacattatgaagtttgttatataatgtgcctacattatccctagttatatatccgactctgtaggctttcttcacagttaaatacagtgagccagctgctttgatttctccatgtgatgtcctgttacagtctgactgtgctaaacacatatcatgggtacattgtaagcagaagggaatggggtgtagacttcctctgaagctagatccacctatctcctctggataattcaggccaagaacctgctcagccatctcagtccactaaacagtccttgcatcatttctttctgcagttatgaagttacaaaatgactagaatggacttcaacagtcctctaagaggacagtctgtcaggatcagatagcagctgctcaacataaaagatatcttccctgatgataaattctgatgtgtccttttcattacatttcaagttcaacatttcaaaataactaaatctaacagcaaatgtgtaaaagacaaaactac

SEQ ID NO: 645035 - DNA, 555 bp, Homo sapiens
ggaaactgagtatgagagagggtgcacgtctctgactcagaaaggaaaattggagccagccgaagaggatacaaaggtgtatactagagaaacactcagacagtcggtttaaatcggacagaagtcctaggcagctgtcatagctggtggagttgttggctttctcttggcaatttttcttatcctgctgttggtgtatcgcatgagaaagagggatgaaggaagctatgaccttggagaacgcaaagcatccagtgctgcttatcagaaggcacctactaaggagttttatgcgtaaaactccaacgtagggtctctatttatgagatcactgaacttgtcagaataaaggtgttgcatagaataatgaagatcttggtttgtggttttcattaaggagccattctggcagtttaagtgataaaatcccatcgtatttagaacatttgatgtattgcttgagagcaacataaagttaaaatttaacatctgcagtgttctgtgaatagcagtggcaaaatattatgttatgaaaaccctcgatgttcatggaat

SEQ ID NO: 645036 - DNA, 241 bp, Homo sapiens
gatgacaaagatgcacagtcccccgggacacaaggatcattcacacctacagccatatcaaccccagtgacttcaagtcaatatcctccgtctccctctcgaacatctacaccttccgtttcccactccatggaatccgtgtcaatggccgagatcgtgggagctgtgggccatcagctgtcggaaccgggactccttttccaactgggattccatctgttccttgagctccttcagctcg

SEQ ID NO: 645037 - DNA, 189 bp, Homo sapiens
gcctttaactagcttggatgaaggcactccccctccccagggatttctctgcttgcagcttccaggtcattctacaggtgccctagaatatttctctcaacggggaggagagcggtcagatcacgtcattcaccgcataaaaactaccagtgatgcccaaggtcacaagtccatacagccacatacggc

SEQ ID NO: 645038 - DNA, 1205 bp, Homo sapiens
gtcgctccagatgctcttgacgattccacagataccccgaagccatggcaagcaagggtttgcaggaccttgaagcaacaaggtggaggggaccgtccaaggaagccgtgtcagcggaccggagcggcaagctacaagaaacgtggctgaccaaggccaacagaaggcggggcacaagacaaggcctattgtgcacccaagcgtgggcccaaagaaccaacccagggaacaacccaattggaaccaaggcactgctaccccagggccttcaggaagaaccttaccaccaggcgaactgggcgagaccaaaaaatattttcggggccagtctctatagaaaaatatcgcaacaacacaagggggaaaaacaccattgggcaatatccggacaccaatccacttgaaaaacgtgtggacacaaggacagggcgaaaataaacctttgtgagttgtaccccccccacaattatccacaggtacggcaacaatagtaaagcgaccacaaattggcattgtggggcccccacaaaggaaatctcatccacgaggtgacccaaaggcgcatagccccaatgccctaccaagtcggggagtcacgtggcccccaccgtgtctcaatttaaaacacgagcttagcaaggggatacacaactaaaacgcacacaaaaaaacaaagacacaacggatagatataagaaatagaaagaaaacgcagaggggagtgcgaccgaggcaaacccgctgaggcggcgccacaagcggacgaaaggaagaggcgtcagcacaaagagaagacacggagaggaaggagaaggggggagcaagcagagagagagaaaaacagaagagggagagcaatgaaaggaaaaaaacagcacagtgagaacaagagagcgaacgagagcaaccaagaaagaggaaagaaaccaatctggagcaacacaaaaaaacaagaaggagagaaagaatagaatcacaatgtttatccccacaataaaaaaacaaacagtaggcggcccgcgagagggagacgaacaaacaaagccagggaagacaaaacaaaaacagaccgcccgaagagagaggagcgagaaacaggagaccccaagaaaacggcgggaagaataaaccgaaaagaaaggaaagaacacagagacagaccagcagcagaaataaaagaacgcgggcgacccagcgacacaaag

SEQ ID NO: 645039 - DNA, 436 bp, Homo sapiens
  misc_feature (302)..(302): n is a, c, g, or t
aagtactagatacatgctacaacatgcataaactctgaaaacatatatgctacataaggtcataccagacacagaagtccacattatgtataactctataggaaatgtccagaatagacaaattcacagagacagatagtccattactggttttcaggaggtggacgaggaaggaacggagagtgcctgctaatgggtagagggtttcttttttcagtgatgcaattcttatagaattagagtggtgatggttgcactattttgtacctatactataaccactaaaggtgcacttaaaaatnactttttaaaatctgtttaagaatacaatgaatagcatttttttaaaatgcaatgaatagcattttacatatctcatttcacacaatatattatttgaaaaggcctggccaggtcaaaggagatatgtaacttt

SEQ ID NO: 645040 - DNA, 133 bp, Homo sapiens
cagggaacagcggttcgctccatcatgaagtgtgacgtggacatccgcaaagacctgtacgccaacacggtgcttgtcgggcggcacaccattgttatcgggcattggcggacaggattgcagaaaggaagat

SEQ ID NO: 645041 - DNA, 336 bp, Homo sapiens
agtgtggcatcacctgttatcccagtctactcgggaggccgaagcaggagaatggcttgaacccaggaggcacaggttgcagtgagccgatatcgaagcaatgtattccagcctgggtgacggagcacaatcctatctcgaagaatgataaaatagaaaaggcatagaagctccctgggtgtcatgtatcacatgagaatggtaagtcaggtcttctctgactcctacgacattcctctctctgtctttgcgggtagacttccttgttagaagtctatcttgttagaggggcctcgcatctagcccttggcttctgcagcagccctcgttaatcct

SEQ ID NO: 645042 - DNA, 309 bp, Homo sapiens
ggattttaaaaggaaagggaagggaaaaccaagaacctagtggttttcccagtggttggcaactttcccaatgtttgcttacttttagggttggccctgggggccagggcctgccccagggctcctggaatttcccttgatccagctagggtggggccctccctaaatcaactgggtgttgttagcctcaggcagaatgaatggcagaaagtgattctgttttcataaagggggggggacttttccctaaggcatttcagtcaaatccccctccctgtcataaattcaaataaaatgtttgaacaagga

SEQ ID NO: 645043 - DNA, 534 bp, Homo sapiens
  misc_feature (290)..(290): n is a, c, g, or t
  misc_feature (329)..(329): n is a, c, g, or t
  misc_feature (341)..(341): n is a, c, g, or t
  misc_feature (348)..(348): n is a, c, g, or t
  misc_feature (381)..(381): n is a, c, g, or t
  misc_feature (383)..(383): n is a, c, g, or t
  misc_feature (398)..(398): n is a, c, g, or t
  misc_feature (425)..(425): n is a, c, g, or t
tatggaaggcctccggagcgcacgtctggcagacggctccctcgtatgagcgaatcagcgagctctctccccagctgtattccaaaatgtcgcttctaacaagctgacgctggacaatgctggacgttaaagggaagcgggtcgttcatgagagtcgacttcaatgttcctatgacagaacaaccagataacaaacaaccagaggattaaggctgctgtcccaagcatcaaattctgcttggacaatggagccaagtcggtagtccttatgagccacctaggccggcctnatggtgtgccatgcctacaagtactccttagagccagtnctgtagactcanatctctnctgggcaaggatgttctgttcttgaaggacttntnaggcccagagtgganaagctgtccaacccagctgctggtctntcatcctgctggagacctccgtttcatgtggaggaggagggagggaaaggtcttctggaacaggttaagccgccacaaaatggagcttccggctcacttccagctaggg

SEQ ID NO: 645044 - DNA, 1021 bp, Homo sapiens
tcaatacgcgaccgaactcccgtcccatgttgcgagggtacagatatgatctggcgtcctgatactcggacgctccggtacagacaaagcatccgggcacgtacctgtcagtgtccgtatgccctgacgcgtgcgctgcaggccggtcggactgtatcttgaggagctggagggaaccatagtgctaccccaggtctgctccggcggctggccacgagtgtcctttggctagcttgacttgttacgtctgccagtaaggttggtaggacgctgtccaatacagtcgggatggcgttggtgccccatgactggttccgcccatggtatttctgggtgcccccgagtgacttgcgtgtattgcgctgtccgataaaacgtgtttcaccgcgtgttgtggacgtcgtctcctgtctgcttgtgctctctcagcgtctcttccatcggtcatgtccttgcttaatagtcttgggggcgcgcctggccgctaggcgaaccacggctcttgtcccattggtcgtatcctcgtcaccgttaggctagagccatagcgtacgtttgcacccttggcgatgccttccggttaggagccatccactctattctgctccattagcaagccttaagccacgcgctagttcggcccgtctattgattttttggagcgcctacttatggtttgcgttctaacatagtagttctttccatagttcttttccccgcgtgacacataattcacattggttcgctacatgctgcctcacctctttgcggtctttgactcactgttccttcatcactaagcctgtctcattatcttctccgtattcttcgtctccaccggtccctaggcatggcttggccttcattttttacgtacttagatagactcgaaacctcattcctccatcttttttttgatcccttcccgcgacgggggtttgaacccgttctatacctgttccttgttcttgatttacggttccgcccttgggggttgctctcttattctaccagggttcgg

SEQ ID NO: 645045 - DNA, 848 bp, Homo sapiens
  misc_feature (368)..(368): n is a, c, g, or t
tgagcgaggaaccctctgcgccatgagagccaagtggaggaagaagcgaagtgcgcaggctgaagcgcaaaagaagaaagatgaggcagaggtccaagtaaaccgctagcttgtcgcaacggggaggcgcacaggagcagaaagcactggagatgccagacgctggggatgctggtagcaagttgtgggacgtgcagtggctactgtctagagtcttggtctcaaatgggatcgtagaaccgttcatcgacccgtctgattcgccgtatcaccatctgtagactcctaaactttgcgtacatagagatcaagaatgcccatatgttgggtccatctagcccgtggacctggtgactattactaggacntattgtctgtggttgattgtgtgagccgacgtgtaacgaacctagtataataaatcgaccgtattccggcctgtatgtctagactgaatgaattaagatcgaaaataaaaaacacaaaaaaagaatctaaacaaaacattacaagaaagaaatcatgactgaaaggaaaaacgaatgcccaagaaatcaagcaagatcatcatggaaggagcaaatatccgaggcgcagggcaaagcatacattggcgtgcgatcgcggttcaaagggccggggacagatgatggccgtagcagatgagcataatgctgcataaaagggcgaacagaggttgggagatacaaatctagaagggaagaatccaggacccacaaaagggcaaataaagaccaagggagaggacgtagaacccaatgtgacagagaaaaacgacacaaacaagaaagacagcacacgacaaaaaaggagacaagaaaacagca

SEQ ID NO: 645046 - DNA, 351 bp, Homo sapiens
acatcgctagacggaggtggcctgagtcctggccaggcacagaaacgtgaatctcaccatcttcaccgcccgcctctaatacttctgggatacagattaccaggatgggctccgctgtcctgagtcagtgacggggcctccgtggagatcatgtgctactaagattttaaatattgttggtgataactttgtgtactatgataataagccattcgagccttggaccggactcaaatacaacttcctatccctggactgcatgttgcaggagattctcgagtgaggggtctcccatggcctcatggtctgtctcctctagcctcctgctcatgctgtgcaggtctcccctag

SEQ ID NO: 645047 - DNA, 700 bp, Homo sapiens
gcatgcctgtactctctttcattaaggtcttgaagtcaggctgccccctccacagtaggatattcacgtgaatactctagaacagttgtgtccaatagacgttgtaagcggcagtgcctagatatatagactcagtatagtaatactttgcaagtggtgtctatggtgccgtcgatggcgacataactcgtagatgagtgcacgaccatattgttatacatgcttatgtatacggcatacctcacaaattttgtatatctaggacagccaatgtttgggaaacagttgtatgggcataacaatatgcttgcagagcaattgcaagctgctcccacctgcgtacgacttctccacaaacttgtctcggtcataatatcccatgtctgaagatacacctgtgcaccactgaccggcttgcatcgccaaacaggcccctacaacaaagacaaaagcatacgaataagatacccgtgcgacactcgccgcgtacaaaggtgaacactgagcacgacccagacacgacacaaagaagagccacgaggcgctgccacggaaagagggcgccaaacacaaacgagagaacgaaccgcaaccagccaaaacccgtcgcctcaccacaaggcgcgctgagaaagaaggcgaaccctccccacacgacctcggggccccgactacccacgacaggggccagagacgccaa

SEQ ID NO: 645048 - DNA, 581 bp, Homo sapiens
  misc_feature (130)..(130): n is a, c, g, or t
ggtgcaaagtgccaatagtagatctcgaaggttccggggctccatgcaggctttggagataaagtgcaagtcccagctcagcataaaagcatcctcgcagggcaactgagcggagacagataaccgtaantgcgtgcactagtcccagatacagaggatgattggcagcgtgaaggagcagatggcccagcttcgttgtgagatggagcagcagaaccaggaatacaaaatcctgctggatgtgaagacgcggctgaagcaggagattgccacctaccgccgcttgatggagggagagtatgcccacctgactcagtacaagaaagaaccggtgaccacccgtcaggtgcgtaccattgtggaaaaggtccaggatggcaaggtcatctcctcccgcgagcaggtccaccagaccacccgctaaggactcagctaccccggccggccacccaggaggcagggaggcagccgccccatatgccccacagtatccggcctgtccagcctcagccccgtgtttcagtcccttccccaagcttccttgccttagggcgatagagtttgttgaatcagctaacaaa

SEQ ID NO: 645049 - DNA, 607 bp, Homo sapiens
  misc_feature (12)..(12): n is a, c, g, or t
  misc_feature (78)..(78): n is a, c, g, or t
  misc_feature (121)..(122): n is a, c, g, or t
  misc_feature (129)..(129): n is a, c, g, or t
  misc_feature (143)..(143): n is a, c, g, or t
  misc_feature (195)..(195): n is a, c, g, or t
  misc_feature (374)..(374): n is a, c, g, or t
  misc_feature (376)..(378): n is a, c, g, or t
  misc_feature (388)..(388): n is a, c, g, or t
  misc_feature (398)..(398): n is a, c, g, or t
  misc_feature (453)..(453): n is a, c, g, or t
  misc_feature (474)..(474): n is a, c, g, or t
  misc_feature (488)..(488): n is a, c, g, or t
  misc_feature (505)..(505): n is a, c, g, or t
cggtttggccantggtggcaaagccttctggtagcttaggcagtatttactgggggtgggtttggaagaaggcgctgntgcattgatgtaatttttgtttaactttaggattttgaaaaanntttcaanttggcttcattacncttaattaggaagtagttttcaagcctgtacctacctggggaaaagggctcntgatcttaatgccagcattaagacagacagaagcagcatggtgctaaatgacagaaaatccagtatttacattaggatggtaacaggaacatttaagagcatttggtcttatttactggtgggccgaaagcccttagctagacaataggggaaaatgtaccatcatcatgttatttaanannntttaggtgcngaagtgaaanacccgggggctctgtgataaggtgacataaaacccccctgtgggggtcccttaancggcggttccctcgggggggnttggggcgctgggngtgtgaacatgtgggcngtacaaccccaaaacccacccaattcattcatggtacttatggttatgccgggtcggcctggcctttgatggcgcggtattgtttgtgacaatttagacaca

SEQ ID NO: 645050 - DNA, 421 bp, Homo sapiens
  misc_feature (1)..(1): n is a, c, g, or t
  misc_feature (267)..(267): n is a, c, g, or t
ntacctagagggtactggtacaatcaattctcctacgtcagcttcccgagtacctggctttacatgctcgtgccaccattaccaactaccttatgaatttctagtacaacgagggtttctccatgttgaacaggctggtcttgaactcctgacctcatgacttgccgtcctcggtctctcaaagtgctcggattacatgtgtgagcatcgtcgcccgtcgtgtacatgctcatttgtcagtagaattgctataggtcttgcagagantgtaagagtgactcgaatacaggtttctggtgatcaaccctggtgcccaactcttcaggtcaggatagcttattggcgcagggtggatctaggctccctcgtctggtcctggcatcatcgaacctgatgtatctgccacaggtcatcgcgcacc

SEQ ID NO: 645051 - DNA, 415 bp, Homo sapiens
agcactgagagaaaagctagccacagtcaactgggcccgggcaggactgggctccctctgatcgatgaggtgataagcccagagcccgagcccctcaattcctcagacttctctgattggtccagctttaatgccaccaccacctctgtgcaagaggagagagccagcactccatctgcgcctgctttctatagccaggctccccgccctcctccctccccaagccgtcccgagcagcacacagtcatacacatggggagtactgaagccctggcacacgccccaaggaaagtatatgacacacgggatgatgaccggacagcaggcattcatggagactgtgatgatgacaaataccgccgccggccttgctctgggctggctggcccagctgctcaggagccgggctgggtcc

SEQ ID NO: 645052 - DNA, 206 bp, Homo sapiens
tgaatggatcccccccttgagtgctgacagaagtttgtagaggaaggagagctgcgacgggaatcatccaggctgcggaaccggcgtccaagaatgtagataccgtaagctgaggggtctgcgatgtgttcctccatgaagcagccgaagccggagaattgggtggagatactggggattcccataaccgtgcactcagtttcacc

SEQ ID NO: 645053 - DNA, 116 bp, Homo sapiens
acctgatcgccgttattagccagattgtgtcctccatcactgcttcccgtgagattgtgatggcgccctgaaatgttgacctgacaggaattccagaccaacctggtgcccttacc

SEQ ID NO: 645054 - DNA, 88 bp, Homo sapiens
ggatttgctggtgcagtacaactaggcttaatagggacatgccactccactccagcctgggtgatagaacaagactgtttcgagaaaa

SEQ ID NO: 645055 - DNA, 153 bp, Homo sapiens
aacacgacgacgtcttgatgtccaggtagttcagcgtgttggccacgcgatggaacagcacccggttgtcggtgatgatcttctcggccttgtcgtactggcccgagccgcgctgcggatagccgcagcacaggtaccccggcggcagcacgg

SEQ ID NO: 645056 - DNA, 143 bp, Homo sapiens
atcaacctgagagtgatccataaagttgcttctaaactgcaacctcccattgcaagaaagcactcatgctaagctgccaagagcactgacgcatataacaggcattaagcctcttaataagttggtgtattaggacatatttg

SEQ ID NO: 645057 - DNA, 425 bp, Homo sapiens
  misc_feature (1)..(1): n is a, c, g, or t
  misc_feature (9)..(9): n is a, c, g, or t
nggccagangtttaatacccagcctgggcaacatagcaaaaccctgtctctacaaaatttttttttttaattagccgggcgtggcagtgtgcccctgcggtccttgctacttgggaggctgaggcagaaggatggcttgaaccaaggagttcagttgcaccactgcactcctgggttattttggagaccctgtctctaaaataaataaaaaagaagttagagaccagcctgggcaacatggtaagaccctgtctctacaaaaaataaaaagattagctgggcatgatggcacacgcctgtagtcccagctacttgggtggctgatgtgggaggactgcttgagcctggaaggtcgaggctgcagtgagctctgattgtgatcacaccaccatattccggactggaagacagagcaaaaccttatc

SEQ ID NO: 645058 - DNA, 193 bp, Homo sapiens
ggcatgcaagcttgggtattttataatcatctgtcataggctcctttactattttttgtggaacttgggctgttcccagaatactaatcctctctgttgattagttcagcctgtaaacaagaaatcattaaccagcatgctgttcctgaagaatgaccagggacaataattgtaaaaattcaagagcttttat

SEQ ID NO: 645059 - DNA, 112 bp, Homo sapiens
gcgtctgctacgggttggtgattcttaagtagtagttccacaggttacagtgactctaatgctcatcctgctcgctgtcctgcttctgcccgcagcagggtctcgtgtgagg

SEQ ID NO: 645060 - DNA, 862 bp, Homo sapiens
cgcgtttccgacagttgtcctgcctcgggacgtcctctcaggttccgcggctgtctggctggtcttcccgtgcccttgtaggctgccggtcccctggacgcctcggcgcggggacatcagcccttgcccgtggtctttcccctagcgctgccctgggttctccccagctgcttctttcgccccgccctcttcggccgccaagcgccatgtcaatcccctgtcccatgctttgcccagcgggtctgatgggctgcacctcgtgtcttgggctcctgtgcgtagccgctcgcagcactgcgtctggaagaggtggcggaagctggcgctgcaccacggcggggcacgtcgggaaccgtagcggctgagcgcgtctcatgctagggcccccaggtggggcgcgctagcgtctgcgcgctctgctccagcacctcggcctcggtctgcgggcggtgcagcccggaacacctgcgtggaacgggctcggccttggcagaggaggtcacggtcagcgccagggccacgacaggaacagtggctctcacagcagccgggacacggacacaggggacaatacacgggtgggcagaagcacaaacacacatgctgacagggccctcgatcccaacccgctgccgctgcgccccagcacccaccccggagttacccccggcctcacctacatccttaacattccagctttgctggggtccagctccatcgtacttctcctcaaacaccttgttgatgatggggcaccatgtatcgccgtgctggtatcgtatcccggtctacatggggaccacagcaggagaataacctcgtacttgttaatcacccggggggttcacgtccgaatgcacga

SEQ ID NO: 645061 - DNA, 247 bp, Homo sapiens
tcgtcttctagagttatccccgtggttatgtgactgtttccgctgccctgggcatcttcaacgggacccttcatgcagatctttgaggacaacccttctgaatgagagggtgtccgtgccgctgctgaacacgctggaccacgtgctcacccacggctgcttcgacctcttcatcacggaggaggactgaggctctgctttacatgacttcctttccgattcacgcctacagtgctcatgtattaca

SEQ ID NO: 645062 - DNA, 1935 bp, Homo sapiens
tgtcatcaagtaggtattttctccgtttgttgttcttctctatttatgttttctgtttgtttatttatatgttttatttttctagtctgtatattgtttataatcgacctcaacagtaactactactttcagaatatacacacagaacagagagacagacgaagcgcagtacgcacacgacgaagaacagaagagataagtgacagcacagatagacacaggaaaaacacagacaggagagacgggggggcagcgccggaagagagaataacacgacagcagccgcagcgcgatgcgagagaaacaagagaccagaggcaacacgacattacagacgacttacggtgtgcgacgcgatcaaactacctggcaaaacacaagaacaggaatacagagacaaaacaaacactccatgacgacgcgaccaagatagcaaagcacacacgcagagacgaagacagcaacacgcccaaacagctctgctgcaaccacacatcacacagcaacactgcacagcactctgaaccacgatacaacagcacataagcaacgcaaaaagaaacacatcgcccacgaagctcagaagcagaacagaccacacaccaaagagcagacgagacgagacgccaaacgagaccacacacacaaagaccaacgacaaagaacacagcaagaacacaacagacccaagcgaaacaccgacgcaaaacagccaaacacaacacacgcacccagaacacactcgccaccgcagcggatgccgaagcgaagaaggaaacaacaacgaaaaacacagctagagacacacgaccgactcacaaaagcaaccaccacaaaggaacctagaccaactcagcaagcaacacacacacagcacgcagacacctcacaactcagagcgccgcccaaacaagatatctgcacaccaagccattgaaacgccaacaacacacacgaaccaacccacacaaatgagagcaaacatacgcaccacgcaaccagaccgcgcgccgcacgaacgacgacacccaaagcccaaacacacacaaaaccgaacgagcacgaccacgaagccgccgcagaagcatctacgccctcaccatcaaaccaacacagaacccctacacaaaggagccacaacctcggcgaccacacgacggacaccacagaccatacacaaacaccacgactgacgaccacaactacaagccaggaacactccaacattcggcccatcacagaagcacagcacaggggcacaaaacaagaaaaagcgcatgagaacagagaaccaacagcacaagaaaacaacacacaacgcccagacacacggcgacgccgaccagaaagaaagagtagaaaaccaatacacaacaaaaggcaaccccacacacacataggcacccacgcaccacaacacatacacaaacacacatgcaagacaccacagacgcaaccgcacgtaaagacagacaaaacaatccagccgcacagacaagcacagaaacagaacacactgcagagtgaagaacaaaacaaacacaaaccaacagcaaaaccacacagcacccagcacgaccccagaagacacaacaacacaaaaacagaacagtcccagcacgcacacacaacaacaccagagtgagtacccacaacaccacgcaagaccaagacatagcaaacaaatcaagcaactcacgacagacgacaaattgaccaaaggaagacaatcaaccaacagcccgcacacagaacgaacgaacacgagagaccaaaccaaccaactcatgcacgcacgacgaccacgtacacacagaagacacgcaaagaagtcatcgaagacacgcaggctaacgacagcaagacagccctcccaataaaacgcacagatcacagcacaagcaatgacacagcacagccacacaccaccatacc

SEQ ID NO: 645063 - DNA, 266 bp, Homo sapiens
gaaattagcggggcaggggggcactcgccggtagttccagtgactcaggaggccgagggggagaaatcgacttgagcccaggaggcgaaggtgcaacgagccgagattatgccactgcactccaagcctgggagacagagaaaaattccctctaaaaaaaaaacgaaaaggaaaaagaaccacataattggtcattttacttctgtcctccttttttcttaaattaaaaaaactcaatatacatcacagtgagacaggggcttcgg

SEQ ID NO: 645064 - DNA, 130 bp, Homo sapiens
ctaaggatccgacgtctgtacatgtcactgtggctatgctgaatgcctcagggacttgatctttcaataaacaggtttagacagtatgagtcaatgtgcagtgtaagccacacttgagaggatgaatgta

SEQ ID NO: 645065 - DNA, 144 bp, Homo sapiens
tgattagagatcgctggtgatgagaggtagggagactgggtgtcggatgtagagagtacatgctctggccagagtaagttgagtgtaagatataagcgagtcgcgatctaggctgtcatttgagatacagtgtgttcttggatc

SEQ ID NO: 645066 - DNA, 908 bp, Homo sapiens
catgctaaaaactctcaataagttaggtattgatcggacgtatctcaaaataataagagctatctatgacagacccacagccaatatcatactgaatgggcaaaaaatggaagcattccctttgaaaactggcacaagacagggatgccctctctcaccactcctattgaacacagcgttggaaattctggccaggcaatcaggcaggagaaggaaataaagggtactcaattaggaaaagaggaagtcaaattgtccctgttttcagatgacatgattgtatatctagaaaaccccattgtctcaacccaaaatctccttaagctgataagcaacttcagcaaagtctcaggatacaaaatcaatgtgcaaaaatcacaagcattcttatacaccaataacagacaaatagagagccaaatcatgagtgaactcccattcacaattgcttcaaagagaataaaatacctaggaatccaacttacaagggatgtgaaggacctcttcaaggagaactgcaaaccactgctcaacgaaataaaagaggtttcaaccaaatggaagaacattccatgctcatggataggaagaatcatatcatgaaaatgggcatactgccagtaactgtggatcatgctatcccagcagctacatgccttctcccagatggaaaactctttaagtctttgtacgaaaagagcccattgcagagatctagcaaaacaatggggtccctctgttaacatctaagggttgtccacacgggtgtccgcaatttaaagggagaaagcccaattaacttaccgttttacccagagaaaggggggctacagggggggcgaaaggagccctaatgagaatggccaacagcatgcgctgacacataataatcaagggctcccatgccg

SEQ ID NO: 645067 - DNA, 805 bp, Homo sapiens
taaccagaaatgtttaaaaaactaagtgtgaggattcaagacaacattatacatggctctgaaatatctgacacaatgtaaacatggcaggcacctgaatttatgttttttccaacaaaggtgactaattggaaactttatgaacttcggagcggtccccttgtgcaattcaaccgcagttggaaattaaatcatatcaaatcagtttaaatttttaaaatggtacttcagagtctatatttcaaggggccacattttctcactacttatttaaataccataaaggataaataatcttcagagatgtgggaaacaaatcattggcttaatatgttcattagaataccattgaaacatacaattggaaaattagtaatagtattttggaagatccaatttcaaatgtgagatctcttaaatttcgatcactttatactgttgtagtactatataaggtgccttgagtggaattcaacatttgactaataaaatgagttcatcatgttgcaagggtgatgtggcaataatctctgggtgacaaaaggagtaaaatcaaatattgtggcgtgtacaaattatcaggggaagaccctgtactatgacataggatgacatactctggcttgatggtcataaaaaggagggattttttcaaatcaggggtgtagaggtctatggaatgaggactttgaacaactggggttttaaggtactttatgttcttaaaggccagaaaatttggtttgtaacaaaaagaaaaaacaaactgtggcgcggcgcaaaatttaaacatttggggcggcaa

SEQ ID NO: 645068 - DNA, 404 bp, Homo sapiens
aggggtttctcgagacaccaagcgtgctggccccgcttgtcacagctcgactgtgcacgaaacacacctacacgagagttcgggtctataataaggtgcactgatatctgacagaggcctgtacatttggtggtacaggctggtctcgacaattagggtaacgtggaacgttgatggaagggccaagaactttctcttcagatggaagccttgtgcaccaactttttgtgatcggactgtatgagctagtgtcttagcacaagagttacgtttaagaagactgccgagatcttaaagtccacttgggccattctttcagcaaccgattcagattttcaattcgcaagttttggcacaccgacaacagctttgtacaggcccacttatgtgagggcttatccttt

SEQ ID NO: 645069 - DNA, 408 bp, Homo sapiens
  misc_feature (109)..(109): n is a, c, g, or t
  misc_feature (141)..(141): n is a, c, g, or t
ttatcctcatagctgactctagaggatacaacaattcatgagggagcagtacctttcagatgatccatatatgaaggttttaaaaggaaaaaaaaaattattcctcgantgtaccataacttttaatttttacaagttggnacatcacaaaaaaagaagaaaaagaagggaaaagctaccacttactttcaccatcatttcacaaatgcaggaatattttaagtcctcagcctctccccgaaagaacataatctccaaatgaagggctctccttcacggggactgaaaaaaaaatcatgaaatcctaattttcattttccacaaacccttaaaaacctccctcatggactggtcttttcttttttgtaaaacagggtgtggtagccacttggttgggggtcatcaagt

SEQ ID NO: 645070 - DNA, 235 bp, Homo sapiens
tacgagggttgccatgtttttgttatactgtgcactggagaaagaacctgtgccattgtccctgcccccagtcttggggccagcatctattataaaaacgtgggttgtatctcctgcatactaagccaaatatgatgacttcttcctgaaaattgataccgatatggacggctttgtgtctggattggcggtccgtgaaatattcctgaaaacaggtttaccttctaccttacta

SEQ ID NO: 645071 - DNA, 124 bp, Homo sapiens
caagataaaagtaatacaaataaaaaatataacaactatttagatggagtttatgttgtattaggtattgtaagtaatctagagatgatttaaagtatatgagaaggtgtacatagtgttatat

SEQ ID NO: 645072 - DNA, 115 bp, Homo sapiens
cagtatgtgctaagcagaatcagccacaacatatgcatgatttttatggcctgaaagtttttcccaagtaaatggtctgttatagctttcatgtgtgattgggtccagcttctgg

SEQ ID NO: 645073 - DNA, 296 bp, Homo sapiens
cgcagagcaaatgttgcatagacatgatcatcgaaagcgaaaattactaaaccgatatgcaggagctgaactcaagtatttgaccaaatggacctaatagacatctacagaagtttctacccaaaacaacagaatatacatccgtctcattgccacagggcacatactctaaaattgacgggacaatcaaacataaaacaatgcaaagattattcaaaaaacaaaaacaaaaacaaaatcataccactgggtggtgcagggccgtggtgccctgtggccttggccaaatgaaaacc

SEQ ID NO: 645074 - DNA, 1225 bp, Homo sapiens
acatgaacgagagagaaaaaaatcgaatcaccccagtttaactgaaagcacagaatctacacacaaaagacaatgatgaattcatgatgttgctatccacagttgagaaattgtcagaagaaatcatggagataatgcaaaatataagtagtatacacggctttggagggcagtagagcagcttgaaaatctcattggaatctcctgtgcatcacaatttcttcaaaaagacgaaatgcagaaaaccaacagaacctacatgacaacaagtgacataaaccaaaaactgtttgaaaacgagtacaggacttcctcacaaaggccttaaggctgacttgcccattaccagattttcccaaaggacccgagttcctgcatagaggagactgtcatcactaaaccatgttgtaacttcctaatcatcctagatctacaactgaaaactcactttcacacacaatatctaactacatagtatctatataagtatgtactatcacttactgcgctgtacatcatttctattacttaccgtaagtcataggtccaatactggtcccaatggcaagagcttaccactctaggactccttcatattaaccctagacggctcatacaaacaacccttccacttaagctagttctaccactacatcttggggaacattccactaattggccctctacaaacaactacatacacagcgtcctactcaagaagacacatacgacattttgccgctatctatcgatgtcccccctgacatgacctaacctaacctctataactcatggataccctaaaaataaaataatacaaacatggccggatcaattgacatgaaagttactagatcacacatatagatcacaacacaatgcacccacacccaataccacactaaagacctacagtaaacaccatacatcaccattaatgtaccaccatcatcataaaaaaaaatagacataactagaaaccagctagaccactcgtagaaaaggacacacaaaacaaaaagcggagacaaacacaccagagcaacaagaccaaaacagcgaagcacagagaaaacaacaagacaagaggggagaagaagaacaagcaacgacaaaacaaacagagaagaagctacagacaataacaagacgcgacacgcgcgacatccaaccagtagaaaaggcaactcgacagaagagaagaatacacaagcaaaactagacc

SEQ ID NO: 645075 - DNA, 243 bp, Homo sapiens
cagttggtccgagagaaattagttgtggctatgaaaatgattaaggatactagtataagagatcaggttcgtccatttagatgttgtgtatggctatcatctgtctggaggttagtttgattagtcatggctgggtggtgactggcgggtcgttgatgagatatttggaggtggggatcaatagagggggaaatagaatgatcagtactgcggcgggtaggcctaatttctctcggaccaatg

SEQ ID NO: 645076 - DNA, 357 bp, Homo sapiens
atataagttctctttgcgtaggccactgggtttctcatgcagtaagctttataaaaactcatttgcactggactgtcatctcattcttgtacaacgtagaattacttgtttacatccaacaaatggttagctagggaaacagtgcaactgagtgttagtagtcattttggtcaactgcatgtcaacccttccatttcaatcccagttagaatgaaataattctttgaacttggctttaggcaattttcgtcgtcacatgttggtgaatatattataaaaatgtggcctcggtcacggcatatgtctaagtctatatacatattccttcaggggtgaggggcaatctggcttgtcata

SEQ ID NO: 645077 - DNA, 382 bp, Homo sapiens
cctgtgtaactcgcgatcaccgcgtggtcagcatgacgcacattgtgcaatgcttctctcctgtcaacagcggccagcctcccaactacgagatgctcaaggaggagcaggaagtggtatgctgggggtgccccagaaagccttgcttcccccggatgtccaccagtagatccgagatccggcagctgagacctccgtgcctgaccatgtggtctaggtccctgttcaacgaccctcttcatgaacacctgctgcctgggcttcatagcattcgcgtactccgtgaagtctagggacaggaagatggttggcgacgtgacggggccaggctatgctccacggcaagtgcctgaaacatctggggcccttgacttaaagggcg

SEQ ID NO: 645078 - DNA, 233 bp, Homo sapiens
attaagcgcagtaattggaggttacagtgagctatgagtggatgactgcatctctatcaggggcgacgcaaggaacttgtttctaaaagaaagaaacaacaaaaaaacagtgcctatacttgccttctaggaatcacagtccagtaaaaatgccctgcagcagagagactctagcgttaaaaccaagcttcgtggggttcgcagagacaacttgctcaataactttgtaaccg

SEQ ID NO: 645079 - DNA, 414 bp, Homo sapiens
cccaagctcatctgaaccactataactcctgtgtgtgcccctgctgagctggtgtggacagctctggcacactcagtgctctggacaactataggacgcgaaataccaacagatatgacgattgaacatctggcattggcattagagggccagtgtagcgctcaggcccttcatgatgcaatgcgctgcgcggcctcaataagccatgggaaggaatgtttgtccagccactggctgcaccaatagactgcccacgaacacctgcccaagactacctacacacgctctggagatgagctcatggtctacagcagcatatgcacacatcccatgatctctcacacatgcatttgtactgaccaatgtattgctgtgctgactgttgacgaatatcaatacgaccctccatcccgg

SEQ ID NO: 645080 - DNA, 327 bp, Homo sapiens
acccacttcactcccatccctactccctttttaacccttggcaaccataatctgttctccatttttatagttttttttttttcatttcaataaagctgtataactggaatcataataatatgtaaccttttgggattggctttttttcatttagcatgattttctggaggttaatccagcttattatgtgtatcaagtctattgacaggtactttttagtgtgaatagaatcccatagtatagatgtaccacagtttgtttaactgttcacctgctgagagacattgggccagtttttggctactataaataaagttgctataacca

SEQ ID NO: 645081 - DNA, 2083 bp, Homo sapiens
acactcgtgtcaatggcctacattctgtttgttaacccttctgttcttggcgcagctggcatggataagggcgcagttttcacagcgacagccgtttctgccgctattgctacattattcatgggtattgtcgccctttacccaattgctatcgctcctggtcttggggtgaatgccttcttctcttattctgttgtcattggtatgggcgttaagtggcaaacagccatggctggtgtcttagtagccgccttaattttcttggtcttgacattctttaaggtccgcgaaaagattatcaacttgattccacaaaacatgaaattagccattgccgcaggtattggtttgttcattgcctttattggccttcacgatgcaggcttgattgtggctagcaaggataccatggtatcccttggtcacctcacatcgccaacatcattgttagccatctttggcattattgtcacatttgtccttttgtcaatgcgaatgccagcggctattttcgtcggaatggtgttgacatcaattgttgggattatctttggtctcatcaagttgccttcttccttagtatcgcctgtaccatcattggccccaacttttggtcaaagtatcacacatcttggtgacatcaactcaattcaattgatcacagttgtgattacgttcttgttggtcacattctttgatacagctggtactatgattggcttggctacacaagctggtttcatgaaaaacaatgaaatgccacgtgcgggtcgtgccttgatggctgacgctgttggtatgactgtcggtgcggttgttggaacatcaccaacatcagcttatgttgaatcatcatctggtatcgcggttggtggtcgttcaggtttgacgagcgtctttactggcttggtcttcttgcttgctttgttcttctcaccattgttgacagtggtaacatcacaagtcacagcaccagctttgattgtggtcggtgtcttgatggccaatctcagatgggattgcgttgggcttcatcttgtacccaatacaatgcttgcaacaggtcgtggtaagcaagtacacgctttgatgtatggtctcgctattctattcgtcatcttcttagcgattgtcgcgcattaaacacaaaaaaaacaactgacatatgctgtcagttgttttttttgtgtttaatttttggtgcttgttggcgtaattctcgtgcattggctaatgcagtagttgtaatatcttcaccagacaacatcatggcaatggccccttcacgaccagcctcatctaaggcagttacttgcgtcaccgtacggtcattttcagttgtttttgcaatcagaaaatgatgggttgccgcagcggcaacttgtggtaaatgcgtaatggccaaaacttgtgaatcagcagcaatcgtgagcatcttacgcgcaatggcttgcgccacgcgaccagaaacccctgtatctgcctcatcaaacacaatggagacaatgtgttgttgcttggcaaaagttgtttttaacgcgagcatcaaacgtgccgcttcaccgcctgacgcaattttagctaatggtgctaggccttccccgacgttggtttggacataaaattcaactttgtctgcgcccgaagaaatgtaaccagtaattggttcaaagcgcactgcaaattcagcgcctgacatcaacaattcacttaattgttgattgacagcttgctctaagtgccgtgccacttcttgtcgtacctcacgcaatttaaccgcttgcttgcggaccacttgacgcaattcgttttgtttcacttgcaattgttcaatatcaaactcatcgtggtccaatgctgctaattcttgatcaattttagctttaaattgcaagacatcagcgactgttgggccgtattttcgctccaaagtgtgaatcagctgcaagcggtcttcaatgcgtaacaattccgattcgtcataagttaacgcgccgatttgttcatccacatcacggccaacttcttgcaccgtataataactatcggcaatcgttgtcggattcggcataaaagcacgtag

SEQ ID NO: 645082 - DNA, 103 bp, Homo sapiens
cagcgggggttgcagcgggtactggttagcagcggtactggttagcagcgatactggtctgcagcggtaggtttcagcggtactgttggcagcgtaactggtt

SEQ ID NO: 645083 - DNA, 704 bp, Homo sapiens
ttcgaagaaatgatacggctaggtgcgaggcctgggttgcgcatgaagacagtgcagccacctccgagtagcctggatgtgatggcgtcacagaagagaccctcccagaggcacggatccaagtacctggccacagcaagtaccatggaccatgccaggcatgtgcttcctcccaaggtcacatgatgacacgggcatccttgactccatcgggcgcttctttggcggtgacaggtgtgcgcccaagcggggctctggcatggtactcacaccatcccggtcaagaactgctcacatacggtctccctgccccagaacgtcacacggccggacccaagatgaagaccccgtagtccactttcttcaatgaacattgtgacgcctcgtcagtaccagcccccgtcgcagggaacaggggagaggactgtccctgacgcagactttagctggggggccgaaggccagagaccaggatttggctacggcgtgcggaagcgtccgatctagtactcggctcactcagtggattcagggggagtcgatgcccagggctcgcttgccaagatttcttgagctgtggaggaaggagatacgtcgctctggatcacccatggctagacgctgaagagcccacctggttcccggaatcctgtcctcagcttcttaatttaactgccttaaaacttttattccccgcttgccct

SEQ ID NO: 645084 - DNA, 305 bp, Homo sapiens
  misc_feature (156)..(156): n is a, c, g, or t
  misc_feature (175)..(177): n is a, c, g, or t
tgcacggtattctgcgaacctcctcccctgtgctgcctgcttgaattgagagaaagcaaacagcccagatttggctcaatcccatgaaatgcaaatgtctaacacaggctttctctatcatcttcacgtttacattatgcaccttaaagaagtganaactagctgggtgcagtgnnntgagcctggagccccagcctaccttgggaggcgtgaggcaggaggattactttagcccaggagtttgagtttagccagggcaacacagtcagaccgtatttctgagaaccaaaacgcagttgaaactc

SEQ ID NO: 645085 - DNA, 159 bp, Homo sapiens
ggtgaatctggactttcagtagagactggggtttcaccaagttggtcatggctggtctcaaactcctgacctcaggtgatccacccccctcagcctgccaaagtcctgggattacaggtgtgagtctgagtcaccaggcctggccctccttgtttcttt

SEQ ID NO: 645086 - DNA, 305 bp, Homo sapiens
gagaggaaacttagattttgtttatccagtaaacaaggctggttttgtatgtaggaaacttttgacccatcccagtctgaaattcttctccatttacagataagcctattttagttaccttgactaaggtattgctctagagacttcctttgaaaaacctcttaataaaaaaacagaccagtctacatgatcccactgaccaatacatttgtcaggaacaaaattgagctgggcatggtgatgcgtgcctatagttccagctactaaggagactgaggcaggaggactcctttagtctatctcta

SEQ ID NO: 645087 - DNA, 307 bp, Homo sapiens
tcctctcgtgacaatggataattatagattgtcatagcgcagggcgtggtgactcacatttgtagtcccagcatcttgggatggcccggcaggcagaacatcttcccggagttcatgaccatcgtggccaacgtggtgaaaccctgtctctatctataaatacaaaaatggtttagctctgtttttcataactagatactagaacaggtacaattgttttgcttctgaaaagaacaagtattgttcatcctagaagggtttttgtgactgaatcagcagtgcctgccctagtcttagctgtttcctg

SEQ ID NO: 645088 - DNA, 493 bp, Homo sapiens
  misc_feature (179)..(179): n is a, c, g, or t
  misc_feature (209)..(209): n is a, c, g, or t
  misc_feature (213)..(213): n is a, c, g, or t
  misc_feature (229)..(229): n is a, c, g, or t
  misc_feature (239)..(239): n is a, c, g, or t
  misc_feature (252)..(252): n is a, c, g, or t
  misc_feature (256)..(256): n is a, c, g, or t
  misc_feature (258)..(258): n is a, c, g, or t
  misc_feature (260)..(260): n is a, c, g, or t
  misc_feature (279)..(279): n is a, c, g, or t
  misc_feature (295)..(295): n is a, c, g, or t
gcggcgaaaaccatgagttatctgcctgcaggagagacagctcaggcctccaggagacttgaacatgcattctgtagcaggtaaacagtgactcttgaaaggtgcacataattggaaatggatgtgtttgtgagggggtggggagcgatggtgtacacctaacgatatactacaacacnaattggtttaaccttgggtagtttggttcnctgncttttaataatggggncacggcacantaattacacaggngatnantngttaccctaaccggggaantttatttggaaaaccncaaactggttacattgatctaaattcattgtaagcttcagcaaactttctttcccagatatcaaaatttgttgtcacatgagagttaaagggaaaaagctttcatagtttctcaagctatttaaaaaattccatagtttttgcttctggctctcctaacttttttaggttttgttttctgataacattttattcaaga

SEQ ID NO: 645089 - DNA, 572 bp, Homo sapiens
  misc_feature (2)..(2): n is a, c, g, or t
  misc_feature (76)..(76): n is a, c, g, or t
  misc_feature (97)..(97): n is a, c, g, or t
  misc_feature (197)..(197): n is a, c, g, or t
  misc_feature (270)..(270): n is a, c, g, or t
tnacggagcacagcttagtggctacaaacaatcaaattattacctcccagattctgcaggccacaagtcctagatnagtcccactgggtgaaaactnaggggttagcagggctgggctccttctggaggctccagggataattcactttcagcttctccttggtgcacggctgctcctccccctgcagagcttgcancgtggggctgagtccttctgagtgagtcctgagtccttctgattccttctgagtcaggccagctcccagctgntccctgtccccacagagggacccttgtgattacaccagaaaaacccagataacccaagataatctccccgtcttaaagtcagctgattagcagccttaataccatctgccttgtgagataaaattcctttgccaggtaagaacgtggtcacaggctccaagaatgagcacgtggacgtctttgcggcccatcgctctgactacaaatacatcctccgttttcttatgggagaacgaggttctccctgcaagtctttcatgctccttggtagttttatagttttcttcatttaggccccacag

SEQ ID NO: 645090 - DNA, 339 bp, Homo sapiens
  misc_feature (18)..(18): n is a, c, g, or t
  misc_feature (41)..(41): n is a, c, g, or t
  misc_feature (103)..(104): n is a, c, g, or t
  misc_feature (107)..(107): n is a, c, g, or t
  misc_feature (161)..(161): n is a, c, g, or t
  misc_feature (172)..(172): n is a, c, g, or t
  misc_feature (240)..(240): n is a, c, g, or t
  misc_feature (243)..(244): n is a, c, g, or t
  misc_feature (255)..(255): n is a, c, g, or t
  misc_feature (259)..(259): n is a, c, g, or t
  misc_feature (265)..(265): n is a, c, g, or t
  misc_feature (272)..(273): n is a, c, g, or t
  misc_feature (285)..(285): n is a, c, g, or t
  misc_feature (300)..(300): n is a, c, g, or t
  misc_feature (306)..(306): n is a, c, g, or t
  misc_feature (329)..(329): n is a, c, g, or t
agagagagagagagaganagagaggagagagaggagagagnagagagagagagagagagagagagagagagagagagagagaggagagagaggagagttcatnngtncccactgcctttgtgtacatagaaaacttaaaaatttcccccagtctattagangttaagatgtnccctaatttattaaatatgcctttattcacaatttgtttttttaggttattcttaatgcattataganttnngtatgtctttntttntttttnttacagnntgtagttattgnacatattgtggtttncagaantatcaattgtataaactaaaccnttaaattaaa

SEQ ID NO: 645091 - DNA, 136 bp, Homo sapiens
acgcacagatattatccctttcgcttagtggttgtatttctgtgcagccaagtactgcggctccctggggctgagacctccctttgtggaactccgagagccggcctgacagtcccagccgccacccaaggagccc

SEQ ID NO: 645092 - DNA, 264 bp, Homo sapiens
gaggcttggcacgggtggctcacaacctgttatctcagcactttgtgaggcagaaaatggcggggaacgaggtgaggagatcgagaccatcctggctaacacggtgaaaccttgtctctactaaaaatgcaaaaaattagccagctgaggtggcgggcgcctgtagtcccagctacttgggaggctgaggcaggagaatggcgtgaacctcggaggccgagcttgcagtgagccgagatagtgccactacactccagcctgggc

SEQ ID NO: 645093 - DNA, 309 bp, Homo sapiens
cccacgctgagcgccgcgccaaattgagattattagttttgttttgtcttaagaaccataccatgaaaatatcagtgaattgtaggatatgaattccctgtcagttgatttaaatcctttctgaataaagatcagatcaacatgtacctgaaggagcagtgtatagctctttccttcaacattcacctacgagcctttttaaaacagacatttgcctgcacgtcagataccctttccttttactgcgaattctcttaaataggagaaaacttacagaaactggtgttaaaggcctaaagttcaggagtg

SEQ ID NO: 645094 - DNA, 334 bp, Homo sapiens
caaagctggcatcctcctatgtcacctagagtgtgggtcaaagcaatacacctacatgtagaatgtgaagtcagaacaccaacggacaacaccaaacaaaaaaactatccccccgcatgaggatgcaagatgcaacagtttgtctttcacattggaagggacacccctggatgcccctaaccactagacctgtaaaacttcaccgcagtggccacttctgaatctccgtaaggtttatttatcttcaccctctggagagaagatgttctaccaaagcctctagtgtaccttcctcctcttactcatccaccccagtcaacatgatgttgtcaat

SEQ ID NO: 645095 - DNA, 557 bp, Homo sapiens
  misc_feature (197)..(197): n is a, c, g, or t
agtaactgccaggtgcagttacattgctcagtgacagagctcaagcttgacatggctgaaggtacacacggtatagtgaggcaggctaagcgggatggctgcagccaagagctgggggagggcgggctcagggctagccctctccgctctaactgatgatctgccgaggtcgtccgtagcctgtcatgccggcctgngaggcccctctgttgctgcccatctgaaggccaatgacatgctttccctcctgcagctggctctctgtgaattccctcttatgctcctgcgctttcttcataaaccagttgggatctccacggtagtgcccatcattcttggtcactgccaagctgcccaaagccatcagggtcctctgcactgctgccatgtctttgcctccaaagaggtcaacagtctggaacatgtcagtcttgatgaccccatagtcctcagccggcttcaggaactgagccacctgctccatctgcttgaagaccatggagggtgggttctagggcaccttcacgggcttggagcatcagggtacaggctgtcaa

SEQ ID NO: 645096 - DNA, 306 bp, Homo sapiens
aaaccccccccccccccggggaaattttggggggggggggttttttggggggtttttaaccccctttttttaaaacccccccggggtttttttcctttgggggggggggggggggggccccccctttttttccccccaaaaaggggccccccccccccccttttttttgggggggggccccctggccctttcccccaaattttttaggggggggggggcccttgggtttttccccccccctttttttaggggggtttttttttttttttttaacccccccccgggggggggggggggtttttttta

SEQ ID NO: 645097 - DNA, 524 bp, Homo sapiens
caacgactggtcctcagctcatgtcatgttccggaaatagggggggtatcatgcttgcgttcagagagaaagctgatacctattcctgaatacgatcatttcccacattacttccagatctgtgagttctgcattctcactgcacaaggatttccagtcactcatgtgttaggatttagcatgtaggtccttgatctagctgagagatcccagattcgggttcctggcccgtcagtaagggaagatacagcaaggagtttgtaaaagcatctagcccaagaaaagatctcaagccgttagatccatttcagggtctggtgcacgccgagtcgggttcatcttaatcgagttaggtagcactcaccgtgcagcttcggcgatagcccatcccaacctattcctgtgtagtcccaggtggggtccaggggtttggctgacagattttcgatcctgagtcccgattcagatttcactgacggtgagaaataggtcctggttccggacggggatcaactcccagctga

SEQ ID NO: 645098 - DNA, 317 bp, Homo sapiens
tgcggggagtgagggtcagaggactgaatgatgaaacccacagtaacaaaagcgagggtatggaaacagactgaacagagaagcaagaggccaggctcctcgtggtacgtatagttcgcctctgtgacagatgtcgacgacctgtgccttcctgaccttttcttttttggtgatggagtcttgctctgtcgcccacgctgagtgctgtggcacatgcttggctcacggcaacctgtgcctcccaggttcgagtgagtctcaagtgactaccagcgcccgccatccatgcccaactaatttctgcatttttaatagag

SEQ ID NO: 645099 - DNA, 182 bp, Homo sapiens
agattccaggagtagatgatttgggaacaacaggcagaggaaatgatatgcaagttggcacatacattgaaggatgttcatgtctaacctgtctgggatatcattgatatctgcccttaggtgcctacctctaagccctatgcctttactgcccgcctgggaaacagaagacagattccatt

SEQ ID NO: 645100 - DNA, 122 bp, Homo sapiens
ccccccccccgggggccctgggcccctgaaaggcccggggggaacccccccggggggggattctggggttttttttttttgggggggtttccctttttttcccatttaattcccccttggga

SEQ ID NO: 645101 - DNA, 418 bp, Homo sapiens
cgaagattgttaagttccagctcgatacagaagacattctaattcagaaccggggcaacggttagcttgggggtgcaaaaaactccagtatccgagttctcctttgctttgggcacacctcttacgcaacttcctttgtgggatctgttgttaagacaaacaaagaccaagaaacccagtcttatctcccaaagaaacacctaaattctctctatttaggttcgttgcagccaagaaatttattttaatccaggtataagagctcccagatataaacaagttttaaaccctcaacacgggcattttaaagacaaatgtggtttaacagaagtggtctcacacacgctcgataggtctctttctatctccctctcacccacaaagtctgttcaaatctctatcctcgcagcgaatccta

SEQ ID NO: 645102 - DNA, 95 bp, Homo sapiens
atgtttaattttttttttaacaaccttaacttgtggcctctttttacccctggaaatttactcttgaataaataaaaactcgtttgttttgtcca

SEQ ID NO: 645103 - DNA, 358 bp, Homo sapiens
cgtcgactaaggcagtcatcaatttataattatttcagaaaaatcagcagcagcaacagcaaaaacaaagacaatggcaacaaaaacaaataatgcttggcttctatgaaagatcacctgaattttattcttttaacaaaataacacacacacacacacacacagcagcgtgtgtatgcatgtgtgtgtttgtgttacataactgtatccctgcatcatgctatttcatgacaaagctagtgcacatatttgtaaaatctgagatactaaagaattggtagagaatatgtttggagtctactatagtttcctgtaggaactaaatggggctggggaaagaggggagaggggtcgacgc

SEQ ID NO: 645104 - DNA, 113 bp, Homo sapiens
ctcccttgaacatctccgccttactagaagtgtgaaaacgtaggcttggcttactgtgcgacagcagatttctaggatagtcagtagaattagacttgtgcaagatgataagt

SEQ ID NO: 645105 - DNA, 578 bp, Homo sapiens
tggaggggcccagtggttatattaaaaacccggatggtccaaaaactgggggggggcttcaccccttttccacggggagattgggcgcggagaggggtgaataggcgcgaggacattctctatacccatttctcctctcagggcaaccagaaggggggtgaaaggaggcctccctcaaactctcaagaaaggcacacaaaatgtggatagggggagcacagggggggcgcaggggaaaggggaaaagggaaatctcccaagggcaatctcaaataagaagagaggggtaaaccggaccccaaaacatcacataaggggcaggggggggcgcctgctggcccagtgggccggtctaagaggtgtcccgggccctcctcgtgaggctcttcttctaaccccacctcccatctccaaaagacatccctaacggggatatcccccccgagggtagaggcgagccgagggaaattatccctttccttatgagggggggccaataacgcggggaaaagccccacagaggggagagaggaaggaggtatgggagtgcaaaatgttccagggaagaggccaatttc

SEQ ID NO: 645106 - DNA, 358 bp, Homo sapiens
  misc_feature (105)..(105): n is a, c, g, or t
  misc_feature (128)..(128): n is a, c, g, or t
  misc_feature (340)..(340): n is a, c, g, or t
  misc_feature (352)..(352): n is a, c, g, or t
gccttttcacaagatggcgccgaaagcgaagaagggaagctcctgcccctccttaaagctgaagccaaagcgaaggctctaaagggccaagaagggcagtgttgnaaaggtgttccacagcccacagnaagaagatccgcacgttcacccacctttccggcgggccgaagacactgcgaacttccgggagacagcccaaatatcctcgggaagagcggcttcccaggagaaacaagcttgaccactatggctatcatcaagttttccgctggaccactggagttctggccatgaaagaagataggaagacaaccaacacacttgtgtttcattgtgggangttgccaaccgncaccag

SEQ ID NO: 645107 - DNA, 876 bp, Homo sapiens
atttaaaccgaatttaaggaattcacacacgacagtggacaggtcttcacgcaggctggttggtaacgtgctgccagcacagggctgggtgatacgtacaccctaagccgggggtgcctggggctgcgggggcgctccttgctattggcccctccagccacagggcacgtgaggtgctgctgtgtgagccgtcgggcgtggagcggccggctgtgtgggggcagcgcagtcgaggagcatctgtggggcctttccttctcggctggttctctgtgacggtggcgtcggctcggctctgctcctttcatctggtaccgaagccactgaccctgaattgcccacgtgtgttttaccactgagcagctgcactggtgctgtacacgttgtgaaaggccttgctgttccaggacttcaacaacttggtttcttttcagagttccgaaggatataatggacttcctcagcgcccttgctggtgggctgagggtgacagtcacgatccgaaacctgtctggtataagaaggctgcgggctgatcaatttagattggtcccactgctgagacctgtagggcagctcctagagcatgcttttctcaaggggagcaggcagtagtgacaacgtcgtggtggtcgggacttggcttctgacgaaccacgtctggaactggccccctggtttgtgccgaggggggcaggggcttccgggcgtgaaccgggcttcggcaccccctctttgttgttgggccgtgctctcttggcttgtcaatgtcaggacccctctttggggggtgggtgcgtggccgaccttggcggccccgccttgacgtcttgggcagattaccccactaggagtgcctccccagtccggtcttat

SEQ ID NO: 645108 - DNA, 447 bp, Homo sapiens
  misc_feature (307)..(307): n is a, c, g, or t
  misc_feature (314)..(314): n is a, c, g, or t
  misc_feature (323)..(323): n is a, c, g, or t
  misc_feature (369)..(369): n is a, c, g, or t
  misc_feature (373)..(373): n is a, c, g, or t
  misc_feature (383)..(387): n is a, c, g, or t
  misc_feature (391)..(391): n is a, c, g, or t
tactttcttaaattcccttcgggactctccggaacccaacattaaaaagtatctccttctttccaagggtaaaccccgggtggcccaaatcttttatttacaaacacccctggccggataccccaaccaaccaacagggtaatatcctccaaggccatgagctggttttgcccggtatccgccttccatcaatttaaaaattatatatatgtacatacacagttaagcgaaggcaggccagaaagagttcatctgtaggctcagcctcggtctcacaaacctccctcctgcggcccctccccaaccntcccccngctttgtgntcttaaggagtactacagaagcaatctacagtctctattgcagttngtanccccctcccnnnnncaantttaatactgaatgagatcgaatgttaggtccatgcagttcttggtcaatgttaac

SEQ ID NO: 645109 - DNA, 102 bp, Homo sapiens
gcctgtgcggagaccgctgctgctgagacaggcggctggggacagaacctacattctgcccaatgctgctgactttatcctgtgccctgcgttgattgccag

SEQ ID NO: 645110 - DNA, 302 bp, Homo sapiens
cctgagcttgctcaggtctggacatcacatcaaaatatggcagaagctaaagcacgaagacgtgagcaaggcaggtgataaatacacggtcctcactctgtttgcccacgactagagtgcagtttcataatttggtcactgtaacgttgaactcctgggctcacgcaattcttctacctcagcctcccaagtggctgaaactacaggcttgttacatcatggttgcaggatggctgctacagctcttgacattacatcaaaatatggcagaagctaaagcaggaagacctgagcaagccagg

SEQ ID NO: 645111 - DNA, 870 bp, Homo sapiens
cctctggttccttaatgggctggcccagtggctggagtctggcccccgatgtgggaaggtcctgcggaagtggtttgagccatctcagtttggcacttggtgggccatcctgtcagaccagtcaatgaacctggctggagggctgggccctatcctggcagagccgatccttgtcccagagctagcagctggcgcatgtgacgctggccctatctggggcactgtgtgtggttgtctccttcctctgtctcctgctcgaatccactaatgaacgctgctgagtgttggactccgcgaactggagcccgaatgccctctgagggcaagaagggctccttgaaggaggagagcaccctgcaggagctgtggtgtccccttagcctgtgggtgctctccactggttacctttggtggtgttcggcagtagaagacctgcgtgtactgacgtggggccagttcttccttatccaggagaaaggacagtcagccccttgtaggtagctcctacatgagtgccctgggaagttgggggccttgataggcagcatcgcagctggctagctgtcagaccgggcatggcaaacgcgcgggactgtgcaactagcgggaacccgtcgccagtggcctgttgctgttcaatgattggctggccattgacgagtgttcatgttacctcttcggggtaacagtgacagtgacttcccccaagctcttggatcctggtatgggagctgtattggcttcctccttggattgggcgcattggctgtttggagtatacccaagagagtgcccttccaattgtgtgggactccctcgcatgtagagccctggcagggggcgctcacagggggagccacgctgcgcaat

SEQ ID NO: 645112 - DNA, 443 bp, Homo sapiens
  misc_feature (193)..(194): n is a, c, g, or t
  misc_feature (200)..(200): n is a, c, g, or t
  misc_feature (278)..(278): n is a, c, g, or t
  misc_feature (351)..(351): n is a, c, g, or t
  misc_feature (357)..(358): n is a, c, g, or t
  misc_feature (387)..(387): n is a, c, g, or t
caacggcccggcacatccccacccccgccctcccaaacccctcccgaacccgcccgaaaccaacgaaccacccgcgcacccacggcgaccaccacccccacaccgccacccccaccccacccccagccacccacacaacacaccgcggcacaccaccgcctccacccgcccccgccaggtgccaccgccggcnnctcgtngatgcaaccaccagagcccagcaacgcaagccgccagcagacgcacacccacaggcacaccaccccccacacaaaacnacatccgacagggcccggcgacgcgcacccacactctgtgtcctaacggagcacaacagaagcaaaccacaanccccanngcagcgcggaacccgcggcgcgaccgaantttaatactgaatgagatcgaatgttaggtccatgcagttcttggtcaatgttaac

SEQ ID NO: 645113 - DNA, 175 bp, Homo sapiens
ccccatttgccgaagattggccctagggtgccccccccttccccccccccccccctttctttttttttgaattctttccatagccttttattccggtttgacaggttttggtccaattttacttttctcccttttttattgggaaaattttttcattaaattttttttttttcca

SEQ ID NO: 645114 - DNA, 548 bp, Homo sapiens
gactcgttaggatccccgcgcacgacaaggagcatgtcagtatccgccgagcgtgctgaggcgggggcgtccgcagactggccggcgcagagaaagaaacttggtctgtacctccagctgataacttccgggcccacgctgcccccacacagttggcgccaaagaccacaggcggagcttgcgctacccctcctacttggaattgacactggctgggagggggctgccgaagacagctccctatacaacatggaacagaaagacttgtatttagtcggacccatgtctactttgccagaccctcggccactgcgggagggcagggcccaggcgcatttaaggcttaaatgcacatcacatggaaactgactctgccattcatttgatgcaaccatgggcaagtcacttgtccctctctggcctcagtttccctaaaccgagtgagtggcaattttttcaaaacgtctgccaactccaggacttgccgtttaaacctccctctccaagagaggagatactcacctggaggtgtcaggacacggccgagt

SEQ ID NO: 645115 - DNA, 169 bp, Homo sapiens
tataaaaaataaatctgcagttagaaaaaaaaaataaagaccctatgacaatgaatatttggccggtctttaagtggaacatgatccttaaggtgctccacaggcagataaatagctaaatttcctaagtagaaggttcacataccacggttcttggctggttccgcgg

SEQ ID NO: 645116 - DNA, 137 bp, Homo sapiens
gctacccaatttcaagctggccaaaacgctacctacctccagcaataccacgcacgcacgccacgtaccacccggccaccggcaccacttacccattactactacggcattagggcgaccacccggacaacacctac

SEQ ID NO: 645117 - DNA, 187 bp, Homo sapiens
tagaggatcccggctccacttggttgccaggcagatggcttgaactcaggagtcaagaccagccttgggcaaggtggtgaaattccggtctctgctaaaatacaaaaaataagcccgggggtagtgtgcatgcctgtaatcccagctactcaagaggctgaggcagagaatggcttgaacccggaaa

SEQ ID NO: 645118 - DNA, 300 bp, Homo sapiens
atcgagcgcggtactctgaacattcgtgtccattgatgtatcgtgatcaagagaaatctgagtcacgcgtttcatcagatataccaggcatattaatatatctcagaggcagcgaagacacaatagcgcactatgactgcccagcacccactgcatagtgagccgcacactgatgtactggaaatttacattggttcttgtgaggagattccatgacactagactcctctgaggaaaacctctgggtcacttcatcttctacaatggcttccaatcccttcttggggacacgaatgttca

SEQ ID NO: 645119 - DNA, 185 bp, Homo sapiens
ccccggtgcaggctggagtgcagtgtcgtatttgcagctcaccacagcctcgacctctcgggctggagcgatcctcccgagtcagccttcctagtagctgggatcacaggcatgcaccaccatgcctggctaatttttaaagtacagttttctaatcttatgggaccgtggtcatatacgtggtc

SEQ ID NO: 645120 - DNA, 190 bp, Homo sapiens
tttttggggcttcccccggggggggggggcccccctttttttgctttcaaaaaaacccctcccccctttccccaaaggggttccccaaatggggtcccctggccccctgtcctgggaggggttcaaagggttcccttatggactaggtttggaacccctgggtttaataaacttaaaaaggggtgtttta

SEQ ID NO: 645121 - DNA, 659 bp, Homo sapiens
caaagctgctgagatgacaggtgtgggccccacgccagcctggcgtcgagtggagcccttcacccaaacatgaaccaggaggcgagcttggtaaggagcacgtgggctcaggaatgcgagggggaatgaatggaggcagctcctcagtgtgcaaaaacatgcagcgcgggcctcactggtcaccatcacagcagccttgcagtgggatcaggacagtcctgctgtccaggaaggagaggaccctgctctcttgtttctcactacctgctcctgtcgttctagtcccattgctgctctcaggacaagctgtgactgagagagcaggtcacgctggtgacattttatgaggctggatgcacagccccacagcaccttgtcactgaagctacaggaatccaagaaccagtgctctggccaagaagggagcactggggtgccctgaatggcacggacaaccccagccccccgccttcactgattatcatgacctgtggcttctgaaaggacagggcagtcttggaactttctgagaaacagatggtcaagtagatgtctgttagctcttttcttgaaattgtagtgacgaaaccatgactgccacttaggaaagtaacttgtgttgaaataacttttagaacaaagtaaatacattaagaaat

SEQ ID NO: 645122 - DNA, 288 bp, Homo sapiens
catgtgcatagctgactcttgagggtaaacggacggccaggcgaagacgacattgagtcatgacactacgttgctagaatcacatcaagccttacgaaaagcaaaaggccagcctgccaggggtggtgaaagctctgggcagatatggtcctgccgatgtggaagacactacaggaagtggagctacagatagtaaagatgatgatgacattgacctctttggatctgaggatgaggagaaaagtgaagaagcaaagaggctaagggaagaacgtcttgcgggggctg

SEQ ID NO: 645123 - DNA, 920 bp, Homo sapiens
gtgcgctgggtggcttcacctaaaggggtgttgctcccccggatgggtggattgatgatatgattctaaatacataactggcagtgataatagagagttagaataacttatatctagggttaaagtgttcaataaggtgaatatatggagtactctggtaagtagtctagataagctatatgaaactggaaaattggaactcactgactcaaaataatacaattaatagagaactactttaacagaaaggtagtcatgatggaacttgaggtgtatgtggaggtctgctaagaaccttggttgacaggtgggtcgcagaggacctgtacggaactgggtgagaaaggactttcctctctgtcgggccttattttgtgcacaatcttgtagattaatgccgccaccggtgtgacataatcccgaagcaagcgggcaggtcgtttcagacgagtgagcaactgacggcgtctagctcccctcagcatttacttctatgtactaatgtagtggtatggataatcattatagctgcacaaggaaggcgtctgatggcgacgttgacaggcggacgggagaggtgagagagcaacgcgttagagtagtctcatagaactgtcgatgcgtttaaagagttggggtcaggttagcacgcttacgatgtgtgcgccttgagctaatgtgagcatcaggaatggggtcggaacaggaccgggtcgctttaggtgggcatggacccgagaacctatccgtgaaaaatgggtttgaagacggaaagttgcaatgcccggatggagggggtcagcaaccggggactgcggtgaacccccgtcacggtactgccaaggctcaacgaacttgtgagcccccggagcgggacctgagagggaggtgacccggggaaagcagctggccccgaccag

SEQ ID NO: 645124 - DNA, 461 bp, Homo sapiens
  misc_feature (18)..(18): n is a, c, g, or t
  misc_feature (66)..(66): n is a, c, g, or t
  misc_feature (69)..(69): n is a, c, g, or t
  misc_feature (76)..(76): n is a, c, g, or t
  misc_feature (90)..(90): n is a, c, g, or t
  misc_feature (108)..(108): n is a, c, g, or t
  misc_feature (115)..(115): n is a, c, g, or t
  misc_feature (122)..(122): n is a, c, g, or t
  misc_feature (160)..(160): n is a, c, g, or t
  misc_feature (254)..(254): n is a, c, g, or t
  misc_feature (258)..(258): n is a, c, g, or t
  misc_feature (325)..(325): n is a, c, g, or t
  misc_feature (370)..(370): n is a, c, g, or t
  misc_feature (440)..(440): n is a, c, g, or t
tatcaagcaaagatttgngaataactacaatgtaaactttattttaaagatttgggggggcgtgcnggnggaaaanaggagaagagagcngggcttagaacataacanataaatnaaacgangccaaatggagagcctttctttaaactatatatatatntgccacttattttatttgttgaaggtattttgagcggcttcctctgtcagcggccacccggctcttcttaacctgttttgttttctgcgcagcncggntaaaagaccaacgggggtggatcaaatataaaggccacacctttcagaccgaacctactcaaagatnctttactttgcaataatttgaactggagaaccaaagacgggagangaatgaaagcaaagatgcgcaaagaaccaaaggaaagacctgaaggaatccacctgcataggccacgcgntccactctgggtcaaatgctt

SEQ ID NO: 645125 - DNA, 379 bp, Homo sapiens
  misc_feature (18)..(18): n is a, c, g, or t
  misc_feature (23)..(23): n is a, c, g, or t
  misc_feature (83)..(83): n is a, c, g, or t
  misc_feature (155)..(155): n is a, c, g, or t
  misc_feature (222)..(222): n is a, c, g, or t
  misc_feature (312)..(312): n is a, c, g, or t
  misc_feature (320)..(320): n is a, c, g, or t
  misc_feature (329)..(329): n is a, c, g, or t
ccttttcctttgctgttncttgnaaactgctttaagacccgtttgccccgttggccctcgaaaaccccaaacaacctgcctgnagtcaaggccggctccttcttaaacttgctctcgaaaggccccgaagtggccgtgctggtgcagcgcccagncagcgtgtcgcgcacggtcttgggcctgttgacccagtcctgctctccagaacccgcggctcttgcnccgcaccttccgcgctcagctcggcggccccggcagcggtggacaggctgtcggcgggccccggtgcgcaggcggcggcggttgtttctnccttgtgncgccttcanctgctcgtgctccacggcagcgctgctcgacacggatgccggccgcttgt

SEQ ID NO: 645126 - DNA, 148 bp, Homo sapiens
tggtgtcgtctagacgatcccctatacgagcgcagctccaactttgcatactgtaaacacttaacgtttctgcaggtccattttatacaacttgagagacgtaaaacttttctggttggcaccaggcatatcctttctttttctggtt

SEQ ID NO: 645127 - DNA, 612 bp, Homo sapiens
tttttttttttcggaggaacacaattttatgaagactcacagttataagacaaagctaaaacatttatatgtggtgatgattaaaacaagcaacaacgagcacttctaaggggaatggcgcttctgaaggttattggtacatcacaaaaagtcatggcaaggtcccacttggtatcaaaaactgtgcatgtcaaaatttctgggtatagtttcaaaagagaacaaagaacacgacaaagggcgcccaagaggaaaaaaaaccaatatatttttcgcagcgagcaggcctttaatattatatctcgtctatcatccatacatatctgcgagaagaagtgagaaccatcaagaccctcaccagcaagcgacagagaaggccggagacgcaacgcgagcagaaagcacagaggacgacacacagccacacaagagaaagaaggagacaacaaacaatagaaggagagacggcgcagggaaaacaaaaaagacagggaaatcaaacaaagcaaggacacgcgcagagcagaaaaacaaaagacaaagataacaacccagcacgcggacaggaaagtacgagcccaaaacaacgtgtgcgcccaaaacagactgcag

SEQ ID NO: 645128 - DNA, 301 bp, Homo sapiens
acaaactatatcagcaattcttactttctaagtacttacactggttaacataaaataactgaggctgggcgcaggggctcgcacctataatcccagcacttggggaggccgaggtgggtggatcacctgaggtcaggagttcgggaccagccgggccaacatggtgaaaccctgtctctactaaaaatacaaaaattagcggggcgtggtggtgcatgcctgtaatcccagctactcaggaggctgaggcaggagaatggcttgagcctgggaggcagaagttgtagtgagctaagatcgt

SEQ ID NO: 645129 - DNA, 110 bp, Homo sapiens
atttgatgccttccttttagtgtttttgaatcacctatcctcagtgctgaaattgatttttgtataactgaggggtctgttgggtcaaacttatgttaggttttacaggt

SEQ ID NO: 645130 - DNA, 844 bp, Homo sapiens
gtccaggcggctccagagtccaggttttttgggggtcacagggtctcgggccagatttttcgtcgggcgttgtggccacacccggtgttcgaagctccccccccggggtgacccgagttggccccccctttgggcgggcgcctttctgtgctcaaagagggtggggtaagacgtggcgtaagaattcccggtcttcttttcgggcgccacttttttcgctcttttctccccggatccaagggtttatgggcccacaacacacccttttaggggggcgcccgacccaggtgaacacttatagggagggtcccccgtgtgctggtgtgtggtctcgatgtttcccggggaccccgggttccttgcaaccacggtgctgggcctccggagagccccagggtccctgcacgcgcgctcctgagccccctcccttcgccgggggtatcgtttgcacgccccgcacacactagccgtgcctctatggctgttcacccttctcttttgttttaaatgacttcattagggtccccgcaccatctttaggtgtgattattttctgcgaaccgcggccggtcaccctcctgattttagataaaagttagcctcaggtgttgtccccacgggacgcgctcgggggggccccattttgtgggcttcctcgctcgggacttgtagtaaggctcccccgagggcctcccccccaatgttggtttccactgaggaagccccccgggtttttcccccccgtattttttcatttcccaacccccaccggttttaaaaaagatttttttgtaaccaccccgttaatttggaaccattttattaaggggatccgcccctttta

SEQ ID NO: 645131 - DNA, 233 bp, Homo sapiens
  misc_feature (3)..(4): n is a, c, g, or t
  misc_feature (8)..(8): n is a, c, g, or t
  misc_feature (10)..(10): n is a, c, g, or t
  misc_feature (58)..(58): n is a, c, g, or t
  misc_feature (60)..(60): n is a, c, g, or t
  misc_feature (92)..(92): n is a, c, g, or t
  misc_feature (102)..(102): n is a, c, g, or t
  misc_feature (109)..(109): n is a, c, g, or t
  misc_feature (112)..(113): n is a, c, g, or t
  misc_feature (120)..(120): n is a, c, g, or t
  misc_feature (132)..(132): n is a, c, g, or t
  misc_feature (148)..(148): n is a, c, g, or t
  misc_feature (155)..(155): n is a, c, g, or t
  misc_feature (161)..(161): n is a, c, g, or t
  misc_feature (164)..(165): n is a, c, g, or t
  misc_feature (186)..(186): n is a, c, g, or t
  misc_feature (189)..(189): n is a, c, g, or t
  misc_feature (192)..(192): n is a, c, g, or t
  misc_feature (221)..(221): n is a, c, g, or t
  misc_feature (227)..(227): n is a, c, g, or t
  misc_feature (232)..(232): n is a, c, g, or t
ctnntgcncntttttaaaaatcttcaaaaggttttaccagcataggtgtgaataagantnttttttttaattaaagaaaaaatattcacctnggcacagtgnatctcancanntgcgcanttcccaggtacnttgtggccagcgcccnagcgccnagcgcngcnnattccacgtgtgcaaacccgnagngcngcgtgccaaagcacccagccccgtgcgcnacaaancgtcnc

SEQ ID NO: 645132 - DNA, 326 bp, Homo sapiens
attcgagctcgagatccgagcactgtctgcgggtggacaggaactgtctagactcccgctggtgagcattttacctccatcactgatgtctgcccatgccctgtctgcctgccaggctagacccactcctaaggaagtgctctgtggcccgagttcctccgcaggcccagggtccggagggagctctggggagattagaaatggggctggctgggcatagtggctcctgcctagaatcccagcactctgagaggccaaagcaggaggaaccacttgagccctggagttcaagaccagcctgggcagcaaagcgtacccgtctctac

SEQ ID NO: 645133 - DNA, 307 bp, Homo sapiens
caacggatgtgcccgctccggtcgagtcgaaaaagagtcgcttgcgcgagctgcgatcgacgagatacttgtcgggaacgccaaggatctccatgatacaggcgagctgctcctgctcgttctcgcccggaaagatcgggtagccagtgtacatctcggccatgatgcacccgagcgaccacatctgcgagggtgagaagagtatcagctttccgcaaggtcactcccgcgcacatggatcggcttacatcgatcgacatgtggtagttttgacccaagatgacctcgggggagcggcaatgcgttg

SEQ ID NO: 645134 - DNA, 293 bp, Homo sapiens
tgggacacctgcacaccagtggccttcttgatcacggtgtctcttagacaggtccacgccatgtgagggcatgcacagaggcaggcagctcggcagcagtcggttcacttctgctgtgaccttactgttgtctccactgaggcccacaatctcatcgaccttggtacgtggggcagcgatttgggcagcaatctggggcagggcctctagcaccaaggccatctatgggtgcatccccggtatttctgggtaggcttctgcctttgagcttcaatccggtcagccttctgact

SEQ ID NO: 645135 - DNA, 205 bp, Homo sapiens
ggctgcttgctgtgagtggtctctgagggtgatacgtggggtagagagaggtgctgggtccagcgccagagcccagcgcgccctcgtcgacatgcctcggaaaattgaggaaatcaaggacttctgctcacagcccgacgaaggatgccaaatctgtcaagatcaagaaaattaaggcacatgggatgtaaattcgttgacgcag

SEQ ID NO: 645136 - DNA, 359 bp, Homo sapiens
gcggccgcctactactactactgctcgaattcaagcttctaacgatgtacggggacatgcttctggctgagtgatgtgattcacgcctgtaatcccagcgcttgggaggccaaagcaggaggattgcttgaggccaggagtttgcgatcagcctgggcaatatagcaagacccccatctctacaaaaaataatttttaaaaattagctgggtgtaatgacacacacttatgatcctagctacttgaaaggcctggggtgggaggatcgcttcaggccaagagttcaaggtcacagtgagctatgattgtgccactgcactcagcctgagcaatggagcaagaccctctctcttaaaaaa

SEQ ID NO: 645137 - DNA, 100 bp, Homo sapiens
gttgctgaaggttatcatcctgggagattctggagtcgggaagacatcatttatgaaccagctatgtttaatcagaattcagcaatcagttgcaaagccc

SEQ ID NO: 645138 - DNA, 637 bp, Homo sapiens
  misc_feature (96)..(96): n is a, c, g, or t
ggagccggagcgcgcgagctcgcaggcgcgaggaacgagcggtggctggctacgcacccgagaccgggcactgctgcgctcctgctcaggacccgngacccgagcgcctgatcccggccctatccccctccggccccgtggtccaccccggtctggcctagcggagcactccgcgtccgcccgccgcagacagccgcgtccatcccgcagccccggacccgctatcacaggctcgtcaggatggacgtgtctatgacagggcctgtccatggccaaggcagggcgtcgcggcagcccgcggagaaaacacaagcagggtggtcaaccagaggcggcggagaagaccaaggagggcgtcctctacgtcggaagcaaagacccgacgaagagtgtggtaccaaggtgtggctttcaagttggctgaaaaaaccaacgggaacaggcctcacattctgggaggcagctgtgattctcatgggcgcagggaacatcgacagcagcacacaaggactggtgaagagggaggaattccctactgatctgaagccacgaggacgtggcccaggaagctgctgaagaacactgattgagcaccatgatggagccacgaagggcgagagtaatgaggaccacccca

SEQ ID NO: 645139 - DNA, 937 bp, Homo sapiens
ggacgagagagaactagtctcgagttttgtgggttttttttaaaaaacaattctctacgtccactgtccccaagggtctatcctaaacgagtggtggccacaaccctttaaaagcaacaagaaaaagaaaaagggcaatataattgcaaaaggcagccagaagctctccaagaatgcccttgtcctcaggacctcttccccgaagtttaggcagtggccactcagggtcttggccacaggacaggggatgtggtctcagtaatacctgtcagggggcaagagcacaagtctgtctggaaggggtcggggagatcgcaggagaaggggatttgttgtggggatctcaccaatgggccataggatggaattcggcgggtcgacaggctagatttatgccaagacaaaaagagaacgcccctagagagcctaaatcttacaatgaggggatcctaatcctgggaaaatggggtagaaatagtaaaatctcccccaggacacatcgctcataacacaaggcaaaataaaagagaacgcaatggctaccttagaaagcgggtgaacgcgcgcacaaaggattgttgccattaaaagccataaaacgtgaaatgagaaatctcaacaggaacaaacgagccaagtggaaacaaattgcgcaaattggggccaatccgaggacccccaaataggacaagggccaaaccaagaggcctgccgacaagaataaccacctagaagaggaccgcgagaaatgaaaaggacacatagagagggatcaaaaagggaaaaagtcaacgagaggaagagacacggaaggaccaggggaaaaagccgatacagagggacaaaggggcaaccaggaaaagcccccagggcccacagagaagacgccccggcaggccgctgaaaaaatgttaggagagcacaaagagacaacgaa

SEQ ID NO: 645140 - DNA, 152 bp, Homo sapiens
  misc_feature (35)..(35): n is a, c, g, or t
cacgaggctgaaagctgataacaagcttggctgancaggaggaattcagagtctccagaaccgatgatgtcttgcaaatattggagcatcatttcctaaagttccttgcaacatgaacccatttatgtcacaccaatcttgacttccatatg

SEQ ID NO: 645141 - DNA, 671 bp, Homo sapiens
  misc_feature (146)..(146): n is a, c, g, or t
aaagaggcccgcccgctggggaggattctggagccgaggggcagaacatctctcggcgtggaagggcacgttccgaggttttataagagtggttctccctgttccagacttcgcacatgctaatctccacccccgcgccagcggcnggacgttgcgccctgtagggggaagtggtgctgcggcgggggtcctgtcttcttctgtaattcctgtatttgcatacggggaccccccccccgactgattttttttcctccatctaaattgcgagggtactgtgaactttacgtattttacctactgaaacccgtttaaactcaaaaggtccgcacttggagttcgttgtctcattaggcagtgcactgaagtttagtggacactatatcctgagatttcacacagatgccaagaaaggcggaaatggagcacacatttagtgcattaaaggacctaggataacttcgtttccttcatttgaatagtacctgctatgcatcagataatgtccatacttaatctatgacgtatttattattcctaactttatagatgaagtattcggggttcagagaagttacttcaacatacagtacttcagaatgctgataaaaggcacagtttaaagccagggttgtctgactccaaagctccatgcccttgcccctgtgaaa

SEQ ID NO: 645142 - DNA, 323 bp, Homo sapiens
ttccgggttgtgcatcccgagtacaccgactacggggactaatcttcaactcctacatacttcaccagctctacagccacattccttgagaccaccacactgactcctacaactgacatatccacagaatcttttatgacaccaatgatttctactacccccatcacttcttcaatgactctcagaaatacaatgacttctatgacaactgctgcctcccggcccacaacgactaatacattatcatcactcaccagtagcattttatcatccacacctgtcccaagcacagaagtgatcaccagtcaaaccacaaacccgga

SEQ ID NO: 645143 - DNA, 633 bp, Homo sapiens
ctgagaagacggtcgaacttgtactatctagagtatagcagcactaaaagcactctgagtcaagatgagtgggaaaccatctcaataaacacattttggataaaaaaaaaaaaaaaaaaaaaaaaaaaaaaaaaaaaaaaataaataaaaaaaaaaaaaaaaaaaaaaaaaaaaaaaaaaaaaaaaaaaaaaaaaaaaggaaaaaaaaaaaaaaaaaaaaaaaatgggcccaaatttgatcccaattggccaaatggcccttaaagggggcctataaaaaatcaacggcccgcgtttaaaaaaccttgaaatgggaaaaaccttgggttacccaaattaaagcctcttgaagaaaatcccttttcctccagttgggtaaatccaaaaagtgcccaaacgatatcctttcccaaaaattgtctatccttaatggcaaatggaaattggcaaccttaaatttctggaaaaatatcgcctaaaatttttggaaaatcattttatttttaacccataggccaaatacggaaaaatccctttaaaacaaaaagataatcctcaataggttaaaggtttattcattcctgaaaaagagtcctttttaaaaactggcttataacttgggtctttttgggc

SEQ ID NO: 645144 - DNA, 230 bp, Homo sapiens
ttagccggtccgtgggagctggggttctgtgtacacgctgcccacgaaggggagctggggttcctgtgtgcacgctgccttcacgaaggtgggagctggggttcctgtgtgcacgctgccttcagtgaagtgggagctgtggttcctgtgtgcacgctgccttcacaaagtgggtgctggggttcctgtgtacacattgccttcacttcgtgggagcacttcgtgggcag

SEQ ID NO: 645145 - DNA, 587 bp, Homo sapiens
  misc_feature (226)..(226): n is a, c, g, or t
tgctgggcctctctccgcagccgcgagacctggcgcttggcgcatatgccggttctaatttacaagaacacctgcggcctgagtgccgtgagagtcccttcaacccgtggagtgcctggccgggctgcagtggagccgagactggcgccattgccctccagcctggtgcaaaaatgagcgaaactcctgtctcacaaaaaaaaaacaagcatggcctgaaacctangtgaatgcttgctcggatggctgccatggcccctcttctcccgggctctgtgtccggaaggtgtaccgctcctgaggcagcccctgggttcccagcacgctgcgcgagaagcagggcggacgattgtataggccagtggagcccgagagattgcctacagtaaattgccccttgtgtgggaccctgattcaggagggctttctaccccagcacaattcctggcacggtgggatcgggcggccataggactcttgaaaggcacttcccacctgaaaaatggtcccaccgaagggtcgtaacttgtcttgctattcaggtacttgtagataaactccgtgaagacggacaacgactgtgagcc

SEQ ID NO: 645146 - DNA, 462 bp, Homo sapiens
ggcacgaggcagccacccagaccatgctccgccgactgggcgcccaagctgcagtcgccctctgtgtgcaggcagcagctgcctggcaacccccgagctcgctcgcgctgtcagcatcgcagaactagggccaggtgtcccagtggctgcggccaagccaggcattctgaccggcggcggcggctgcacaggagcgagaactgagaagccgccgctcaaccccacacggggtgactgctgagggcccataccaacggccccgatctccctcaggtggaggactgggcgggaggcacagcctgggggccctcaggctgggcgcgctggcgatcccgaggccgaccaggccatgcacctccagcccgcctgggcacccaagctgcagccgccttctgtgtgcaggcagcaacctccaggcaactcccgaatccgcccctcacttcccacatcttggaacgaggg

SEQ ID NO: 645147 - DNA, 949 bp, Homo sapiens
  misc_feature (7)..(7): n is a, c, g, or t
  misc_feature (36)..(36): n is a, c, g, or t
  misc_feature (108)..(108): n is a, c, g, or t
  misc_feature (126)..(126): n is a, c, g, or t
  misc_feature (134)..(134): n is a, c, g, or t
  misc_feature (136)..(136): n is a, c, g, or t
  misc_feature (139)..(139): n is a, c, g, or t
  misc_feature (172)..(172): n is a, c, g, or t
  misc_feature (181)..(181): n is a, c, g, or t
  misc_feature (205)..(205): n is a, c, g, or t
  misc_feature (215)..(215): n is a, c, g, or t
  misc_feature (232)..(232): n is a, c, g, or t
  misc_feature (248)..(248): n is a, c, g, or t
  misc_feature (252)..(252): n is a, c, g, or t
  misc_feature (275)..(275): n is a, c, g, or t
  misc_feature (281)..(281): n is a, c, g, or t
  misc_feature (302)..(302): n is a, c, g, or t
  misc_feature (321)..(321): n is a, c, g, or t
  misc_feature (326)..(326): n is a, c, g, or t
  misc_feature (366)..(366): n is a, c, g, or t
  misc_feature (373)..(373): n is a, c, g, or t
  misc_feature (377)..(377): n is a, c, g, or t
  misc_feature (380)..(380): n is a, c, g, or t
  misc_feature (397)..(398): n is a, c, g, or t
  misc_feature (402)..(402): n is a, c, g, or t
  misc_feature (425)..(425): n is a, c, g, or t
  misc_feature (496)..(496): n is a, c, g, or t
  misc_feature (502)..(502): n is a, c, g, or t
  misc_feature (552)..(552): n is a, c, g, or t
  misc_feature (596)..(596): n is a, c, g, or t
  misc_feature (602)..(602): n is a, c, g, or t
  misc_feature (606)..(606): n is a, c, g, or t
  misc_feature (630)..(630): n is a, c, g, or t
  misc_feature (633)..(633): n is a, c, g, or t
  misc_feature (683)..(683): n is a, c, g, or t
  misc_feature (692)..(692): n is a, c, g, or t
  misc_feature (698)..(698): n is a, c, g, or t
  misc_feature (701)..(701): n is a, c, g, or t
  misc_feature (703)..(703): n is a, c, g, or t
  misc_feature (705)..(705): n is a, c, g, or t
  misc_feature (710)..(710): n is a, c, g, or t
  misc_feature (713)..(713): n is a, c, g, or t
  misc_feature (715)..(715): n is a, c, g, or t
  misc_feature (730)..(730): n is a, c, g, or t
  misc_feature (734)..(734): n is a, c, g, or t
  misc_feature (736)..(737): n is a, c, g, or t
  misc_feature (739)..(739): n is a, c, g, or t
  misc_feature (818)..(818): n is a, c, g, or t
  misc_feature (824)..(824): n is a, c, g, or t
  misc_feature (840)..(840): n is a, c, g, or t
  misc_feature (844)..(844): n is a, c, g, or t
  misc_feature (858)..(858): n is a, c, g, or t
  misc_feature (937)..(937): n is a, c, g, or t
ggcagangcggccgggtctgcttcttccctgtcacngccgcagcagcttggggtgcaaggcggcctggggcggcggaatgggcgccccccgagttccgtctgaggaancggcggctgccgaggaantccacgananccnggtcccgcacgcccctggggtccgggtgctgangcgccgccnggccgcctccccgggccgcggcancgctccgaancaaccgccctctccaanggggccgcggcaaacnaatnggggcccttccctctaaaaaacncaaaantgcaaaaagccccaaaaaaanagaattgtaatcgtcaacncaacnggaaaaaaaaaaagcttcaatgcccgggaactcaaaaaanaagcgcnaaangtnaatgggtggcggtcacnnaaantttgccaatttccacaaaaaaangtccttcaaaaggtggagagatgtcgaataaggaaactgcagttacttgctcaccagtatatgatttcaantaaaantgagttctacattagtgaaagcttgcctgaatattttgcaccctatcaancagagcggtttcgaagacttggctacgtgtctctctgtgataangaaaanacangttgcaaagcccgggaactaaaancantttatgtggatgcagtaggacaatttcttaaactgatttttcaccaaaancaagtcaanaaaaanaanananaaaancangntgctttggttgccanaaanannantggagaccctgcagatttcagtgatgaaagcaatactgcctctcgagagaagttgattgaccactaccttgggcacaanagcgangaccctgctctagaangaangtacgccaggaaanctgactatatctctccgctagatgacttagcttttgatatgtaccaagatccagaagttgcacagatcatacgaaaaanagatgaaaaaaa

SEQ ID NO: 645148 - DNA, 114 bp, Homo sapiens
cctgctgcgtgcccgtgaccaaggttacggcgtgccggccgaagcgctgaagaaggccagcgagcgcctgctgcgctacctgcaggaacgcaacctgatcgaagtcgactacag

SEQ ID NO: 645149 - DNA, 121 bp, Homo sapiens
gaacatggtcagtttagttgcgagacatgtaatagcaatttcaaaatatcatgaaaatgggccccttcagtcagatcttggggatgatccctggtttgggacaaatttatgagcaaggaat

SEQ ID NO: 645150 - DNA, 110 bp, Homo sapiens
cttatctcccatgcaagcatggccaatcctattcttcccggcgtaggtcttcacctccgtcctcatcctcattcgagccgtcagacccggcccatcctcaatggatgcag

SEQ ID NO: 645151 - DNA, 531 bp, Homo sapiens
agaacgggtcacgtgagcgcctcgcctggatgtgagtttcagccagacctgtggatatctgggctttgggctgtatgatcattgagatggccactggaaatccctatcttcctagtagttctgatttggatttactccataaaattgttttgaaagtgggcaatttgtcacctcacttgcagaatatcttttccaagagccccatttttgctggggtagttcttcctcaagttcaacaccccaaaaatgcaagaaaaaaatatccaaaagcttaatggattgtcggcagatatagttcatagacggggtttcaccctgttggctgtggttggccaggctgctcttgaacttctgagcttaagtgatccggccaacttggccctccaaagtgctgggattaccggcatgtagtaccggacccagggcggtcatgcttgtgtacaaaatgagcctggtgaccgatatcatctagagaacctttgcgttatggagttttactgaagaggggttctttgaaaaaaattgaaaagg

SEQ ID NO: 645152 - DNA, 153 bp, Homo sapiens
ggacttacagagtagtactgcattactccctccgtctcagatcgtattctgctctatgtgtagctgccgcgaaagagactcgcagtccggcccttgcgacacgtgaaaaaatcacccagcgcgcaggcgcgctacgccccatgccgtacgccg

SEQ ID NO: 645153 - DNA, 362 bp, Homo sapiens
tctacaggatctacagggctgtgggtaggatggagtctagctgtgactgtgccaggaggggtgatcgagtgaagccaggtccagagagcaagctgtagcagaggtaccagcttcgcctggggcttcaagaacctcccatctatccccattcctgagacaggagttacagtcccgttttggccctcacatccaactagagagactgataccactgtgagtggctggcttttaattcccctgggccagacctgcagccttgccttcatcccttaactccaggactccaggggcagagtccctggccttcagccaagaggccttgccagcttggggtgccaccaacaagcgcctgggggtaccga

SEQ ID NO: 645154 - DNA, 1036 bp, Homo sapiens
  misc_feature (1036)..(1036): n is a, c, g, or t
ttttggttatgatgtctgtgtggaatgcggcctggtgcagcacattcaaattgttattattatgtcttacaagcataaataaaaaataaaacacttattgaatcaatcaaatcatctactaattaaaataaactgtaataaattcttaaaagctggtgcgctgcgattgagttttcttccccgggtcctttatgttcccttttttttttcaaaagcggcccccgggtcgccactctttatgtctactaaggcccgacacagcgatacaaaaactccagccccccccccgaatgccacagttgctccccgacttttcttggaggatcccccgcttccctctggtgcgcggccatagtccgcgcaagcatcccgctggtgtactcccggccacgaaggacatttccaccgagctttgtgccgtacctggctctgaccagccctgcggataccctgagtccgggaaagtccgtccgccggcgtgctcttggccttaagccttttttccccctccttctgttttgtatttttaaaatccttagccttgcttcaggtgcaagtgccccacggtctgcggctgcagaagaatccgagtgtttggcaggcttacggagaggaccacactgagaaatgaatgctgagacccccggacacgggtctgagccacagcgtgctcgccaccaaactgattctcacggttgtcacccaacagttgcagccttcacttttacttggaactttcaaaacctaagagtacacctccatccgtgttgtccttccgccgctcctacccatctttacgctgtgccggccgcatttctcgtactctcctctatacatctgcccatattggataaggtcttaacacacttatgccccccctttttgcctctattccccgcttcacttcccccgactatctttcgctctaccccacactccccgtccactacactgctctctctagtctcccacaccctctacggccacaccacgttccctctttccctcacctacgtctctccccgtcacctctctn

SEQ ID NO: 645155 - DNA, 147 bp, Homo sapiens
cagcaagggacagacagcagacgaaaagaggtgcaggccagtcccaggaagtcgagagaggccattcttggacccagtcctgttgacacctattaccacctacccccacagaccctgtcacactcactgaaaattgactggaccaga

SEQ ID NO: 645156 - DNA, 256 bp, Homo sapiens
tcgagatcttctccagtaaaatataacactgatcttgggttatacgctcacgaaaaagtgaccagacctgaagaagtattttgacagttgtaatggtgacctcgatcctgagattgtaaagtcattcctcttccagctactaaaaggctggattctgtcatagccgcaatgtgctaacacagggacctgaagccccagaaccgctaataaacaggaatggggagctgaaattggctgattttggccaagatctcga

SEQ ID NO: 645157 - DNA, 177 bp, Homo sapiens
  misc_feature (28)..(28): n is a, c, g, or t
aatgcagttaatacatgactcatgtatnaaaaatgtacatcatggtttcatggaaacaatgccccaccaggttggctgcctggatgatggatccctttccaaaaaccgaaaagcagaatggaagagacgggggtaaactggacggtgtgtacggggtgaggtgtcacttacagagag

SEQ ID NO: 645158 - DNA, 463 bp, Homo sapiens
gtcccattaatgatatggactcaaacatgaaccttactactaattactttcgcaccaattaatctagaaggacagattctttactctctcaacataaatttctctcttgaacaattctcctaggagagggtatcaaaatcaacttgtgaacctcttgtgggatcttagttattaaagtatttactctcattttagaaattctgattattttgggcgagcttacaggaccatagtttgagatagtcgactagaacatattcgtgcattacagccttgaatacagaatagcattggaactgatttcctcgataaattgttctgacccattcagggcattttggggacagactctacagtttactagtgggcccaggacatactgcaaaagaagtgaaatcagtattggagaagtggtctcatgaatatgggatctcgactactacaattgcctgttggcttctca

SEQ ID NO: 645159 - DNA, 1082 bp, Homo sapiens
gggaatgcagtagctccttgctaacgatgtttcaggaggtttggggcactatggtcttaatgagctctctgtcattcagggcttctctgggccatggtccccttcctctctggaacctgtgatgctatctcaccatcctagcagacctttaggtgctggttcactagctgtcagataactcagttcttgtgactcgatactgccgatgagcgaaggaggtggcctcgcgagagcatggctctggagctgcttggatgtctttagcgtgcggagtggtgagactggtctcccttcagacatgttagtcggggaaaccctcgcgtctactaggggtgatacacgatggtgacttttaaacgagcaaaagctagagtttctatgtgagaagatgctggaagacatgagtgttaggacatgtgtgaaggtccacatggagagacctgtgatgtctgctattgcattagtgctgtccgttatgacggtaaggcccatttgttgaacgtgttacacctgttgcatttcttcattttggatgttgtccatgtcatgttacctgtcatgacatcgcgttcaattcaaagtcgaaaacttggtacctggttttttacattcacaaagaccacaaaacacaagaacttcgagggccaccaaaggcaggaatgcggacgaaaaaacaggtaaatagaaatgggccctgtggcactacgaaatgagaccgtgaacccgcgtatcctgggagccaaacagaagaagaccggccgggaccccctaaaggagaagcacataaaatacgcaaacacccagggtgaaccgccataacggacgcggaaagtgagaaggaacgcgcaagcacggacagacagcccgcaccgggggacacccacgtgaccacaaaggggcttcgacaagccatatatagagaataagtcaatacaggaaatgctacaacaaaagggtcatactgacgaatcataaacaagtactaacagaaacaaaacaaaaagaaaacaacagttcattcatcatcgaaacaagagaagacaaataaccagcgcacaataaattcaacattttccctccct

SEQ ID NO: 645160 - DNA, 86 bp, Homo sapiens
gactgggatctgtgtctaggagtaatttgcagttatctaacataaacttgatttgcagtgatctgtaagtaattctgtataatacg

SEQ ID NO: 645161 - DNA, 600 bp, Homo sapiens
  misc_feature (600)..(600): n is a, c, g, or t
gtgttttgccaggctggtcttgaactcttgggctcaagcaatcctcctgccttagcctcccaaagtgataggattataggtataagccaccacagctgacctgtttttttttattttttattttttgtttttgagacgatgtcttgctctgcactccagcctgggcgacagagagagagactcatctcaaaacaaaacaaaacaaaaaagttggccaggcgtggtggctcactcctgtagtcccagcactttgggaggccgaggtgggcggatcatgaggtcaggagatcgagaccatcctggctaacacgatgaaacgccgtctctactaaaaatacaaaaaattggccaggcgtggtggtgggcacctatagtctcagctacttgggaggctgaggcgggagaatggcatgaacccgggaggcagaagttgcagtgagccgagattgcgccactgcactccagcctgggcgacagagtgagactctgtctcaaaaaaaaaacaaggttttgtggagatgaggtcttgtggcttgtggcgttgcccgggctggtcttgaactcctgggcttaagccatcctcccacctcagcctcccan

SEQ ID NO: 645162 - DNA, 992 bp, Homo sapiens
ggggcggataagtgcctcaggagtcctgacgcaatgtcttggggcgctaacggcggcggcggccttgtgtttacagctccagaagctcccgcatttggccgcgttctcgccgctcgcaggctcccggtgacgatggtggccccgcctgctgtctgcgcgcctggccccaggggcgctccgcggattggtccggcgagcccccagatcgcggcctgtcacgcagccggctccagaggccccggacagatatccttgcaggcgtcgaggcactcgtgcccacgcattgcagctactcacggacaggtctgtccaggctggcgtattcccaaatttgaaagacgccattcggatataccctctatgtgcacaaaaggcctctcttgagtgatcgggcatttcaggaaatgaagaacaattttgcaacagtgtttgacagactgggatgtgcaaaagagctgcgtgagcatgctgggttgcgtctgggacgaggcgataactaaacatatcgagctatcattttgtggaccctggtttgatactgtagcctatctgctcgagactccgtatgtctctgaacttttactcctgtttatgtgcttttcaatcctgacccagattctgagtgtaatgaccagttcacccgggctgtcacacatggactgttgctgccatccggttcctgaagacagctccgtgactgggcttctggaggcttgagtgttccacttgatgccctgcgaaggagtgaaactatgacttcaaggagactcgtcgcttggtgccttcctctctgtcctgttatggggcctactggcaaggggtatccgggatttgtcccgatttcggctttcagcacctggttaccaaccatcggatgatctttccggtaagccgacccctggtcctgggaggaatttacttttgccggccaaggactgtggccgtcgacgctttatagtaaagcccggttcggcttaaaggcttctcctttg

SEQ ID NO: 645163 - DNA, 134 bp, Homo sapiens
gcttgatgcgtgtggtcagatctagaggatcccggcctccctgtggttgcagagtactaagtcaggctctctcataagtcaatggtcgtatgactaggactgttaaagctgggtaagccatgtgggaggccggt

SEQ ID NO: 645164 - DNA, 347 bp, Homo sapiens
ccccccccccccccggtatcccaaaaaaaaaggggggggttccacaacttggccttcccccttaaagggccttttttggggggttctcccttgggggaattttccccggggtttcccagggggggttttaaggtaaaagggttttaccgggggtttccgccttcaaaaagcaggggggggaaattttgggggttccccggggttttttgccaaaaccccgggttgggattggggaaggggggaaaaccaggtcccttaaaccccaaaacccggggtttaacaaaagggggggggggcctcttttaacaaaaggggtatttatttttttaatttgggggggcccttta

SEQ ID NO: 645165 - DNA, 923 bp, Homo sapiens
caggtgaacagtggtatatgcagccactccagcctctgctgcaggcataccaccctggatgtggctgttcggagaggcctgtcccactggagcccagaggctgctgtgcgtggcctgggacagctggacctggcctccagacctcgcccatgacgggaggagtctgtggctgaacatcaggggcacggaggcggctgccctatccatgttccatgtctccactgccactgccagtgatgaccggtggtttcctgatgctgcatcttgggcttggtgcttgccccttgtgcctatgggctttcccagcctgaccttggttgctggttggctgctggaggccatggccattggcccttgcaagggcccaccacagcttgcactccttggcttgcaattgcttcagggtcgggcttgcgcatgtggggccgacgtccttgggccctacctgtgaagagagaaactcacagatacccaggtctatgcaagtggatcctaggcccgggttgcctgacatgggagtagggcacccgttcctaagccatatggcgcactttcccttcgtgttgggcgcttccaccacatgaggcacggtccatgtgccctgcattttacccttgcacgaatgggccagcttgaatgcctcacgttggcacggactggtgcaaggtgcccatacgctccaccatgggttggcgcattggcaacatgtccgggaccaatgggtggtggaagccgcttcgtacaacgccgccgaggaataatttggaccactcgtgcgaacggcccatgtaagcaccccaggcagggtctgccaccttaagaaggtaatcaccttcgaaacgggggtccccaatgagccattacggcggtaccgcaaagcctttcttttgataccaaagcgttgtgtcccgctagtatggtga

SEQ ID NO: 645166 - DNA, 485 bp, Homo sapiens
gaagcgcacgaaggcgcgtccgtgtgaagagaccaccaaacaggccttgtgtgagcaataaggctgtttatttcacctgggtacaggtgggctgagtccaaaaagagtcagcgaagggagataggggtggggccgttttataggatttgggtaggtaaaggaaaaagcggggttgttctctggcgggcaggagtgggggtcataaggtgctcagtaggggagcttctgagccaggatgagccaggagaaggaatttcacaagacaatgtcatcagtttaggcaggaacaggccattttcacttgttttgtggtggaatgtcatcagttaaggcaggaagcggccatctggatgtgtacatgcagggtcacaggggatatgatggcttagcttgggctcagaggcctgacattcctgtcttcttatattaataagaaaaataaaatgaaatagtggtaaagtgttgggacgcgccatcgtgcgctt

SEQ ID NO: 645167 - DNA, 162 bp, Homo sapiens
ggcaaggcgcagtcctaaggcatctttgcattctcatgccttggaagctgctaggtgctcagtaaaggctcagctcttcagatgaggccacacttgcccccatggccatgcaacccaaatcctcccaatgacccacaacccgttcccagcatggttcagcac

SEQ ID NO: 645168 - DNA, 537 bp, Homo sapiens
agcggggatccagccggcgagctgcctctctggagcccaggtcttgggccccctgtactcacctgctcttcctgggctggctgtctcctgctcatccagccatgcggtggctgtggcccctggctgtctctcttgctgtgattttggctgtggggctaagcagggtctctgggggtgccccccggcatcctgggcaggcacagagccggagacccaggagcagcagagccgatccaagaggggcaccgaggatgaggaggccaagggcgtggcacccaggtatgtgcctgaggagtgcgcggagatacccccggctcatatcaccctgctgggcctgatagccaatcaagcgcctaggtggtctaccagactcttaaacccgactaaggatggggggcaccccaagacagtgggcaggaactcgaggggcaagctgacagggtgcaccagggccagaggctacagatccagaaccccctgtatccgggaccgagagctcctgacaggcctatgccatctatgcttctggcgctggtg

SEQ ID NO: 645169 - DNA, 2054 bp, Homo sapiens
  misc_feature (1571)..(1571): n is a, c, g, or t
gacgcggaggcaggaggagcagtcatcattgttccgggagccgtcaccacagtaggtccctcgtgatcagatcgtgccagacacatctcaggcctccccaagccccgacaaacgccgcgcggactcgtgagacagcaggaccacgagcggacggcgtgcaggcaagcatgacaaggacatgcagtcatccagcacatcaagggcatgagaaggaccatggaaccaagtactaccatagcgtggatacatcgttccactcgggacaaggaacacagcaccccgggacagacaggaacacacgcggataccaaaggatacccaagatatcgaatgaggaggaagacacacagacgggaaccggaaggaaagcgaaacgcacacagcagggcacggacaggaacagcacacgacgggcacacccgacagggtgacacagcacatgaaaacacatggagaacagcagacagccacctcgggagacaggcagatggacctgggcgaacaagaacagagcgaaaatgacaacacagacacggacacccgcgagagcaatagaagaccacacgagcagaaaggaacaaccaccaagaaagtggcccagcgaacacacagcgaacagcacagattgcaccgtgccaaacgagaacccgcacacgagcaccaccacgatctagaccacgatagggcgaaagaaacaaccaagcacaacaaacgatgtggacacatcatgtccggcacgaaccgctgacaacgactagagagagaagacacacaaccgagaagagaggaaaacaccaccccaccaagtggcgcacgcaggagcaaacacagcggcatacatacacgacacaccacgcaagcgacacacgagcacacaccaagcgagaggaaagaaataacgacggagaggacaacaaaacgtacaccgcgagcatgacacatacgacgggcgacgaaaacatcgaccaggagacgaaagaacacggaaaggagagtgaatacacacgagacagaacaacatagtagagatcaacgccacgacagggaaagagacacacgaagtagcacagcagcagcaccatcgataccaacataaacagtaggaccagtaaggaaacgacacaaatgcagacccagaatcacaaaaagaagaacaacagccacataagacaggagacagcaaacagaacaagcgaacttgtcacagaagcagacgaggggagcgaagaaaagcaacagacaacggagcaaaagaaaaagaggagaacaccagaacgaggaataccgacgaaaggcaacagtacgagatagatgaggcacaacagaccacgaggacagcgaaagacaaacagcacactagcatcgagagtaagcgaagtagctgacagcagaacgcccgcgatcagcgagacctcgcggaccatcaagaacacatcacaccacgacgccgagcaagatgcagggatgcacgagccgcgagatgagctaacggagacgcagacaagcgacacacaaagaccagaagctgaaagtacgaggtaagcattgataatggatagccgacacacacngcagagacagcagcacgacgcggaggcaacacaccgcacactaatagacgaggcaaatcgcagaggacaggcgagagcgcgccggaagacgagcggaacggtaggaccacagatcagcagagaatcagtcacatgacgcacatggccactgctgacagcccactgacacaacgcagcggagccacagacgaggagcgcgacgcaacgagagcggagcagagcgcacgacgcagagcagcacacgaaagaggaaaagcacaggacagaagcggagagacgaacgacacacgcgcaacaaagcagcagcgagagacagacagactcaggaacagagcacgcgagacagggcacgcgccacctgcagccaagagggacagcgagcgagagagcacacgacggctaagagcggacacacgcgaagagccaaggcgacactaagcaagcacagagatagacaaacacagcagaatcaaagaaaacaga

SEQ ID NO: 645170 - DNA, 602 bp, Homo sapiens
  misc_feature (568)..(568): n is a, c, g, or t
ttacaacagctccagttacaacagcttccaagctttccatgggtctgcactgttacgatgagaaaaaaatcctccagtcctgtgtcaaaatctccctacaactggtgagcaatgaataaacttctcagcaggtaatattattcagataagcaatagtaagggtgaaccttatggaaaaatgctttaaaacaaaaaagagagccctgtagctcatgttttagtagaaagccacacgcagataaagataacacctaccttcttgtcaacaaagacctcaagacccataggattagctacaaccaaccaacattcaccatgtttcccagatgggaaaaacaatagggctagtgctttgcaagtccactgaaggtgaaaaagaaggcaggaaaacgccttcagtgcctgcaaaccgtgagtctgtacagtcttcccttcagctccaaatgcccctggcagacacttactctatctggcaatggggttgagtggaccttccgaagcgcctcacttaccctcatggtgtttcagggatgagtgtcaggtcgagggacagttttggttgcttcanatgggacatgtcagtgatggccaaagtcactatg

SEQ ID NO: 645171 - DNA, 107 bp, Homo sapiens
cttattatgttttttcccttttaagtaagggggtcttgttatggataacttcccaaaagcatcggtaaacttcgggtacaaaaatattccattaaactctttccggg

SEQ ID NO: 645172 - DNA, 783 bp, Homo sapiens
  misc_feature (90)..(90): n is a, c, g, or t
  misc_feature (134)..(135): n is a, c, g, or t
  misc_feature (147)..(147): n is a, c, g, or t
  misc_feature (207)..(207): n is a, c, g, or t
  misc_feature (213)..(213): n is a, c, g, or t
  misc_feature (222)..(222): n is a, c, g, or t
  misc_feature (229)..(229): n is a, c, g, or t
  misc_feature (232)..(232): n is a, c, g, or t
  misc_feature (254)..(254): n is a, c, g, or t
  misc_feature (256)..(256): n is a, c, g, or t
  misc_feature (260)..(260): n is a, c, g, or t
  misc_feature (280)..(280): n is a, c, g, or t
  misc_feature (325)..(325): n is a, c, g, or t
  misc_feature (327)..(328): n is a, c, g, or t
  misc_feature (339)..(339): n is a, c, g, or t
  misc_feature (342)..(342): n is a, c, g, or t
  misc_feature (514)..(514): n is a, c, g, or t
  misc_feature (531)..(531): n is a, c, g, or t
  misc_feature (572)..(572): n is a, c, g, or t
agcgggagggagtgcgtggcgaggccaccatcatcaccaccaccctccagcaggctcctgcggtggcggccgccgcggctccccaggacnccgcgacaagagccgggtgggcagcggtgcaccccaagccgcgnncccggcgcccgncggcctcgtcgcaggaaacccgggtggggacggggcccccgcagccacgggcaccgcggncgccgnctctttagnccaccgncgncgacagcgaagacgcggagaananagtnctcgccaccaaagtccttgngcactgtcaaactgggtcaacgtcagaaatggatatggatttatnanntcgaaatgacnccnaagaagatctatttatacatcagactgccagtcaagaaagaataagcccacagaaatatctgcgcagtgtaggagatggagaaactgtagagtttgatgtggtttaaggagagaagggtgcatgaagcagccagtgtgactggccggggtggagttcctgtggagggcagtngttacgcgctgattggncgccgttacagacgtggctactatggaaagcgccatggccntccccgggattacgctgggaggaggaggaagaagggagcggcagcaagtgaaggatttgaccccctaccactgataggcagttctctggggcccggaatcggctgcgccgccaccagtatcgcccccagtacaggcagcagcggttccgccttaccacgtgggacagacgtttgaccgtcgctcacgggtcttacccatcccaacagaata

SEQ ID NO: 645173 - DNA, 172 bp, Homo sapiens
gctcaaatccactatctaaaaaacccccaaccttataacttacctcctcacaccctattcggcaccaatctatcaccctatagaagaactaatgtccgtataggataacatgaaaacattactcctccgcatagtcctgcgtctgattaaaacactgaactgaccaatgctt

SEQ ID NO: 645174 - DNA, 1159 bp, Homo sapiens
  misc_feature (352)..(352): n is a, c, g, or t
tctctcagtaagtaaaggttatgctaatttttgtttgttcttttttttttggcaatccatattacatgtgtaactcccacgtgcatccccacactctgaggggtgggacgtgttattctcccgtggtttatacagatggggaaactgaggcttgtgagcaagtgcggcagttgtgcccccagaacttaccagaagcctagtgggctatacatctcaggagtgtttacaacactgtggtggttcctcctaatacgtgggcgggtgggcaagtgggtgaaacaaccatgtgttgggggggcagcgccattgcattattaaaattctcagtgggaaccctttcataacttcttcncataggaaggttagtttacttctgtgggtctgcgtttggggttctttaacacaagagcaaaaacagagtctgtggcctcgggtccaccccgaaggccataaaaagtgtgcacagggtgtggccagtctcctcggatctcaacgcgacaaacccggtcgtggcctctccccgagggggtctcgaggggggccagaattcctcatcgctgtgtgcttgtccaggcccctctcccccgagggggtataaccccggtgggggcacatctcacccgaggggcgtgtgtgtgccccaacgccaatgtgtgccccccaagtgtatacagatgtcttgatggggcataaatataggggggcgataaaccaggacgtcgacgaaattgtgacccaccccatagtgtttgtggggaccaggaggaagggggctccctgcgaaagattcctcgcggtgggaaaccccgtgtggtgaggaattcccgggcgtcgcggacctttccgggggctcttcccacaaagaagtgtggccgtgggggagaattttataaaccaggggggggctatttggaaaggcccccaaagttggggtgcggccctcgttggtgttccccccgttgggggtagcattaataaaggctcttccccaaatttttgtgacagcaggtgaaatttggttgtgcgcccaaaacaaaattcgtggaatggggcaccccctgaggaaagagaagggggacaacaccatgttgtcccgtgcttgtggggggcgtgaaaaaacacagagaatgggggagggtgccccttgacggaaaacacc

SEQ ID NO: 645175 - DNA, 118 bp, Homo sapiens
gatgtcgggacgacgggacgacggactgtcgtgacgacgggacgggactgtctggacgacggggacgacggactgtcgagagacgggacgacggactgtcgagacgagggacgacgga

SEQ ID NO: 645176 - DNA, 384 bp, Homo sapiens
gagtttttcaacaactcgatgcattccattctgtccataaaaggaggcagtgttgaattgcagctgttgaaagatacattccttctctattggcaagaaatattatctgtgactgaatcttcatcttactttgtcaaccttgttcacaccattaattacaagccccataaacacattaacaatacaatagtggttttaggttatgaacctaatgtcacgccctgaccttagagatcctttttattctctattttggttaggtcagggtgtgactagggtgggtagtctagttttttcatttctatagttggcctggtatggatcctaatcagaggcagctgtctattgttgtctctgattggggtcgacgcggccgcgaattta

SEQ ID NO: 645177 - DNA, 704 bp, Homo sapiens
gcggggaaggaggatggcggatatcatcgtgaagactccgggaggactgggatccaaagaacgtgatgatacatggaaggcctgatggagagctcccggtactttcaatgattggaccaatggccacgtttccactacctgtgacgctgcacatgtgactgactgaggtgcacctgtgcatggactgactagtcgggcgtcgtggcaatgccacatggatgctctatcagttgtgcacagaatgttcatatgcatgcgcttgtgttgtggatgaccgagtctgtgttgcagcgcattgcgactgaagtgggatgaattgcgccagtttccctctgatgacgatcagagcaatgtgcgtcgctgtaccctgcctggtgtgccatagagtctcacggcaatcatctgctggtgtggcaatggacccccatggaggggccatgctggcacatgctgcgtgtgtttgcacatgagtgcgtgaacacatgctcccttgtggccatgctgacctggactgccctgcatgcataaccgccaggccctcagtcttccacatggagattgctgaaggtggagagcccttggcacgtaccagcatggactccatgtggccatgacagactgaatgagaaggcaaatgtgcatgtgccacttatccaccaggagggcaaccgtgtttgtaccgcgaggggcatgtgaagggaggc

SEQ ID NO: 645178 - DNA, 489 bp, Homo sapiens
  misc_feature (12)..(12): n is a, c, g, or t
  misc_feature (46)..(46): n is a, c, g, or t
  misc_feature (95)..(95): n is a, c, g, or t
  misc_feature (103)..(103): n is a, c, g, or t
  misc_feature (226)..(226): n is a, c, g, or t
gcgagaagccgncgaggggagcagataaagcttgggcctggtggcntagtcggttctctccccgtcggagcctttgccgcaaacatgtccgcccngatctcgntcagcccagaagcatccgagcttgatccccttcttggtatttattggaactggagctactggagcaccactgtatctctgcgtctggcattgttcatcccagatgtttgttgggacagaatancccgagcctggaacaactgggtcccatgatcatacagttctactcagtgatgtggattacagcagctgaagaggaacgtccagatttctaaatgaaatgtttcactataacgctgctttagaatgaaggtcttccagaagccacatccgcacaattttccacttaaccaggaaatatttctcctctaaatgcatgaaatcatgttggagatctctattgtaatctctattggagattacaatgattaaatcaataaataactc

SEQ ID NO: 645179 - DNA, 850 bp, Homo sapiens
atcagaatttaaatgacaaaagagaaggaagaggctgattgctggagtgttatagaaatcttggccgggcgtggtggctcacgcttgtaatcccagcactttgggaggccgaggcgggtggatcacgaggtcaggagatcgagaccatcctggctaacacggtgaaaccccgtctctactaaaaatacaaaaaaaaaattagccgggcgtgatgtgcgggcgcctgtagtcccagctactcgggaggctgaggcaagagaatggcgtgaacccgggaggcggagcttgcagtgagccgagattgcgccactgcactcccgcctgggccacagagcgagactccgtctcaaaaaaaaaaaaaaaaaaaaaaaagaaagaaaattttataaaagccaagggttaaaaaaacaagtagcacataacgacctagggaacgcttcctaggccataaaagagcctttgaagttactactgaactgggttttagacacaattgacgtcatggagtgggaccaacgtgatgaccatcaaaaaagcttttctaccccaagattattggactcagcagacggaatatagggaacgattggtccaatactcacctgcagaaaacaaagggcgccagggcaaggatataggattctttctaaccaggcaaaacgtgggtatttcccaaaggggagataaattaatacactgataaaccctggaatgatgaaatcgtacagggaacgctattggtaaacgtgacgcatatcagacgcctatctgtggaccacataaccccaccggcactaggtgcagagaacatatgcgcgttcaaacgataacacgacgttatgtaagaacg

SEQ ID NO: 645180 - DNA, 298 bp, Homo sapiens
gctttttaattttggggtaaaaaaaaggcaaatgggtaaccttgccccccttttactcaatagcgcacacccccacgagcccacccacccagagataccctgtctttttctttctttctctccctttctctctctggcaagttcccaagtttttatggtcattttttaggtggggcagcaaaaattcagggcaaataagcccccccaacagcaattttttttttttttttttgggaacagaaaaccccccaaacccccttttttaaccccccctcaacagaaacaaaggattcctcca

SEQ ID NO: 645181 - DNA, 797 bp, Homo sapiens
  misc_feature (1)..(1): n is a, c, g, or t
ncaattgcgggggcggaataaatgttccgttccccctaggagaggggccttccgtttcccacgccaatttttaagagagttgtttctactcggaccatcaagttgggtgccccgggaattgtacccccctttcctaggaatagcccaggtttcctcagccaaaaaaaactggtttcaggagctgttcttccagaaatgtcagcggtaattgcagtcacagcttgtctagagaacgtggtactggttaggttgaacccatggcctcagcaccctccaaagtggtgccagagcctgaacatgagtcccgggaggaccgccccttcaggaagcgtatgatcttcttaatcatggcgtcctggtatacatggaaacacctgttggcacagcagtcaatgtggttcagtcagatggacggagcgtgcttttagccagctgtttgcccatgctatgccggtcatggtgattagtaccgtacccccctggtcccagggccctagggctcacttgaaaacgtcgaaagtaagcacagcgtgcatgtcctcaggcaggacctgaggctcaggcctctcccatccatcgatcatgggctcaatgttcttcaagcagcttatatgcaatccaagtctcctggatatagaaaggaaaggagtttgcatgccgctgtacccgtctaggtccccttgtaggcaggcaggtgttagcaggccctctgtcccgaggttgggcccaggtcaggtcgcctgtccttatgtcctcgtaaatgtatgccttctccgccgaagtgtaataaataatcc

SEQ ID NO: 645182 - DNA, 401 bp, Homo sapiens
  misc_feature (9)..(9): n is a, c, g, or t
  misc_feature (353)..(353): n is a, c, g, or t
  misc_feature (382)..(382): n is a, c, g, or t
  misc_feature (386)..(386): n is a, c, g, or t
  misc_feature (401)..(401): n is a, c, g, or t
aaacccccnatctcctattacaaatacaaaaattagcccaggtgtggtgatggtgcatgtcatttcatttcacacacaaaattgttgtggatgccttcaaccttaaaaatccctggcccaggcgccgtggctcatgccctgtaatcttagcacttcgggaacccgaggtggctggatcacccgaggtcaggacttcgagaccggcctggccaacatggtgaaaccccatctctactaaaaatacaaaaaaattagccgggtatggtggtgcatgcctgtaatccagctacttgggaggtgtagacaggagaatcacttgaacccgggaggcagaggatgcagtgagccaagantcgtgccattgcacttcagcctgagtganaaangaaaaacttcatctn

SEQ ID NO: 645183 - DNA, 238 bp, Homo sapiens
cccccaaaataaaaaaaagttttttcccaggaatttgggggggggtggctgggggctgcgttttgccccccccaggatttaaaggattaccgggttttcccatgaccaaaattttaagattggtttctactattcggtccccaaaactgaggctttttgaaaaaaaaatgtaaaatgttatttgttttattatagcaattattcctaattaaagcagtatttaatgcaatttccagtt

SEQ ID NO: 645184 - DNA, 984 bp, Homo sapiens
  misc_feature (641)..(641): n is a, c, g, or t
  misc_feature (984)..(984): n is a, c, g, or t
agcggagcgggcgagcaagggagcgagcaggacaggagcctgatcccacagcagctgctccagcccgcgatgaggaaaagtccaggtctgtctgactgtctttgggcctggatcctccttctgagcacactgactggaagaagctatggacagccgtcattacaagatgaacttaaagacaataccactgtcttcaccaggattttggacagactcctagatggttatgacaatcgcctgagaccaggattgggagagcgtgtaaccgaagtgaagactgatatcttcgtcaccagtttcggacccgtttcagaccatgatatggaatatacaatagatgtatttttccgtcaaagctggaaggatgaaaggttaaaatttaaaggacctatgacagtcctccggttaaataacctaatggcaagtaaaatctggactccggacacatttttccacaatggaaagaagtcagtggcccacaacatgaccatgcccaacaaactcctgcggatcacagaggatggcaccttgctgtacaccatgaggctgacagtgagagctgaatgtccgatgcatttggaggacttccctatggatgcccatgcttgcccactaaaatttgggaagttatgcttatacangagcagaagttgtttatgaatggaccagagagccagcacgcctcagtggttggtacgcagaagatgggatcacgtctaaaccagtatgaccttcttgggacaaccggtagaactctgggagttgtccagttcaagttccgggacgactttgttggttgacccctcctttccccttggaggacaaccggatgggtaccttggtttttcaaagctacccttcgctggtaaggccgggattccttcaaaggtctcctttggtccacagagagttcgtgcccccacaggacacggggttgggggtagcacgtgccacgagtgacactgtgactcggcgaaatcccgn

SEQ ID NO: 645185 - DNA, 1274 bp, Homo sapiens
  misc_feature (261)..(261): n is a, c, g, or t
  misc_feature (310)..(310): n is a, c, g, or t
  misc_feature (328)..(328): n is a, c, g, or t
  misc_feature (931)..(931): n is a, c, g, or t
  misc_feature (1274)..(1274): n is a, c, g, or t
agcgcggggagagaggcgagacgagtgctctccccacacgtgtaaccctgcatctcccagtttcagagcttgcgttcattcatatgcaggcagtggtttaatatttgatcaaagctgcagatggatatgggaagcaaattgggtgtgaaatcttcagcaaaggagcacgcagagtccatgatggctcagaccaagtgagtgagaggcagagcgaggacgcccctctgctctggcgcgcccggactcggactcgcagactcncgctggctccagtctctccacgattctctctcccagacttttccccggncttaagagatcctgtgtncagagggggccttcagctgctccagcccgcgatgaggaaaagtccaggtctgtctgactgtctttgggcctggatcctccttctgagcacactgactggaagaagctatggacagccgtcattacaagatgaacttaaagacaataccactgtcttcaccaggattttggacagactcctagatggttatgacaatcgcctgagaccaggattgggagagcgtgtaaccgaagtgaagactgatatcttcgtcaccagtttcggacccgtttcagaccatgatatggaatatacaatagatgtatttttccgtcaaagctggaaggatgaaaggttaaaatttaaaggacctatgacagtcctccggttaaataacctaatggcaagtaaaatctggactccggacacatttttccacaatggaaagaagtcagtggcccacaacatgaccatgcccaacaaactcctgcggatcacagaggatggcaccttgctgtacaccatgaggctgacagtgagagctgaatgtccgatgcatttggaggacttccctatggatgcccatgcttgcccactaaaatttgggaagttatgcttatacangagcagaagttgtttatgaatggaccagagagccagcacgcctcagtggttggtacgcagaagatgggatcacgtctaaaccagtatgaccttcttgggacaaccggtagaactctgggagttgtccagttcaagttccgggacgactttgttggttgacccctcctttccccttggaggacaaccggatgggtaccttggtttttcaaagctacccttcgctggtaaggccgggattccttcaaaggtctcctttggtccacagagagttcgtgcccccacaggacacggggttgggggtagcacgtgccacgagtgacactgtgactcggcgaaatcccgn

SEQ ID NO: 645186 - DNA, 992 bp, Homo sapiens
  misc_feature (649)..(649): n is a, c, g, or t
  misc_feature (992)..(992): n is a, c, g, or t
agcggggttgtaacctgatgtttcttgctagagacattgatctctacttatctacttttcagctgctccagcccgcgatgaggaaaagtccaggtctgtctgactgtctttgggcctggatcctccttctgagcacactgactggaagaagctatggacagccgtcattacaagatgaacttaaagacaataccactgtcttcaccaggattttggacagactcctagatggttatgacaatcgcctgagaccaggattgggagagcgtgtaaccgaagtgaagactgatatcttcgtcaccagtttcggacccgtttcagaccatgatatggaatatacaatagatgtatttttccgtcaaagctggaaggatgaaaggttaaaatttaaaggacctatgacagtcctccggttaaataacctaatggcaagtaaaatctggactccggacacatttttccacaatggaaagaagtcagtggcccacaacatgaccatgcccaacaaactcctgcggatcacagaggatggcaccttgctgtacaccatgaggctgacagtgagagctgaatgtccgatgcatttggaggacttccctatggatgcccatgcttgcccactaaaatttgggaagttatgcttatacangagcagaagttgtttatgaatggaccagagagccagcacgcctcagtggttggtacgcagaagatgggatcacgtctaaaccagtatgaccttcttgggacaaccggtagaactctgggagttgtccagttcaagttccgggacgactttgttggttgacccctcctttccccttggaggacaaccggatgggtaccttggtttttcaaagctacccttcgctggtaaggccgggattccttcaaaggtctcctttggtccacagagagttcgtgcccccacaggacacggggttgggggtagcacgtgccacgagtgacactgtgactcggcgaaatcccgn

SEQ ID NO: 645187 - DNA, 269 bp, Homo sapiens
cccgactagcccgacagtggacgtgttgtgtgtggcgatccagtgctgctgtggactgggcgtgatgcttcaaggaggcctgaggctgtggtgttgtcaggtaagagtgttgtttcatgtggagcctgggctgctgtcgggctagtcggggctgtcgggctagtcggggctgtcgggctagtcggggctgtcgggctagtcggggctgtcgggctagtcggggctgtcgggctagtcggggctgtcgggctagtcgggggggtaccgag

SEQ ID NO: 645188 - DNA, 1073 bp, Homo sapiens
  misc_feature (730)..(730): n is a, c, g, or t
  misc_feature (1073)..(1073): n is a, c, g, or t
ggaaggcacgctcttgtcctggctgcaaaattgcctgtttttccctttccagtggacgctggtgaaatgccctcttgtgtaggggtctctcccattctgaacacgaaaactcaacttagtctttgatatggatggcatggcagctgctccagcccgcgatgaggaaaagtccaggtctgtctgactgtctttgggcctggatcctccttctgagcacactgactggaagaagctatggacagccgtcattacaagatgaacttaaagacaataccactgtcttcaccaggattttggacagactcctagatggttatgacaatcgcctgagaccaggattgggagagcgtgtaaccgaagtgaagactgatatcttcgtcaccagtttcggacccgtttcagaccatgatatggaatatacaatagatgtatttttccgtcaaagctggaaggatgaaaggttaaaatttaaaggacctatgacagtcctccggttaaataacctaatggcaagtaaaatctggactccggacacatttttccacaatggaaagaagtcagtggcccacaacatgaccatgcccaacaaactcctgcggatcacagaggatggcaccttgctgtacaccatgaggctgacagtgagagctgaatgtccgatgcatttggaggacttccctatggatgcccatgcttgcccactaaaatttgggaagttatgcttatacangagcagaagttgtttatgaatggaccagagagccagcacgcctcagtggttggtacgcagaagatgggatcacgtctaaaccagtatgaccttcttgggacaaccggtagaactctgggagttgtccagttcaagttccgggacgactttgttggttgacccctcctttccccttggaggacaaccggatgggtaccttggtttttcaaagctacccttcgctggtaaggccgggattccttcaaaggtctcctttggtccacagagagttcgtgcccccacaggacacggggttgggggtagcacgtgccacgagtgacactgtgactcggcgaaatcccgn

SEQ ID NO: 645189 - DNA, 404 bp, Homo sapiens
caccagattttattgtagtaaatgatcaaatagactagtatctacatatattttatgcaatcgtgacatctaaagtttcctcaattttctcaacatttctgggctacacagttcatctgagtttttcaaattattgcacatgttcaaaagtttttccagtgtatttattgaaatctgcatataagtgaacacacatagttctactgttcgagtcaacagtatgtatgtatatactattgtttctgtatatatgtatatatgtgtgtgtgtgtgtatatatatgtgtgtgtgtatatatatatatatatatatatatatatatatgtatatatgcttatgtataatatgagatttattgatttattgattggtgttgtatttgattgtatgtagatgtgatgtgt

SEQ ID NO: 645190 - DNA, 650 bp, Homo sapiens
ttgtagaaataaactcttatgtgtgttgtggtatatgatatcgtggattcctagagaatatggaaatcaccgttcaagtcgggggagacatacccaagtcatctgtagagatttggacccccccacagtaatacatctttatcatagtcgtggcgcgttgcctaactctccgagaaatctacttctctcgctgtatatatgcgcggcagcacatctcgtgcaccacgcgctaaagtacacaacgctagttttggcgcgacaaatctatctcccacaccgctccacacacattctatgtggtgagcatcatcacctacatggtatcgcggaggatatctcctctctgtacaacaaactgtttgtgtctgttacaatgcaattcggtatatgagtgcggcaggcggcacattgggctcccacccacagcagatcacctcatctcctgtattggaacaaggcacgaccccttgcggtttctctgtgaacacatcttttcagtgtcgtgtctgttacaagataggtgatgataccccttcgcacgcccgctcgtctattcgttatgtagtgatgacatgacatgggccgccttgtacacgtcaggacagaaattcaaccatgtacccacccaggacactacaaatggaagacaa

SEQ ID NO: 645191 - DNA, 1323 bp, Homo sapiens
  misc_feature (16)..(16): n is a, c, g, or t
  misc_feature (84)..(84): n is a, c, g, or t
  misc_feature (134)..(134): n is a, c, g, or t
  misc_feature (310)..(310): n is a, c, g, or t
  misc_feature (359)..(359): n is a, c, g, or t
  misc_feature (377)..(377): n is a, c, g, or t
  misc_feature (980)..(980): n is a, c, g, or t
  misc_feature (1323)..(1323): n is a, c, g, or t
gcatataaaaaatggncggattggtctccagatccagaggctggtaccaccttcctttctaaaataaaatctctctggcatgangtcaccgcctatttcacatccggtttgccctgggacgtattactactgtnttggtaaagagaaatcttttgttgtatagctgcagatggatatgggaagcaaattgggtgtgaaatcttcagcaaaggagcacgcagagtccatgatggctcagaccaagtgagtgagaggcagagcgaggacgcccctctgctctggcgcgcccggactcggactcgcagactcncgctggctccagtctctccacgattctctctcccagacttttccccggncttaagagatcctgtgtncagagggggccttcagctgctccagcccgcgatgaggaaaagtccaggtctgtctgactgtctttgggcctggatcctccttctgagcacactgactggaagaagctatggacagccgtcattacaagatgaacttaaagacaataccactgtcttcaccaggattttggacagactcctagatggttatgacaatcgcctgagaccaggattgggagagcgtgtaaccgaagtgaagactgatatcttcgtcaccagtttcggacccgtttcagaccatgatatggaatatacaatagatgtatttttccgtcaaagctggaaggatgaaaggttaaaatttaaaggacctatgacagtcctccggttaaataacctaatggcaagtaaaatctggactccggacacatttttccacaatggaaagaagtcagtggcccacaacatgaccatgcccaacaaactcctgcggatcacagaggatggcaccttgctgtacaccatgaggctgacagtgagagctgaatgtccgatgcatttggaggacttccctatggatgcccatgcttgcccactaaaatttgggaagttatgcttatacangagcagaagttgtttatgaatggaccagagagccagcacgcctcagtggttggtacgcagaagatgggatcacgtctaaaccagtatgaccttcttgggacaaccggtagaactctgggagttgtccagttcaagttccgggacgactttgttggttgacccctcctttccccttggaggacaaccggatgggtaccttggtttttcaaagctacccttcgctggtaaggccgggattccttcaaaggtctcctttggtccacagagagttcgtgcccccacaggacacggggttgggggtagcacgtgccacgagtgacactgtgactcggcgaaatcccgn

SEQ ID NO: 645192 - DNA, 266 bp, Homo sapiens
  misc_feature (17)..(17): n is a, c, g, or t
ccccccggaactgtttnggatgaagcagatagtgaggaaagccctgccaaaattgactccgagaatccttggatacctgtggttccaaaaaatgttgagccgtagatgccgtcggaaatggtgaagggagactcgaagtactctggggcttgttggagggtaaaatagagacccactccaattgtgataagcaaggcttgaaatatccggattcagccgatttctattagaccctgcggccctcggaaccttgatactcttgatgc

SEQ ID NO: 645193 - DNA, 894 bp, Homo sapiens
  misc_feature (1)..(1): n is a, c, g, or t
  misc_feature (176)..(176): n is a, c, g, or t
  misc_feature (208)..(208): n is a, c, g, or t
  misc_feature (220)..(220): n is a, c, g, or t
  misc_feature (235)..(235): n is a, c, g, or t
  misc_feature (238)..(238): n is a, c, g, or t
  misc_feature (242)..(242): n is a, c, g, or t
  misc_feature (292)..(292): n is a, c, g, or t
  misc_feature (295)..(295): n is a, c, g, or t
  misc_feature (302)..(303): n is a, c, g, or t
  misc_feature (320)..(320): n is a, c, g, or t
  misc_feature (325)..(325): n is a, c, g, or t
  misc_feature (334)..(334): n is a, c, g, or t
  misc_feature (339)..(339): n is a, c, g, or t
  misc_feature (360)..(360): n is a, c, g, or t
  misc_feature (364)..(366): n is a, c, g, or t
  misc_feature (385)..(385): n is a, c, g, or t
  misc_feature (388)..(388): n is a, c, g, or t
  misc_feature (399)..(399): n is a, c, g, or t
  misc_feature (407)..(407): n is a, c, g, or t
  misc_feature (409)..(409): n is a, c, g, or t
  misc_feature (413)..(413): n is a, c, g, or t
  misc_feature (422)..(422): n is a, c, g, or t
  misc_feature (431)..(431): n is a, c, g, or t
  misc_feature (446)..(446): n is a, c, g, or t
  misc_feature (456)..(456): n is a, c, g, or t
  misc_feature (467)..(467): n is a, c, g, or t
  misc_feature (479)..(479): n is a, c, g, or t
  misc_feature (489)..(489): n is a, c, g, or t
  misc_feature (491)..(491): n is a, c, g, or t
  misc_feature (522)..(522): n is a, c, g, or t
  misc_feature (530)..(530): n is a, c, g, or t
  misc_feature (640)..(640): n is a, c, g, or t
  misc_feature (676)..(676): n is a, c, g, or t
  misc_feature (692)..(692): n is a, c, g, or t
  misc_feature (699)..(699): n is a, c, g, or t
  misc_feature (834)..(834): n is a, c, g, or t
  misc_feature (864)..(864): n is a, c, g, or t
nttaatttgtttaaatttcttataacacttcattataattgttttatacaaacaacagtttaaatttacttatgtttatctatttatttgcttactagtttttcaatttcagataatccttttagaatcatttcccttcttgaagatcatccttttgtagtctctttactgaagtngtgctgaggataacatctgtttttcatctgancatctgtttgtntcagtttcgcttgtngcnaatnctaagctaatagttttcctcagaattctaccctctttcgggtacattgtngcngttaggnngcctactaagtatttgnctgtnttgctttcnctganctttttctccccatggttgcntttnnnatcttgtatttgggatctngtnatttacaatancttgggtntngggntgggttttntttaaatanaggggtgggatatantgggcttccngaatttatganttcatgtttttncaacaaattngngaaattgtgttatctttcaagtactgcctcncctttatnctctaaattttctctttctaggactcctagtctttataattcttgccctcgaactctcttaactttccaatgttttctagcaccttgtttctcctcactgctcactgggnaatttcttttagatccagcttatagtttagttcacnttgtctcttcagctgngtctaantaaaatattcaacatgtctgagggcttttttcttatttcaataaatatttctcatttttaggagctctatttggttctttttcagatctgcctgttggttccaacttcattccttatgttggtgatgaacccttnaagacctgagttcaatgtttattttttccnatagctttcttgtcatgttagtctgtttca

SEQ ID NO: 645194 - DNA, 166 bp, Homo sapiens
ttagcggctatactttgctccaaggtagttatatcctgtctgcttttgaaagcttaaattagtattcgctaatttgtctattggcatctctctgcatttcgatgaactgcagttctgagccattctgcagtcctgccaggtcacccactgtgcccccgctagggga

SEQ ID NO: 645195 - DNA, 104 bp, Homo sapiens
ggaagaggagaactccagcattggtcataaccgttctgcctccctaatgagacacctctttgctgtttacttcctcctctataacagtgcgggctgtgtcctta

SEQ ID NO: 645196 - DNA, 292 bp, Homo sapiens
tggaatgcaggcggactacagaagatgaacaggcagagaagcaaatagccaccagaagtgcagcaagtcttgcgatcctggggaagactgtgcaagttgtcagcaagatgagatagatgtggtgccagagagtccattgtcagatgttggctctgaggatgttggtactgggccaaaaaaatgacaacaaattgactagacaagaaagttgcctaggaaacttctcctccagtttgagaaggaaagtgaacccgagatcacctgatggatgtggactacattctaacaacat

SEQ ID NO: 645197 - DNA, 235 bp, Homo sapiens
  misc_feature (117)..(117): n is a, c, g, or t
  misc_feature (146)..(146): n is a, c, g, or t
cagaggatacaggtgatgactgtccgtcctgagtcactgctactcagctgaggtgagactggctgaaggtgtacaggtgcctctgtgctatacagcagttccctactgaagactggnagcgctcagcctggcgacggaagactggntctgcagctcccaactgctcaggccactgaattgggtaggagcaaacacatggatggtcttaaacgcggtctttgcataggctcttaag

SEQ ID NO: 645198 - DNA, 567 bp, Homo sapiens
caggcatcacctgaggtcttgtaatgtttcccctgtagataaggggaaaatactgcatgtaacttacttgtttactttgtctgtgtctcctgatagaatgtaagctctatcttttgcttactactgtgtccttcatacatagaacagtgtctggcacaaagtaggcactcaatatacgttgatgaattaatgtcactaacttcagtgatttcactactggaattgtagtagaaaaactatgctcacacatgctcaaagcctgttcctgtaatccagctgtaacctgggctctgttttcactttctgtttatgatgtcctgaactgagagattatttttttaaggtcttgtttaaaagtttatgtctaggatacactaaaaaataacaacatatcagaaataaaagagataagactgctaaaaaaaaaaacaaaacaaaaaaaaaacaaaaaaaacaacaacacaaaaacacacaaacacacaaaacaagaacaaaacacaaaaaaaacacacaaaaaaccaacacaaccaccaccccacaacccacccccacacaaacacaaacacc

SEQ ID NO: 645199 - DNA, 155 bp, Homo sapiens
cgggctaaggacgcggtacagatgggagacgcgggaccgagggagtaaagtgaaacgagggcgataacgtagctgtcaccattaaagagaatgctcttcggatccctcgactactgctcggcatactcagcaactaataaacgacgccggactgc

SEQ ID NO: 645200 - DNA, 417 bp, Homo sapiens
  misc_feature (409)..(409): n is a, c, g, or t
gatgtcccatgttgggatcgtatgaaggagagcagcaagcatggtccgtcagctcgtagatagcccttataccgcagtaccttctaatcgccaataggcatcatggttcccacagtaatcagctgggactccagggtgcacttggtgcctgaccgatgtcctcgtaaaagcatgcctgggcgtggcaggaagctcaaggttgatcgcagaggcaacgacggggtccaggcagcagtagcagcagtgcgagcagccctgcacccccaacggcccgcgacggccgcgcagcgctgcccgacccccgcccgcggcatcccgaaaagacgcgatcggcctcaaccgagctgcgagacgcagggtcaggtctgcgcggactcaccgcgcgcggcaggcctcagcgaaggccacnccgcaaag

SEQ ID NO: 645201 - DNA, 101 bp, Homo sapiens
tggtgctctagaggtcccgtgtgtgccacacagtaattgcagataaaaacaaaatcttgaaactttttaagtcttcaaaagtgttggtgttggggataata

SEQ ID NO: 645202 - DNA, 819 bp, Homo sapiens
  misc_feature (459)..(459): n is a, c, g, or t
  misc_feature (538)..(538): n is a, c, g, or t
tggggctcctaaagggggtaaagggggtgctatagggtaaatacgggccctatttacaaaaattttcaggggaattaattctaggacgatgtgggcattgaaacgtggtggttgtgcctccacagaatttctcagaaggcatttgcaccgttagttattaccccgcggtctcgtgttacgcggtgaacaggtggtttcgggttataaacgtctccgggaaatgtgtgcctctctgtgtttttataaaccgcctctaatgtgtgtgggcgaacaccgcctcatgtgagtgtcgcaaaaccgttcttgtgtgtgacgtgataactatattatattaccagaatgtgggggcgctctcacacgtcgggagagttacataccctcgattgtgctcacaccgttcagaggggagtctcgccgagagtctcgcaccgtggggtctcatagagaaatatacagtgngcggggacagtctatttgttacgcgaagtttttgcaagaattatagtctccgcacgcgaataagctcggagtgtatacnctcgcgataggggctctcagtctacccctctgtgtgtgtgggcccccaaattgagactctctggactgggcgctaaccgggggacgggcgaatacttgtatgagaacactctctgctcttgtggtgtctctgtgtacaccggggagacatcgcgcgttacgggagcatttgcggagcaagtgggccagaattcagaggagaccctaagcgaattagatgtcggcgcgccccagggcaattacgtcccaacaaaccggggtctaccataaaatacacccttg

SEQ ID NO: 645203 - DNA, 465 bp, Homo sapiens
agcccaaaattgaaacagccctaatttctatcaactaacaagtgaataaacaaaacgtggcatatccatacaaggaatattattcagcaataaaaaaagagatgaagtactgatatgcaccacaacatggaaaaaccttgaaaacatatcaagtgaagaatgccagacatgaaaggccacatattatatgatttcatttatatgaaatgtccagaacaggcgaatatatatagagagaaggcagattagtggttgcttaggctgaagggttggggaggacaaaggggtgactgctaattagtatggggtttcttttttggggtaatgtaaacgttgtaaagttgattgtggtaatggtggcacaactctgaatatactaaaaaccactgaattgtatactttgaatgtttgaactgtgtggtatgtagattttatctcaagttgttataaaaaattaaattacaa

SEQ ID NO: 645204 - DNA, 552 bp, Homo sapiens
  misc_feature (23)..(23): n is a, c, g, or t
ctccccggagtccgtgtaaatangttaataacccttacacactacttaacaccctcaatactccgccctcccccaacccccaccaaaaaacacactgccgttttcttacaaacaaaaactgaccccctccccccaaaccccccacgccttaatctactaccccccatccccttactccacctcactcaaccacactcccacacacacctcaccccacaccccaaacccccctcaccccctcccaccacaccccccccacccctccaaccacactcccacattaaccacaaacactctccgcaccccccaccccccacaccacatacacacaccccaacctaacaacccaccctacttccactacccccaccacctctcaccctccccccccacatatctcacccgcccactcctacccacacccccctcaccccccacctcctcccccccccacctacaaacacccccctacaccccctccctccccaacactcacaccccactccaccaccaccctccccaccccacccacatttcactcccacaacacac

SEQ ID NO: 645205 - DNA, 386 bp, Homo sapiens
  misc_feature (338)..(338): n is a, c, g, or t
tgagacagtcttgctctgtcgcccaggctggagtgcagtggcgcaatctgggctcactgcaacctccacctcccgggtttgagcgattcccctccctcaacctccagagtagctgggataacaggtgcatgccaccacacccggctaattttttatttttagtagagacagggtttcaccatgttggtcaggccagtcttgaactcctgacctcgtgatccgcccgcctcggcctcccaaagtgctgggattacaggcgtgacagctggcatggccacattttatttttcaaaggagtcaaaggtttcttgggccgggcatggtagcttcagggactnttaatcctaggcaattttggggacccccaaggttaggagggttccctc

SEQ ID NO: 645206 - DNA, 966 bp, Homo sapiens
agcgggtgtgggaagcgcccgcgctttcggcgggttccgttaaaatgtgcgccctggtggcctggcggcgcccgcgccttagcctgtcaggagcagggagcttgcggggcgcagggaagggcgcgggccgcgggtccctgcgcgtgcggaggcagtggcggctctgcccggaccaccgtgcacggctccgggccgaggatggcgaccccggaccagaaagtcgcccgaacgtcctgcttgcagaaccttgttgctgcaggatcctgggcaggagcgaacgcttgatgttagccccagcaagtccaagtatgctgtgcgggtgatgggccagcaactttcgccccaacgtgttgaagagagatgaattttagatagctgaaaaaatcagagaaagagcttattcgaccaaggaaagagcacgcaggatgctgcacttattttcagaactccacagaacaacttcattcaccagcgcagttttgaaacactacaatggtcaaatacttctaacttcttgctgagcctcagtgagggaccccacgcaaggcagcagagagaagggttactagctatgctagggtaatttgctcaaggcctttaccaaagagatgccccagtcaaagcccctttacctactatgccagggctcagaacccttcccctgaaggctaccaagatcgcgagttgcccaggtcaggccctagatggttccgtgaagcggtgggagcagcaggtggtatcagcagcattggccctgtgttgccccttaagtgggccccatgatgaccttgcgaccagcagtcatcttcctccctcagtgacaagttaaattagaggcgtccaccggagtacgaaaatcgggcttcgaacgactgaatgggggtcaagagccatccggcttgagccattaaaagttggggattcgacgtttattagaggagcggcgaccactaagaggggtgtcca

SEQ ID NO: 645207 - DNA, 1063 bp, Homo sapiens
gagtttctggaggggtgaacacgtggaggcaaacaggaacggtgaagaacgaacttatcctatcaggacggaaggtcctgtgcgcgggatcgttccagacgtcgcgactctaaattgccccactctgaggtcaaggaatcacgaagatggttttggaacatgctgaacccgagtacattataagatcaccagccatcgtgcctgaagccatgccgtgctgccatccattgccgagttcctgtcgtcctctacgtgggcctttcgttctgccatatggatgatggaattactgaggggcagcgatccatcgaaatacgcaggatgcactggcattacgtgtcactggaggacactggacccacactacaatctgcactcacggaacgaattcacttgttggactcgcggcgagtcaggacgaaggttgtcgcatgaccagatgttaacttatcaaccaggggggttgtactaggtaggagagtatccattggacgaaggatacatggggaattcctacgtagggaaaggaagaggcataatcaggttccgagtgaaatgcaaggtcgaacgattcgcattcacgaaaggtgattggtcttacgtccaaggagattataaaatagaggaaacagggcggtccaaaatttcagagtagtaaacaaatggagtgtcctgacgagaaatgtgtacgtgagggcaatggcgagagagaacaatttgggcgaggtctgtgacaaaggagggtcaaatgacaggtggataattaggacaaatttggagcgaaacaaacgggtgaccaagttcgacagtaaggtactgcaaaaaggcgacgagccaaagaagtacccaagagaagagcgctaccttgggggaaatagagagcctaaaggattacggaaaacaccgctgtattactagttatagtacgaataggagggcttcctatgggtgcaagggggacccactggggccccttgtggcgttgccggaataagttaggggtactcagcagaaggttcgcttggattggccgatgaagaacttcgccctgttcccagaaggg

SEQ ID NO: 645208 - DNA, 287 bp, Homo sapiens
cacgaggagtcatcccatgtagtttactgaaaatctatttgcatagccaacatgcatggagtgctcagtaccctccaggcgctgttcaatgcacagggttgaacagcagccatcaagagatgacacccctgcctacaggaagtacggggggtagtatggaagacagatgctaagtgaatacaataaatacacaagatactgtttcttactcggcctaagtgctacgacggaaataagcatatacgtacgacctgctcgagacaagtcctcatgtctgagtaatgggg

SEQ ID NO: 645209 - DNA, 1067 bp, Homo sapiens
gggtggcttacagcgtgttacagaaatgggcgtccgttgcagcctatatatgagtccctgcggatttccgagacctgcggaagctcacagaccgaggctatcagtggagacgcgtagtacgagcgttcgtcgtgatagagcatgacggctgatacgaatgcctggtgatacggaggaccagcgctatcatggctataactacagagctcgcgtcatagatatcaacgagcggtatagtcgcagagtctgaaagtgccggcgagtctcatggctagaggcacgtacaaggaatgtagagttggccctgctagagagcaacttagtctcatactagccttccataatctgccgtgagccttggccagtatctacggggcctttcggcttgttcacgcagtgcgcgcgtccgtaccttcgtacaacacgggggaatcgcacatgaggaccgtgcagcaagaggaagctaaactggactcggaagttcggccaagaaagaggacaggaatgacactgtatgccccgggaagcgacggcttctccgtacctttgatcaaccagtcggtggccagctttacaagtcacgtccgtaacgctaccgggacaggtgaggccctcatacatagaaagtctggggccctagtccacctacggcggatcgaaagcgcgttgcggctacaaggcgacttgacgtgcacaatggggtggcaaaggaaagtgcccacgccgctgggcaagaataccgggaacggtgttgaacccacttgccaacttgcatggtgcacccgatagcttgcttcgcaagttacgattcccccgcttgcttcgggtcagggaacgcgacaaccatgggagagtgtaaacgcacgtgacattacgggcctacaatggcctccccaagcaaacctgatacgccgcactgccccacgggtttgcacaaagaagtcccagggagtcgaaagcttcgatgttggccctgtgcatacggcgcgatcaaaatcgcccttgtgcccctgccaaatgtcgcgggcaacattcaggcgcctttcgggatcctttccggaccacgc

SEQ ID NO: 645210 - DNA, 560 bp, Homo sapiens
gagcggagtggttaggacgaaggggaaggaggagaaggcgcttaaatgcggcgtgagctggtgcgtggagaggggttggacccagggctgaggcatgtgccctcccctccatcctgcctcagtggatcatgcccagtggcggcatgcggcgtgtaggttgctgtgtgagtggaagtgactggtgttgtgtgcctggcgaccaggagcacgcatgcctgatttcacagaataataattacatagcattcaatacaaaactactatttctgcacacatctaaccatcgtactgtgccacttgtactcatcatcacattacatcaagacgatacgccagaccagacacaacgggacagaatctgccgctcggccgttacattgtctactccaatagatcacctcaaacgtcctcacaccatcacgaacacacccgcttcaagaagagctcgtacctgaaacgcagcgaaaaacaatgaaaccagcaagaaggcctggacattgcacacatcctatccagcacacacactgaacatataacccctggccacaaatacgtaatac

SEQ ID NO: 645211 - DNA, 411 bp, Homo sapiens
aaagctcagtggttgcaaacatttatgactgtgcctacaaagtcatagtaaaggtcaggagttcaagacaagaccagcctggccaacatggtgaaaccccgtctctactaaaaatacaaaaattagcggccgggtgcggtggctcacgcctgtaatcccagcactttgggaggccgaggcgggcggatcacctgagttcaggagttaagaccagcctgggcaacatggcaagaccctgtctctactaaaaatacaaaaaaattagctgggcgtggtgacaggtgcctgtaatcccagctactcggtaggctgaggcaggagaatcacttgaaccagggaggcggaggttgtggtgagccgagatcgtgccattgcactccagcctaggcaagaagagcgaaactccgtctc

SEQ ID NO: 645212 - DNA, 496 bp, Homo sapiens
  misc_feature (78)..(78): n is a, c, g, or t
aatccttggatgctcaagtccttatgtaaaatgccatagctagcttttgcatataccctatacacctcttcctgtacnctttaatcatcttgagattacttataatacagtcatgcaccacataacgacattttggttattgatggtggtcccataagattataatgctgtgtttttactgtaccttttctacatttggtatgtttagaaacagataccactgtgtcacaattgcttacggtattcagtacagtaacatgctgcacaggtttgtagcctaggagcaataggctgtaccacgtagcctaggtgtgtagtaggctctgtcgtgtaggtttgtgtaggtacactctatgatgtttgcatgaagatgaattgcctaatgatgcatttctcaacatatccccttttaagcaaggtatggctttatctaataaaatataaatgctttgtaaatagttgttacagtgtattgttattacatttatattattct

SEQ ID NO: 645213 - DNA, 163 bp, Homo sapiens
gataagttctttgaaaagtgatgaagatatctacaattaggtatggtgatggtgcacaactcgtattaaatatagctaaaaaagcactaaatggtagcattgaaagtattatttaaaagctggttttaaaaaaagttttcattagatctaaaggattgctccc

SEQ ID NO: 645214 - DNA, 137 bp, Homo sapiens
gaggatccccgcttctctttcctcttctccatgaagtcatcgagcatttctgcctgcctcacagtccgatggaatccatccagaagaaaaccattatttgcacaagggggtctccaaattcttctcaatgagctcca

SEQ ID NO: 645215 - DNA, 930 bp, Homo sapiens
ctcgatttttatggtacacgttcgcgccacgacgtcgtatgatgtggcgccgctcttccggcaagccggctgtaatggaccccccttttgaggcccttatttctccccaggcccgcggggcaaccgggggatcccaatggaaactgtcaaatcaggaaccaatttgtggggagggccacataactcaaggaggtgtcccatgttcgccgccaagtgcgccctgccacaatggcgaacatttcggggcgaaaggtctagtagccctgttggttggaacactattcccgtaaaggggttcctcccgcctggccccaaaatacgcgccccttttcgttgtggcgttccttcccccacgggtgtctgcccccagttatcaacggtcattggtccccaaaccccttttttaaggaaactgctccaggaacattcttccacacgggcataactcctggcaaataatataacccccctgttcgcaccaatatgcaaactacgactgggagttcggtctcccaattagggggaaccatcatctggtttaacccctctcctttaaaatatgagcttttctttaggcgagccgctcccacacaggttgccttgtgaagacgtggaccatcaacaatctgcttcgaataatgaccacctctccaccacaaattgactcttaaaaattgcccgtaccgccgagaccggcgggtacatatccccgggatactctcgtcccaccaattatttttgtaatctcctggtctcctgtccaccacgaaaacacaattttcttttatattgtaacacatccgttcttgaacacttctgtgtcagcccacactctaaaaacttccgtctatggcgcaccacaatgtcccccaaaacccatcccaatctaaattttttttcccaaaaaaaaaatcccattacccccaaaaa

SEQ ID NO: 645216 - DNA, 166 bp, Homo sapiens
taaaaaatactttatttttactcaaatttgccaagtcttattctgccctttaacaagtagagtaaaaataaaaggtattataaggtcaatgtgtgccatgagtttgcgttaaattaatacttttaagtaatggaacttttttcaaaggccaatttaaactatttaa

SEQ ID NO: 645217 - DNA, 330 bp, Homo sapiens
gcgtcgaccactctgtcaggccatcttgaactcctgggctcaagtcatcctcccacctcagcctcttaagtagctgagactacgggcgcacaccattgcgcccagctaattttgtatttttataaggacggtgtgtcactgtgttgcccagcctggtcttgaactcctgcactcagaacgattcacccacttccggcctcccgaagtgttgggattataggtgagccactgcacctgggccaggacatctctaatatgagataggacacggcacggtggcttacatctgtaatcccggcactttgggaggctgaggtgggtggatcacct

SEQ ID NO: 645218 - DNA, 124 bp, Homo sapiens
  misc_feature (9)..(9): n is a, c, g, or t
  misc_feature (31)..(31): n is a, c, g, or t
  misc_feature (76)..(76): n is a, c, g, or t
  misc_feature (86)..(86): n is a, c, g, or t
  misc_feature (120)..(120): n is a, c, g, or t
  misc_feature (122)..(122): n is a, c, g, or t
ccgctcccnacaggcatccaggagtctcttnacaaccctacccctggggacctagaggaaattgtcaaaatagaancctgagacancccagactgacaaagaggtagcaatttggggacnanga

SEQ ID NO: 645219 - DNA, 1435 bp, Homo sapiens
  misc_feature (353)..(353): n is a, c, g, or t
aggtgctttcctggcgcgtgctcgacaagcgaggccagccatgtcttatcccgctgatgatatatgagtctgacgcggcttatgaccccgtacgccttactccctagccgacctactgcactactgcaacagcagcgacgactccaaaagtcacgggacccgttgccctctaatgcacacgattcacgtattgcaaccagccaaacgctatcaggctgactccactgccgcgctgcactcacagaccacattacactaccaagcatactcactcccaccaaacagaacctgcgtcgctccaggcaactccctcggcaccatcggcacccccatcgccacagcagacttgcatnagtagcaacgaccgtcaaccaagagtcccccaagattccgagatgcctcgctcccacaaggcattgcaagtaggatccccaatgatggaagccgcaagcgccaaccggggctaggctaccattggaacgtacacataccccataggtgaacaccaattcgctaacctggaaccgcaacacgccaaccgaccattgatagacactacctaacactgcacgtttcgacacaacgtcgaaagcacatcagcacaacagacccctagtgcgcgagagggccaaacacttcacccgagcgcccatgatggcccaccacgcccaggcaaagcgcgacaccaataggaacaaaaggcacacccaaccatcatggaccaactacgcgacaacgcacactcgcgagccactcactggccgaccatgacaaaaccgcagatgcaacaacgcggaccccacatggcaacaaccaccatgcgcagccccagttcggggcgaccacgactcacagtagtgacaagaagacgataaacacgcacatagcgaaactgaccaagtgacgtaaccaacaacttctcgctacgacgttcagctcccagtaatacaccgacaagagcgccgggccccccccagctcacacggttacaaccctaaccagtttggcagccgccacaacaaagaaaacgcagattccgacaccggcagatagggagaagaacgctcggaccagaccaacacgacgcaggcactgactcgcgacacactagtggagtgacgacaaagagcggcaacaccaaagtagcacaaagaaccaagcgagacaccactcaggcaggaagagcgccgtgttccacacaccgtacaagatataacgaaagcacgaaccacaagaacgacgttacaaccgcgaccttagggccacgaacaaaaaggcagagcgcatagaccagtagtagccacagtacaaaaggagacctacaaagacacaagaagtcatgcccatgcacataacagaacagccattggtcacacgacggaaagtatgacgcgagagctgaaccaatgttggacgaatatcacgcagcagcacg

SEQ ID NO: 645220 - DNA, 268 bp, Homo sapiens
gaggtcgcgcaccgggtacgtgtccttccactgccatggacacttttcaccgaatagcacaaagaactggaatataagtacagatagtaacgctaaggaaagacctaaaaataatgtcactaacatagagctaaaggaagaatggaaacgggaagggttcatgctggtacgaggtagtaaaggcctagtatgtctttgaagactaccacttaataaaagctcactggttatatgataagcctccataaaggacaccacaaacctagaa

SEQ ID NO: 645221 - DNA, 184 bp, Homo sapiens
tgctgtttctctcctcgctctgggcgtcacgatagggatgtcagggatgatggggatggacatgggctcttgggctgggtggccaggttgatgatggctcccgctcaggccccagccgtgcccgttgcgcgcttcaccgtgtagcggtagggctgggactcccgaaggttctcaagaagcagca

SEQ ID NO: 645222 - DNA, 320 bp, Homo sapiens
  misc_feature (130)..(130): n is a, c, g, or t
gtcaaaaaccctttgccaaattcaatggcaaaatggaggaaattttttcccctaaatttttggggaggagttttacaactttcacccctacatttggatttttttaacaaaggattccagaacaatgctncgagggtttgaatgcctgtcccccccataggattttaaaaccccccaactgttgtttgaatgattgccccccccatatgattccagaaccctgctggtgcggtttgaatgattggacctcccccaggattccagaacactcctcctctagtttgaatgtttgtcccccaaataaaattccgggaccctga

SEQ ID NO: 645223 - DNA, 236 bp, Homo sapiens
  misc_feature (4)..(4): n is a, c, g, or t
  misc_feature (12)..(12): n is a, c, g, or t
  misc_feature (211)..(211): n is a, c, g, or t
  misc_feature (213)..(213): n is a, c, g, or t
  misc_feature (232)..(232): n is a, c, g, or t
  misc_feature (234)..(234): n is a, c, g, or t
ttgntaaaaatngtaaggtccaaatctctgaaaaacgatttttttttaattttttacaaatttgttgagcatggtggtttgtgcctatagtcccaggtactcaggaggctgaagtgggaagattgcttgagtctaggagttcaaggacatagtaagccataactgcaccactgcacacaagcctgggtgacagaatgagacctggtctccngnaacaaaacaaaacaaaacnanac

SEQ ID NO: 645224 - DNA, 596 bp, Homo sapiens
  misc_feature (101)..(101): n is a, c, g, or t
gcattatccttgtatgtacaatcaatccaattatatgtttgtacttatttaaaaatgtacagttcaattatcattgactgtagtcatcctgtctgtgctgntgaaatactaggtcttattttttcgactttttgtacccattagccatcctcccttaccccccacctcccactaccttttccagcctctggtcactgtcattctacactctatctccaagatttcaattgtgttaatttttagctcccacaaataagtgagaacatgccaagtttgtctttctgtgcctggcttattttatttaacacagtgacctccagttccatccatgttgttgcaaatgacagggtctcattctttttaatggctgaatagtactacattgtgtatgtttaccatattttctttgtttattcatctggacacttgggttgctttcaagtcttggctattgtgaacagtgctgcagtaaacatgggagttcaggtatctctttgatatactgatttcctttcttttgagcatatacccagcagtgggattgctggaccatatggtagctcaatttttagtttttttgaggtaatccgtgaggg

SEQ ID NO: 645225 - DNA, 106 bp, Homo sapiens
tgcaccgatccatagagagagtgaatgcatggatggacgagtgcatggatccgtagacagagcgaatgcacggatggacagatgcatggatccatagagtgatggt

SEQ ID NO: 645226 - DNA, 311 bp, Homo sapiens
ggagattctctgtgtgggtgccacgacgttggaactcttcgtttcctcgttgacctgaatcccggcattagcaccagcttcctgccactggctgactgaatgcccagcccagcctcagtccctcgcctctcccatgctctggggcttccctatcccaccattcccctcccgtgcctgtgctccactctgaaaccccttctcttccatcccactctatctgagccaccacgcccggggacgtagtggtgggcgcctgtagtcccagctactggggaggctgaggcaggagaattgcttgaacctgagaggcg

SEQ ID NO: 645227 - DNA, 105 bp, Homo sapiens
ccagacgtgaggcgacgagcaagactccgtctcaaagaaaaacaaaaagttcactgggcacgtggtgcgtgcctgcagtcccagctactcaggaggttgagggag

SEQ ID NO: 645228 - DNA, 378 bp, Homo sapiens
cgaggatccccgccctgataagacatcactgctagcaagaggtactagatctactggtgacagaaagtagctcactggtttcaaaaaaaaaaaaaaaaccagaatcatgggttatcaagcaacccccggataaaggtacaacagtgccaaataccaaaagcgccggaacaacctatccaaagataaatgatttggtccactatctatattaatacctacaccaaaactaaggggtgcacagtaggcacagttataccacttatgtcaaaattggccatacaatactcatcctccaactgtgcagtaaatggtactgtcaataaccccaagtaatttaacaacatacattctttaatgctcctagctctgccaactctg

SEQ ID NO: 645229 - DNA, 1174 bp, Homo sapiens
gagtcgttttctcttgctgtaaaccgccagcacgacctttggcatacattgaaggtggggtaatcatttatatgtcgccttacttttgtctctgtatagtctcgagcttaattcacaggggcgatgatgattatacgtctgagtagtgctatcatcatgcacgtgtaggtttgctacatacaggttataaacacgattgtgggagaaagaaacatgttccatacaaggcttatggtgttcgattcgccttatagctcatgtattctttcagtaagtagttccattttgaatgattcatgtaacaatatatgtgaattgacagtagctggaatttggcaatagaacaattgtgttcagctgattcgatgtacatgcttgacatacattggttggagcataatttcgacatatcagtaacctcattgtatattggaagaaacacatatttcatgtcacctaagattgccaaacgtacgtgttcgtgaaaaggctaatggctgatgattggattgacgtggctgtgtgtctatatcgaaggatgacctgaaggagaaaatgcacatgcttttctttgcaatcatctacaaggaatggactaaccctaaaatcattaccgctcggattgggttggaagaccaagcagtgttcgaatggtgattgtgataatgagtttttgcagtggtagcaaatgtgggggaatgaacaattttattttggcacacagaattacgtttaataattgatcaattgggctcaaagtagagtacacaatttcctctagactttttttagttagctgcccggggaaatcttcccatgttttctccatgtgtggcttacaaaacagggggttacttacaaattgcgttggcatttttctaacacagcaaaatggtttggtgcaaaatgcattggcttggacttaaactgcgtttgaacctggtccttggttttggaccctaaaagggcttacggatatgaaaactttcccggagggaatcgaacaaagggggacagggagctttacaggtatctgtgggcgcaaaaaacaaggacaagaacatacgaatgtttagtggtcccaaggttcattcgcacagacatctatatttttgggggcagtgacacaaggaggcttttttataataagcgctattaggggagaggagcctag

SEQ ID NO: 645230 - DNA, 121 bp, Homo sapiens
tgaggatcccggcgtcccactggttgccaataaagcaagagggaaaggaaaacctcgttcagcgcaagtgtgaaaccacctaagaagcaagaggaaaacggagaagaagggaaagggaaag

SEQ ID NO: 645231 - DNA, 208 bp, Homo sapiens
acggccggaccgctctccgtgaactggcacattgacaatcataatacaaatatcgttgttggaggagccctttgttgactgttacataaaaatagtgatggaagatgagttcccattgtggttcagcagtaatgaacctgactagtatccttgaggacacaggtttaatccttgacctcacttggtgggttaaggatcagtctcacgg

SEQ ID NO: 645232 - DNA, 1278 bp, Homo sapiens
agcgagtgaggaggttataccgcggaggtctcgaggctgcgttcgtgctggttgcgtgttgccggtgggtacggttctgctgccagtgcttgagtcgctcgtctcggaggcgaacgagaagcacgtttgcggtggtcaataccatgaacgagatacagacctgaagcacggagaccatggtgagagattatgtcatcacaatgactgtctgtgcacatccgatgagtgtctacagtggcacatatttccatggtgaacggctggaagtgtgagaccatggcgagatatatgcgtttggatgaatggaatacgcttggataatgtgctggatagtgactgggaaaattggttactagcagttttcgccactaatctgtcataacatggtatggaaaaaaagccacaaggccgaaacaggtaagtatagataactgtagtggagagtagaatggaaagaagccaatatgggcaggctggatgggattctagataatcttgggctccgctattgaagtgatatttcaaggaatatgcgagtggtaattacgcccctggatgggtactactattttcccggaatcgctctgaggaggcaagagctccacgttgtgtacctatccttgtgacaagttgaaagcttgtagaacgattggctttggtccccaagtcctcgaagagagagttttagtagtcttattagtgcgttgccaaggtaatagatagtcctttgcgcgagatttttgaactcttcacataaggaaggcgctgtggaggtatggatagaaagaagaaagaggtatagatagaatgggccaaggtttgctaaaattacttggaggggtaattaattaggaaagggaaaggcccaagggggcaggatttcctattttttaccagttttcgggagtgggttgggaaatcaaaagcctagggtgttggggccattttattaactttgttggggtattccaggcgaaacacttgcgagggtcttgcttaaaatgaacgccaagggtacaagcttggttggttttacttgcccaagtctttaggaaatatgtctcgtttgtgggagaggttttggcgcctttggggacaacaacttatcgtttggatttcaaaagaaaaacggtcgacagaggaatcttcacgttttaaatcattccctgcgtgaaactgagagggttttttcccaaaattggtctacaaaggaagaggtgtgtctggtaaaggaaaagccttaattctgttgtcacaatgtgttattgataaaaaaca

SEQ ID NO: 645233 - DNA, 329 bp, Homo sapiens
tcttaaatggctctcattcatggcggagctctttgaggtgagagtgttttaatcattttatggccggtacctgacacattgactggcatgtggtataagctcaataatcttctgttaaattaatgaataaatgtgctcagctgccaatccacttaggctcaagaaaaaccagaggtaaacagaaccttaaaaatggacttttattaattattttctatcattttgcttaattctttaaagtaaactcttattgacttggatctaaatagtttgtgaaaacaccgtctgaggaaaaaagtgtttgctaatagtaaaagcctcccttgaaa

SEQ ID NO: 645234 - DNA, 812 bp, Homo sapiens
agcggggggagatggcgggctgtgtcggtgtctgctccagcagttggaggctcctcttttgataactgccgctacgatatgccgccttggaagccgacttttgcaaataggggatactagcttccaaaagtccggaaaagtggcagcgaccatcggtgcggtggtctatcgaggatggcatatgtatctatggagcatatacaggaccacctgaagggttggttgtcgctgacaggatctgatgctgagatacacttcatatctcctaatattgagttgttgtgggtgctgggacatgctgacagacacgagacagtgagcaatccgagctcaagtttcttccaaaccgtggagctccactcccatctccactggccgtcttcccagcagtcgtgaccggaccagaatacggtatggcggacgtcagatgtcctttaacctagcgtatctagggcctacatataggtagcacccccattgttttactggggaagtagatgttaaactggtacctgctacctctgagcattcatctatccttctagtggatctagactgcattaattgtgccatctatgtcatcccactggtgtttctcgcgtctccattggctaggaccttgtgctgtagttggaaggataatgtgagatggccacgacagtggacggagggaggacgccacagaatctggtgacgcgaagagccatcgcaggcatggcatcttaaagacgagcctggagctccggataggcaacatttagaacctctgacgtcatccagcaggaaacaagctggaattcaactccgaccat

SEQ ID NO: 645235 - DNA, 163 bp, Homo sapiens
atcgtatcttgcccacgacatcgggagcgactgacccatgtacaactagctgttcacatggcaaccctatctccacattcggccttcaacagttctcgctttgaagtatttgcatactaccaccaatgatctgcaccatgcggacggctccaccctgggcccg

SEQ ID NO: 645236 - DNA, 812 bp, Homo sapiens
agagacattgaagatgatggggtagaaaaggggtatcaaataggttagaaagatggcttgaaaggaaatgagggaaatttcagtgagtttgaggaatggcagactgggtatgtgacaaatgagtgggtaaataaggaaatctcagactgagaatcctggcagatctttcaatgggttagactgcaggaatattgattttaaagccagactgaagcaaattctagtgataaaggaaggggaaagggtggctgaatcaaatgttctaccaatactgctttttttagtatttgagttaaaattcagattaaatgcttggcttagaagaatgcaaagcttcactgagcctaataatatggatcccagtgggtgagtggaggtgagttaaagtaaaaaactctgaggcaaatcttacttaactgaagttgtgtttttagtacagaatgccaagttaatatggttaatactgaacaaaaaataatggaagggcaactacagtagcttaagatggcactttaaggaagtgtaggcagaaagtcaagaaattaaaataattatgaatcattatatggcaggcaatatttccagtgaaaatcagagaaaataaactcacatacatgtactgttacagctgatcttagtatgaatattttctattaaagactgttttaaaataagttattaatatttgttgaaatggttccagataacaagaaatatgatgcaataaaacctgataaataaaagcaatataaagattagaatggttttgaataggtagtggaataaaaagttaagttggtagttgcattaaa

SEQ ID NO: 645237 - DNA, 375 bp, Homo sapiens
actgatgccgtggtcaagattattgcgatcacttgagtatagtacttccgctttgactggtgaagtcatagcatgtacctgctcggaggttgggttctgctccgaggtcgccccaaccgaaattgttaactgcaggtttggtagtgtaggacctgtgggtttgttaggtactgtatgcattaataaattaaagctccagtagggtcttctcgatcttgactgtgtcatgcccgcctcttcacgggcaggtcaatttcactggttaaaagtaagagacagctgaaccctcgtggagccattcatacaggtccctacttaaggaacaagtgattatgctacctttgcacggttagggtaccgcggccgttaaacatg

SEQ ID NO: 645238 - DNA, 487 bp, Homo sapiens
tgcagtttctcacaatcttcaggtgatttctatggtcattaaagtttgaaaagctgcctcgaaacagtccttcctaaaactgaagtggaggtgccacaaaaatcatctggtaaattgtttaaagtaatcccaaatgcaactcaaatctacagaatcccaggtgaagctcagtaatctgtatttttatccttctccccaaataattctgatgtgcaggcaagtttgaaaaccactgctttaaggaaaatggttcctccctttaccaagcagaaggtagaatttggaaacctgttccagggaagccaaaagataccttaagaagcgccattaccaccggattgatgccaaccgaagctgaagcttaaccaaagacattaatatacgcccacaaaagtggctaaggatgtcaagtgctctgttagaattctaagaaatgggaacccagacacaaattggaatgaacctcagccacactatgttggtgttt

SEQ ID NO: 645239 - DNA, 118 bp, Homo sapiens
  misc_feature (74)..(74): n is a, c, g, or t
atcagtgtcctgcctctgtgcataattattaggaaaaaaatatacttcaacttctagtgtcaacttcaaattantggatgttatggtggtagtattcccaagaggtccaatcttccgg

SEQ ID NO: 645240 - DNA, 262 bp, Homo sapiens
  misc_feature (11)..(11): n is a, c, g, or t
  misc_feature (137)..(137): n is a, c, g, or t
  misc_feature (149)..(149): n is a, c, g, or t
  misc_feature (159)..(159): n is a, c, g, or t
  misc_feature (161)..(161): n is a, c, g, or t
  misc_feature (168)..(168): n is a, c, g, or t
  misc_feature (179)..(179): n is a, c, g, or t
  misc_feature (189)..(189): n is a, c, g, or t
  misc_feature (227)..(227): n is a, c, g, or t
agaagaaaggncaccattaccatccatttgacatcgcatttccatagaaatgccaaagaaagaaggtcctggggttttttatagaaagctcaaaaagttcaacctttgatgctatcccccagcccaatacaaaatanacagaaaaagcnattattaaanancgcttcntttctttttcncctttgaatnttaatgtttacatactagtgtgcagcacctacttcttnatcgccgtgaactgaaatctagattttaaactgaa

SEQ ID NO: 645241 - DNA, 711 bp, Homo sapiens
agcggggcaattctttcgaatggaatcgggctgattcatcgcgcggtttgcagacagagccgcgtcgggtgtgcgccgctgctgctgttgcgctctgtcttcgcgtctaccacaggaggcaagacaagggtccatatcggcggcatccggctcccggcccgtcttcagtgagagacagatcaaataacatatacttggcggaagttgtacctgccagaattagcaagagctgtctttaacacgacatgtgtacaaactcaacaaattgaaggtgtaacagctataagagtgtgtacgttgacgtgagccagaaatatggacagacttcttagacttggagagaggtatgcctggactgggccaggggtccatcctacagatgctcctgcagtggacacagacagaacaagtctatatctcttccctggcactgttaagagaatgttaatagacactggctcgatgctggagttccaactggaatgttactgggttttgatgcttggaggaattcgttgagtgattataccgtcagagtgattgatgtgtagagcgtatggcaaagtcgaggaacaggtgtcagtgtggaggcagttgatccagtgtttcaagctacaatgtgggctctgttgaagccagacaggaaggcggagatgggggaggttggtatcacagtacctggcttaggatgtgggttctggtgtggatata

SEQ ID NO: 645242 - DNA, 92 bp, Homo sapiens
acaccactgagtcacttgtaacatttagaattacctctaaatgctaagtttatttaagaggtaaacgtcctgctattttcagaatggagaac

SEQ ID NO: 645243 - DNA, 843 bp, Homo sapiens
cggctcttcgtttatttcagagagttcacgacggctataatcataaggaacaatgtcaacataacggattttattctggttaaagggctttcgagcttcctcttataggaaacttgctgaacacccgcgggatgctctgaaattcagccagaagaagtcttccttcatcagcaatctgcctcttataagtttccaacaaaatatctgcatggatcggctccacattcatcagttgtttttcatcatccctttcaacaagctcctgctgttcatctaaattgcacgatctttccttatgtagatcatagattttcgagagaacaacaagcagggctattgatgtcacactaatcagaactgccagaaatgctatcagtgccttacaattataagaggttgaatgatgtacaataaagggtgctccacgatagtctccattgtgaaaataagccttaaaagtgtagactgctgaatattgaagatctttgacacggaaatcgcaattcttatgcaactcatttctaaccagagtatttccagcttcatcttccacatggatacgtccatggaggccattaccgtccctgggaggcctacacttgacatgcatactattatctgatgtcatggagacagttatgttccatacctggcttggaggagcaccttttagctgtgaaatgacacattgcagcactttcattacctgggccttttgcattgacgtaggcatgtgatgataaaacctattgccgataaaggttcaacatgtgcaaatcaaatgtggaccaggtttgtatccagattgaggcaatcctattctgtctcttcatataccagagg

SEQ ID NO: 645244 - DNA, 461 bp, Homo sapiens
cgaggctgtgtcactatctcttgtgatctgcgtccttccttttcagataatgcggatcacacctctccacggcgcaccacatatgagagatgagcttcctacacgcacaacaaatgtgaatgcgcaccacagaaagatatgagcgcgacacagaaaaaaaatcagttcgaggaaagggaaaggggccaaaaccaaagcgcaagaaatcccggtataagtcctggaacggtccctgtgggccctggtcaaaacggagaaagcatttggttgtgcaagatacgcagacatgtgaatgtgtcctgcgcacacactctcgttgcaaggcgaggcaacttgagttaaaccaacgtacctgcggatgtgacaagcccaggcggggagacgcgcacgaagaaagagcctccctcaaggtttcgggaaccacaactctttccacgggactggtacacgcgatcggtccg

SEQ ID NO: 645245 - DNA, 145 bp, Homo sapiens
cagatctagcatgcgggatctccaccgagaggattgcattctgacgacagatttgtgaggatacagaggagatgccacttctcactcaccactaccagccagcctcagaaggccccgagaccctgcaggaccacggaggtagcga

SEQ ID NO: 645246 - DNA, 134 bp, Homo sapiens
gacactcttgaggtgacggtacttcatactgcttgtgcctggacattaaacaccactgcgcagctaatcacccctggccgcgggctgtaaaatgtcctgtctcatggaagcactggaggataagcggttgaggt

SEQ ID NO: 645247 - DNA, 507 bp, Homo sapiens
tgggagctgcagcatgccaggcgtggtgagagtatgtgagccatgcctgcccttatctgaggctcaggcaagtggagtggagctagagagacaacaggaaagacggtgctgaagaacatagtgtctttcctctatagtggacctaaagaggtggggaagcaaggacaagaggcaaagagccacactgcccttggcatcatccaaagcatagtctggttgacaccaggtcctggtttggtgtctttggtcaatacctgaatccttgacaaaagaaaaagtggttttgatgatttaaagaaataagggtgattttgacagaaaatatattttaaaaatttggaccaattgcaatagttatcctgaagccgatttccagaacctgccaccagggggaggtggtgcagcatgaatcattctgatggctttgtctttgaagtgttcccctatggctgttaccatctcagaggaagtaactgggcatggtgagactcctaaaatgatcggagt

SEQ ID NO: 645248 - DNA, 794 bp, Homo sapiens
gattctctgatcagtgctatcacttcttcggagaactcagctggtgtgctgtgaaagactacctagtcaaaacctgtctctctactgatcacgatggttccagtgaggcttcaaagcaagatagcctggctcctctgcctggggccagcccctgggcccctgacgtggcccaattgtcctcactatccatgtaacccatgtaccctggaacctgtacagtgcccgcattgctcacagcgccgtatgcatgcatctgttcatgcttaacagcttatggatgaggcgagtcagctgcacacgcagtgcagacaatacgtgtatggcaatcagtagacagtgtcgtcgatacgtagtgaatggaggagggctagggcgccagcgggagcggcctcacgcatggatgcgcccgcacggcgtcagctggccacatgtctgtggcagttcggcatggaggaagctcataggacccacatcctggtcccatcagggggacggctgcctcgaacccgcgtgggcgtccgattcggagaggcaaaggctacgttgggccggacgttaaggacgccagtggttgggttcccgcgcccataccccttgcccattcaacaaggcaagagggttggcggaaagccataggcgggtcggggtttttgacccgcggccatctaatttccgtggccccgtaaaccccccggaatctcggtacggaggcttgggcctgataacgggcctccagatatgggttcacccccggtcgcggcaccgcggttggaaccgtcgcccccgaagtacaa

SEQ ID NO: 645249 - DNA, 322 bp, Homo sapiens
tcatacaagaggttggtttcatttttccttatactcacccaaccagggggggctaggaatgaggtgaataggtgagtcaggtatacgggtgtggtggataaaatggttatctattcccaacgctgcagcaagagatgagacatgattctgttattaaggctaaaatactgcatttctagcaatttttctcctttctgatatccccttacactcaggtgtgcagtacttaaaatagagccgggatggcctatagggggggcttttcccacccttgctgggctatgaaatagttcatttcataggtagagagccgggcaagggt

SEQ ID NO: 645250 - DNA, 489 bp, Homo sapiens
aatctcactgaccccaaaattttgaccagtggtgcatatgtttttaaagtaattttttctgacttaaatctcacaattaaatccactgatatgaagatgattgaaatattattttgtctactttctattgcatgtttaaactgagtgacataaatcaagtttttttttttgtcatgatccactcattgctttttttttttacatgctaatgtcatggaattgaccgtcctttgtctttgcacatgtattaagtgtttgtttgtttaggtgttaaacctaaccctagaaagaaaacttacactgttacaccttaagtcataattactataaaagagaaaatattttttgtatgttttgtataaaaggtgcaattttctaaaaaaaaattacttgtaatcatttaaaatgacagtgaactaaatacataacataaaatcgcagatgtacttttgatttaactgattttcacacaacaataaatctttttga

SEQ ID NO: 645251 - DNA, 292 bp, Homo sapiens
taggatagcagtttcacactgcattgtagttccaaatagatcaaccccagtatcctctcacatcgattccaccgcaccagggacagggctctcttttttcctcagacagaaatatccaaagcgcacagcgtccaggcgtgactaccaagtcttctgtggggtggaactgagcacacatcaccataaattgcgcttttgattgccccatggttaacacacaaacacaggttctagatagccaattccacactcggatggtctgatcatcggaggcactcagaatccagggata

SEQ ID NO: 645252 - DNA, 469 bp, Homo sapiens
  misc_feature (11)..(11): n is a, c, g, or t
  misc_feature (360)..(360): n is a, c, g, or t
taacccatccngatgtattctattctagtgttagtataaaaatgcatttcacgtgcatggctttttatagcaatatgcttttaaaaaatgcattctaaagtcatgatcaatttacatatttacccatgcctccattagacagaaaggattatgcttctctcaaatatgttttggcaaattaagacgttagcatacatttgaaggctgtatcagtttaaaatgaatgtttaatggaaggtatttcctcccattaaaaaatgtgaaatcaagtaatataaactgtaccatagtgcatactaagacatgaaattcagctccagaaattcagctgtgcagaacagggccccgagcaacacttgnttgggaccagtgcctaactctcctggagagttcagagaagagtgcttcccagttgagcctaccctccattttagaatacaaagagcagaaaggtcggcctccacaactg

SEQ ID NO: 645253 - DNA, 528 bp, Homo sapiens
  misc_feature (100)..(100): n is a, c, g, or t
  misc_feature (189)..(189): n is a, c, g, or t
  misc_feature (192)..(193): n is a, c, g, or t
  misc_feature (195)..(197): n is a, c, g, or t
  misc_feature (205)..(205): n is a, c, g, or t
  misc_feature (208)..(208): n is a, c, g, or t
  misc_feature (210)..(210): n is a, c, g, or t
  misc_feature (215)..(215): n is a, c, g, or t
  misc_feature (272)..(272): n is a, c, g, or t
  misc_feature (277)..(277): n is a, c, g, or t
  misc_feature (329)..(329): n is a, c, g, or t
  misc_feature (331)..(331): n is a, c, g, or t
  misc_feature (333)..(333): n is a, c, g, or t
  misc_feature (354)..(354): n is a, c, g, or t
  misc_feature (361)..(361): n is a, c, g, or t
  misc_feature (421)..(421): n is a, c, g, or t
  misc_feature (425)..(425): n is a, c, g, or t
  misc_feature (431)..(431): n is a, c, g, or t
  misc_feature (434)..(434): n is a, c, g, or t
caagagctgttcaagggcaagaagggtgtgctgtttggagttcctggggccttcacccctggatgttccaagacacactgccagggtttgtggaacaggntaaggctttaaaggccaagggagtccaggtggtggcctgttttagtgttaataatgcctttgtgactggagagtggggccgagcccccnggnngnnncaaggttnggntnctggntgatccccctggggcctttgggaaggagacaaacttattattaaatgattcgctggngtccntctttgggaatcgacgtctcaaaaggttttccatggtggtacaggatggcanantnaaggcccttaatgtggaaccnaatggcncaggcctcccctgcagcctggcccccaatttcttttcccaggtttggggccctgggccanattncttccnccncccctccctatttcacctgcccagccctgtgttggggccctgcaattggaatgttggccaaatttttgcaataaacccttgtggtttgcggcca

SEQ ID NO: 645254 - DNA, 245 bp, Homo sapiens
caaagtatccaaatcaagatgtgtaatcagcagtcaagtatatgagagcagccattaaaactatagtcatggggtgaagaaaaaaaaaaattgtcataaatgaatagaatacatagtggaatctcagcagaaaaatgcacattattaaaaagagccaaatagaaagataatgaaattttaaataggacttataggttgattcatagatgagaacgacgacagaaccacttgacattattcactct

SEQ ID NO: 645255 - DNA, 435 bp, Homo sapiens
tatttatttatttctgagacagcttcctgctctgtcacccaggctggagtgcagtggtgtgaacagggctaactgcagcctcaacctgcagtgctcaaggaatcctctcccatcagccttccaaatatctgagactacaggcgggccaacactacggccagctaatttttaaattttacatagagatgaggttctcactgttgtccaggctggtctcaaaactcccttggctgaagtgatcctgtcgtctccggcttccgcaggtggctggggattaccgggcgtgagctaccaccatggcctgggcttccattgtctttgtgtgtgtgtgtgtgtgactggggtttcgctcttgttgcccaggctggagtgcaatagcgcaatctcagctcactgcaacctctgcctccagagttcaagcaattctccttcctc

SEQ ID NO: 645256 - DNA, 493 bp, Homo sapiens
  misc_feature (100)..(100): n is a, c, g, or t
  misc_feature (189)..(189): n is a, c, g, or t
  misc_feature (192)..(193): n is a, c, g, or t
  misc_feature (195)..(197): n is a, c, g, or t
  misc_feature (205)..(205): n is a, c, g, or t
  misc_feature (208)..(208): n is a, c, g, or t
  misc_feature (210)..(210): n is a, c, g, or t
  misc_feature (215)..(215): n is a, c, g, or t
  misc_feature (272)..(272): n is a, c, g, or t
  misc_feature (277)..(277): n is a, c, g, or t
  misc_feature (329)..(329): n is a, c, g, or t
  misc_feature (331)..(331): n is a, c, g, or t
  misc_feature (333)..(333): n is a, c, g, or t
  misc_feature (354)..(354): n is a, c, g, or t
  misc_feature (361)..(361): n is a, c, g, or t
  misc_feature (386)..(386): n is a, c, g, or t
  misc_feature (390)..(390): n is a, c, g, or t
  misc_feature (396)..(396): n is a, c, g, or t
  misc_feature (399)..(399): n is a, c, g, or t
caagagctgttcaagggcaagaagggtgtgctgtttggagttcctggggccttcacccctggatgttccaagacacactgccagggtttgtggaacaggntaaggctttaaaggccaagggagtccaggtggtggcctgttttagtgttaataatgcctttgtgactggagagtggggccgagcccccnggnngnnncaaggttnggntnctggntgatccccctggggcctttgggaaggagacaaacttattattaaatgattcgctggngtccntctttgggaatcgacgtctcaaaaggttttccatggtggtacaggatggcanantnaaggcccttaatgtggaaccnaatggcncaggcctcccctgcagctgggccanattncttccnccncccctccctatttcacctgcccagccctgtgttggggccctgcaattggaatgttggccaaatttttgcaataaacccttgtggtttgcggcca

SEQ ID NO: 645257 - DNA, 824 bp, Homo sapiens
  misc_feature (532)..(532): n is a, c, g, or t
gatggacaaatcttatttgcttaagtgttgtgtgtgtgtgtgtgtgtgtgtgtgtgtgtgtgtgtgtatgtatatatatatatataaatatctctccaatatgccgcgggagagtgttaaatccagactagagagtggtgatctgcaccaatattaatattatggtggattactgcgacgcactataatccatcactcagggcttcaggtgggcgtctgctgcgtctccctccgcgaccaatctagcgggagtgctgtggagcagagtctcctctcacttacgaagatctccgtagtgtgttgtcgacacaagcagggttgctcgcagatgatgaagaaaacgagcgatgatgatctgctgtcggtcgtacgtagatagtcgtcgctgcagcagggggctagcaactagctgcgctgcggaggcggtcctccctactctcctcgccgcgcgcccgtcgctcctcactccaccaaggagttagcgggcgtcggcgctcctgtgcggggcgccccacgtcaccccatgaccagnagattgaatgcccgccgtggtagataacaacacacccccattccaaagcgtggctaatccaaagtgaagtgggcagttgcgatggccattgacaatggtccttgtcctattcgatgccgtgattgcaagaaaaagttgccttgaagttgaggtaatgaggtgggggttaaattttactgtacagggcccaagccccggttattgttaagaaggaacagaacaaaacaaaagaaaagaagacaaaatagtgactgtggagcgacaacttcttcatataaacaagccactataa

SEQ ID NO: 645258 - DNA, 486 bp, Homo sapiens
agaacgaaggtggttcactagaaccagccacagcagatgacaaaaaacttcagttctcctttaacgaaagttaaggggtaaacaatatctctggtattgacgaggttgacatatgtatacaaaccaaggaacagtcatccactttaacaaccctaaagttcaggcatctctggcagctgaacactttcaccattacatgtgccatgctgagacaaagcagctgacagacatgctacccagcatcttaaaccagcttggtgcggatagtctgactagttcaagtgagactggccgaagccctgcacaaaacaatcctgtagcatggaaaagcaccacttgctactggagaggatgatgatgatgaagttccagatcttgtgagaactacgactgaggcttccaagaatgaggcaactggattgagccaactcctgcgataaacctgaacagttactggaactgtattatatatgactgcaataagaa

SEQ ID NO: 645259 - DNA, 732 bp, Homo sapiens
cttcgcggtgaggtgatgtattctctggcttttgtgttccccccccagtggggggcgccgcctcgctgttttggtgggccgctatcgggggggaaacccctctgttgtaggaggaggtgtgaaaaaattttttgcccccccctctctttggggcgcgtcttatgagacgcgccccccccccctctctattagagaggcgccggttgtcgagcggggtctctcgactccgccgcgctcctgcctctggtgtgatgtttctcccccccgcacagctgttggtgtgtgggggctcttctcgctcccccgccccttgggcgcaccccttgttctctccccccctcttgagagaggagcgactcatgggtgtggttggagttgaagagtagtgatcgacactgggtgtatcgcgctctctgttcctcctcgccatataatacgcggcggtgtcgagagagtgttacacacactctgccgttagaacaatcttatcacgcgccccccatatttttcccatccacgacccacgtagttttttttaccaccctccttttctccccccccccccgcggccctcttttatctaaagaggggagaggaggtaaaaaaaatataataaagggaggtctcgcccctttttttccccccctttttctcccaaaaaatcccctttttgtcccccccttttgggggcccccccccccccgaaaaaattttttccgccccgggtcccca

SEQ ID NO: 645260 - DNA, 904 bp, Homo sapiens
  misc_feature (213)..(213): n is a, c, g, or t
  misc_feature (225)..(225): n is a, c, g, or t
  misc_feature (273)..(273): n is a, c, g, or t
  misc_feature (292)..(292): n is a, c, g, or t
  misc_feature (349)..(349): n is a, c, g, or t
  misc_feature (358)..(358): n is a, c, g, or t
  misc_feature (372)..(372): n is a, c, g, or t
  misc_feature (378)..(378): n is a, c, g, or t
  misc_feature (399)..(399): n is a, c, g, or t
  misc_feature (401)..(401): n is a, c, g, or t
  misc_feature (410)..(410): n is a, c, g, or t
  misc_feature (421)..(421): n is a, c, g, or t
  misc_feature (468)..(468): n is a, c, g, or t
  misc_feature (522)..(522): n is a, c, g, or t
tactaaatgctcttatcattttgaaatgggctcttgattaatagacccatattttttagtggcttctatgttgtatatttgtctaaaatgaaagctcttttgcgttctaaaactacaatatatgtcatcttattttccctgagtatccaagtatagtgcagattctatgtaaaactactaaatgacactggaatatgtttagtagattagggngaaaaactatanaggtttatacaattgtttgagttacatttaggatggacttatcccttntgagaagagtgaagttggntctcttcgcatgtgatgaagaccactgtgatttttaaaaaagtagattatacttaanatggcgtantaattctgcacttngacttngactgggtacagcacacttgnangactttaanactctttatgnctataaatagcattcacttattactttgatatttaaggttccattangttacactgattttgacaagtgtgaccaatagccagtctgttcttcatgctaantagaatgagaggtgacgtactcacatcacaggcagcagcaatggttaaaatcccttctaaggttgcctctagtctggccttcatgcttattttacagacttgtagcactgaaggaagctggggagcttcatctaacctatgtttctacttaaggtggacaatttcccactggacgctaaatgcctttgatttattcacaagctagggtgacgtataacaccttttctaaatattttccaccctttcgacaacctcttggtaccccccttaactgtcttcaatacgaacaactctttctttccgccacctcttttactctattactctcttgaactaataacctcgtactcggctcctcgctcttcttctatacattacacaa

SEQ ID NO: 645261 - DNA, 957 bp, Homo sapiens
cctactggagactttgattcgaagcccagttgggccgatccaggtgcgcaggaggagggggagtgacgacaaatgtgtcaccagcgagctcctcaaggggatccctctggccacagtgtgaccaccagtcccatgagccagagtgtactgccggtagtctccactgacgctcccaaggaggtcatcaacggaaacataaagacagtgacggtagtacaaggatagatgcacggtatggccaaagtaagctatcgaagagtatgtccggcaccttcagtcgattggaggagcccggtgacagggctgtcaaaggtctggtcgcgaggatggcaagtaactgtatacaagcttcggtgaactcaggagttttgactccctcccgggagccagagtggtggccacgcgagcaatgatcatctgacggaatcttctcttagtggagcgctccatcgatcaggcaatggagggatctgacactgccaggtgtgggaggagcctatgaatcatctcaagggcctgatgatcgtgtcctggcgtatctgcccgtggcgaccgttgtacctgccgctgtccctactcgggatacgctgtcggtgccctgcggtacggtggctggccgtggcagctgggactgtgtgcgtgtgggacgcatggggaagctgtgcgggagagctagagccgggtgctcgtggcaggccagtactcaccacggcgtcatagtagtgtcgccggcgaggcctgtgcgaagggcgcctggcgtccgcggggagtccaatgctcgcccggactggagagtccgtgtccacgcgccatccggtgtcagcccagttgtcggagcggcgcgtggagacagacctggaggagttcttcggccttgggggcgactccagggtttctgggcaggaggggacctggcgcccggggcgggggtcacccccgcgggggacccggcccttg

SEQ ID NO: 645262 - DNA, 1097 bp, Homo sapiens
gtgcgagctcctgtgagtgcggctgggatggagtgcggctgtgcctgagcctggaaacctggcctggctgtcagtgcacatcatcctgtgtcctctcagtgaaatgtgtgtgtgtgctgttgtgtgaaaatgcaccatctccactgtgagctgtgccctggcactgctgccatgcagtgcaagaagctgctgataaagcagttttgtgtcctgactgtgtgcctgtgggggagctggactacctgtgtgtgtggacactgccaccctgggtgacctccgatgagcacatggccaccatagaagacctgctgtccctaccagcaccactgtggaggccactcgatggtcaccactgcacccagtgcgagtgtcctgttggtgtggactgtgatggtgctgatgccttgacccttcattgtagtgaatgactgtggcttgcagggctgaatgcgagaaaactacgaagcgcagcaactattgacagccgaacacttcacagcaatgaaacccaaccaccaacgacacacaccgtcatcgtccacgaacgcagagcaaacgagagccaacaatccaccaacaccgtagaaatggccaccataacattaatactcacatcaaccgtatgaccacacaatagattaaaacacattcaaagcaataccaaaacactgctcatcctcctttccacacccacattcaatacaaagaccataaccacaattccaattatactcatacaacaactccattataataatctcttcatactacattcaacaacactacacaactcatcactaatcttacctaatacatccctcactaataatataagaactctcactctaaataccacttcctcactttgcccccattctagtcatccccctcacacccccatgcttacagcacccctcaacataatcctgacaccacaacccttcacatatatcttcaataacataacaacccaacttctgtataacaccctctaacactctaaacaataatacatcaatccctaccaaagtcttactctctccatcaatatagtcacaaaaattaacaaatcgtaaacctcattacaaactcacccg

SEQ ID NO: 645263 - DNA, 483 bp, Homo sapiens
cgtagcacctccttggtggccactggaagcctggcaccacactgtcttgatctcgttgaggtactgcacctccttggtgatgtcggtgaggctgttggggccgggtgctgtcgggcccaaagccaccagatcttgcggggcttagccacggtccactcgtacttctcggccaggtagcgcgcccgctgcttgagctcctgacgggcggacacctcgcctaaatcgttgtcctcggccaggccgtcggggaagggccgcgccttcatgtacagccggtatgtgcttgttgggggacttggagaggcagatcacgttcgactcttcacttgaccgtctcgcggtacgagacgaccgggtcagatatcttgatggggatgcatgcgtggtcctcctccaggtccttcaggcagatctccaggtgcatgtcgccggtgcccgcgatgatgtgtctcccgactcctcgatgatgcattgcaccatggg

SEQ ID NO: 645264 - DNA, 335 bp, Homo sapiens
  misc_feature (52)..(52): n is a, c, g, or t
  misc_feature (130)..(130): n is a, c, g, or t
gggctccaaggccctggtggaaacaacccgggacctagccccctgccccaantggctttccccaaaataaggggccccttccccggggccctttttccccatgggttggccaaagagggggcccattaanttccaagcatcccaaaacttgttagtggggtggaaaaccaacgagccccctcccccggccgggggttgccccaattagggggtgccccactgttccccttccccccaggccccccggggtgcctgccccctctgcttggggggggggcagccccaaattgggtttttttttaaaaaaagaaaaaaatggggtgccccccccggga

SEQ ID NO: 645265 - DNA, 462 bp, Homo sapiens
ggagctcggtaccacttgtccacggttggctagtccatatattctcctgggcggaaggcatgtgtgcctgttgtgacagtgtcctggaaattcttttctatacgggtgagtgcatgttgaaggtgctcacacgtggtttcctaaagtcctgcaaagtggcagttaggacttttgtttgtttgtttgtttctttgtttctttgagacggagtctcactctcgcccaggctgtagtgcagtggcgtgatctcggctcactgcagcctctgcctctcgggttcaagcgattctcctgcctcggcctcccaagtagctgagattccaggtgcccgccaccatgcccggctaattttttgtatttttggtagagacggggtttcacgtgttggctaggatgttctcgatctcctgacctcgtgatccgcctgcctcggcctcccgaagtgctgggattgcaggcgtg

SEQ ID NO: 645266 - DNA, 167 bp, Homo sapiens
gctccaagtgttgggatacaggtgtgagcaccgcgctggctggtgtggcatatctgaagtgtgagctgggtgtgtgtgtgtggatggatatgtgtgagtgtgtgtgtggcgtggtatatgtgtgagtgtatgtgattggtgtatgtgtgtggtctggcatgtgtgtg

SEQ ID NO: 645267 - DNA, 146 bp, Homo sapiens
ggggggggggggggaaaggggggtccccccccccccccccccatgggggggggccccttttttgggccccccccctaagggggggggggggggggggggccccccccttttttttttttgggggcttttgggggtttttcccccca

SEQ ID NO: 645268 - DNA, 334 bp, Homo sapiens
cagtgctggggacaccccaccgccgctgtcactcgccaccccgcgctccagcaggtgcacggagcctccctcccggggcgtgcgggcgcctagctcctcagtccagtcagccgaacggctcagaccgtccgcaagaccacagtctgaacggtgcttcttgaccgggacggctacgaagtccaggtcagttctgtaccctcggctcaggaagggttccgaccgcctcttgatcctggggctctgattagagaaactcagtcggggagtgattgggcgagcttagctgccgggtggtggtcttgatgtagcagggggtgatgagcgggtagggctt

SEQ ID NO: 645269 - DNA, 531 bp, Homo sapiens
  misc_feature (8)..(8): n is a, c, g, or t
  misc_feature (54)..(54): n is a, c, g, or t
  misc_feature (101)..(101): n is a, c, g, or t
  misc_feature (150)..(150): n is a, c, g, or t
  misc_feature (161)..(161): n is a, c, g, or t
  misc_feature (238)..(238): n is a, c, g, or t
  misc_feature (244)..(244): n is a, c, g, or t
  misc_feature (373)..(373): n is a, c, g, or t
  misc_feature (391)..(391): n is a, c, g, or t
  misc_feature (401)..(401): n is a, c, g, or t
  misc_feature (468)..(468): n is a, c, g, or t
ccccccancaccaaaaaacgggaccaggaagggaaacccccagtattgaggaantgtaccccaaaaaccccgaaaaccccccctagccccacagccccaanccaggagtgtgtgtgtgtgtgtgtgtgtgtgtgtgtgtgtgtggttaanaccagtcctantttgttttggtggccaccataagttttaaaatgtttttacccctgtaaaaagtttccttcctgtgtaccttcccaantttaancgggtaccttttaataatgaactagaccctagaggttgggcgggtaactttcttggacaagataaaccctggggagctgtagagtttaatggggacataccaactctgagactttcgcagacacaaaantgtctaacacttttaaantctttttaantctttaaggagttttctttttattttcagcaagtagaatatgtgctctttggcactgttcttactantctttcttctttggcattgtttgtacttgcaatatcatagtattcagtaagtaaagaagatgt

SEQ ID NO: 645270 - DNA, 122 bp, Homo sapiens
tcatattagacacctaagtagcctaagtaaatatgctgaagatatattatggagaattattcaatgaagcaccatagttattccttcagagtcaaatcattgcaaacttgaatgggccccaa

SEQ ID NO: 645271 - DNA, 192 bp, Homo sapiens
  misc_feature (4)..(4): n is a, c, g, or t
catntagaccagagggaagagcatctcaacagaatcgcacaaactatactttcaggatgaatttcttctttctgccatctgtggactaaatattttcctcctttctatggaaatctgggctcggtgttgtaaagttcatttttataagcttttctatcgctacataatgtctttttaaaaaatgattttgta

SEQ ID NO: 645272 - DNA, 693 bp, Homo sapiens
tggcgattttcaaatggaaacagtcagacgatgattccgctccaagtacaaggtaacattgccaatcagattgttgttccgaagagaacagcagatgaggacaacaatacctcgataactgaggccaattcttagtcccagccagcagccgttccgacagaactgtaattgtaatcttcacctccgtagttacagaggagtgtgggccagtgtcatcagacatcagctcatgtctcattaatcacaccaacaaaaagatcctgtggtacagattcacagtctgagaactgaggcttcaccagtaaaacggcacgactacttgagaatacggaacggtccgaggaaaccatgtcgatctaaacagaagagtcgacgtcggtgcttccagtgccaaaccaaactggagctgtgtgcatgcaggaattgggatcgtgtcgctgcggttatgtgtactgtatgttacatcgcctccccgagcatgagactgcacattcgacacatgggcccgtggccgggaggaagccatcatgaaaatggtgaagcttggaccggacagtggggcgctcctgccagcgcatcggggagggggtgctcctgaagtgccaggcatgtgcacaagtgacgctgttcttagttcaactactgttcagccttatttaggacaaaagtcagccagacaccttgtactgggca

SEQ ID NO: 645273 - DNA, 151 bp, Homo sapiens
catgttcatgatccacaggcacggcagcttcggcgtggcgatcttgaccatcagcatgcgaaccgtgtgattggtgtattgcggctcctgcatcgaaagcgcgaccatgtcgtagcgcgaaacgtcgacgtcctgcggcgtgaccgcgtcg

SEQ ID NO: 645274 - DNA, 153 bp, Homo sapiens
aaacccttcccagcaaagggcagtacatgagtcttgtcccagcagaaaaggtccttcagtgccacccctctaaacacaggagccaagggtgttgacatgaggggcaccctattgcacccccaggcactcctcatggcattaatacgtggtcct

SEQ ID NO: 645275 - DNA, 852 bp, Homo sapiens
gttctcttgcttgtggctttgtctagtagtaccacagtggcttaagagtatgtaaacccaaatcaaatgggatgtgttcttttgggaggatgtactagacacaaatctggtcacgtaggcagccgtggcaccagtggaaatacctgtcagggaatcaagagcttgtagtgttagttgcaactgtctcaacgattgctgtgtggcttcagacccagaacaagggcctctgaggaacggagactctcatgttccccaacgcataagcggcaaggacgacggaggaattcctaggagccaaacgagttttgtggagcgtgagtggtaaatacaatggcccataatgccaactaggtgaacgttgtgaccatctggctgggaagcccatggtccacacagtgtaggagcagatgttttgtggggtctagatggtttacgtagatgttggctgccttaagaatacacaatacagaaatgcagaatttctggggctgctcctaggaccagaacaagtgaagggtcctggtgcttacacttcattaccttcatggtaaatccaccagagggccggttagatgctggccccgctcgagagaaatgctgtcactttcaggcaaagctcaaaggtcctaggtcccacagttctgtttgagctccagtcatggacattaggaagtaaatcctgcacagccaacctggaataccaaagattagatgggagatagatacgcaatgactttagatggcaccaggaagagcaagttctggactataataaatgagggtactttccgtcaaagcttttcatgtctatatttatcactgaatagtcccaaactgctgggaagcagttta

SEQ ID NO: 645276 - DNA, 346 bp, Homo sapiens
tcccttcttcttcggactctgattcttgagacagagactcagcccatgctctcatattcataagattttatcctgttttttgtgttttcctctctggtttttttgaaagtctcttaagcttcgcctttcttctttttcctaaaattcccatttcgaatagaaggtaaattctcttcaggacacaccattctgtcttcttagttccatatccttttgtttaatgtctttttcacagttttctaatatccggcataaagtcgtgtaactcttgcgcattgtgtctcacgtgtagttgtaactcgagcgctatatgtgctagagtcaatatggtctgcacagcccgtct

SEQ ID NO: 645277 - DNA, 499 bp, Homo sapiens
ggatctcgcagagcctccattgcatgctgtccccgcccgagcccagcgcagccccgcggccccaggacacatcctatagaacgataaggttttattagcgtgaatcctataggataataccgtttgtccccaggaaacacacgttgttaataacgcgagtatcgcggcaattgccgtacgcttattaatagcagagctcatgtataatgatccatgtttgatcagctaatgaacacgcgtgaggggaccgcggtacacgcttagggtcccttccgagaggactaacatctagcaatgccggcctggcaccgatctgctggttgagaaggacgtaattccaaacaaatatgctgttatgaacaatggtatagctcaataccttgaaacacttcatgagtctatacgaaattagtccttaaatcaacaagaattgactccaaaagaaccgcaataccataggaacatgagaatggagggacacccactatttaatacaacc

SEQ ID NO: 645278 - DNA, 159 bp, Homo sapiens
tctggtcagctgtatcagggggtggtcgctgtatcgagggggatggggacctgcccctgcctgacgattacgagctcttctgccgggatctcaaggaagttgttcaaaaacccgaacagtttttgctgagtaccatgctagtggttacctagtcccctg

SEQ ID NO: 645279 - DNA, 334 bp, Homo sapiens
  misc_feature (44)..(44): n is a, c, g, or t
  misc_feature (175)..(175): n is a, c, g, or t
  misc_feature (222)..(222): n is a, c, g, or t
gaaatcagccgtgggcaattcgagaacgccttcaacagcgagcntaatcgcatgcagcaacagctgggcgatcaatactccgagctggcagcgaacgaaggctatatgaaaaccctgcgtcaacaggtgctgaatcgtctgatcgacgaggcgctgctggatcagtacgcacgtnagctgaaactgggtatcagcgatgagcaggttaaacaggcgattttngcgaccccagccttccaggttgacggcaaatttgataacagccgctataacggtatcctcaaccagatggggatgaccgccgatcagtacggccaggcgttgcgtaaccagt

SEQ ID NO: 645280 - DNA, 418 bp, Homo sapiens
tactactactaaattcgcggccagtcgaccatcggatcccatgacagatggttgtgagctaccatgtggttgctgggaattgaactcaggacctctggaagagcagtaagtactcttagccacagagccatctccagcccccacgataccctcaaatcttaaaggtagagatcaaaaggacccagactaggagaatttggccccagacacatcagagatgtcacggttagtcccagcttcacgacaggaagccaggatgagctgtggttctgcagaatgagtgggaagaccaccctgacagagtgagttgcacatatagtaggccggatcccagatacagggaaagagtggaagacggggacttcatttctcaaacacacatgcacaggcacatgcacacgtgcacacacagtcgacg

SEQ ID NO: 645281 - DNA, 359 bp, Homo sapiens
  misc_feature (279)..(279): n is a, c, g, or t
  misc_feature (336)..(336): n is a, c, g, or t
  misc_feature (349)..(349): n is a, c, g, or t
tcaatcacgctggcagagccatctgctccatcctactctcaaacttttgagtggtttgtgtctcctgattgactcctactactaccgaattcatgctaggaagggtacaggagatagacgcacacagcatcggatttgggaataggtttggttatccaaggagcagtgctgagctccttgcaatgcgatatgggatgctggtgatttccaggaagtgcgctcactatgactcacgctgccccatactcgttcattgttacatgccagtcgaagcatatntcctgcaagcttacgggtgctacaagttgaccactgcggacactccagatcactctnaagaatggcgtgngatggctcac

SEQ ID NO: 645282 - DNA, 157 bp, Homo sapiens
aatagtggactcaaagcggctctctggctgagaaaacctgaggatatctcaggaagaagcctgtcagtgtgatggccagcgcactggaaaagggtcaggtcagtgttggatgctgacaggagtgtgttggagccatagagctgggaaagtggaaagt

SEQ ID NO: 645283 - DNA, 298 bp, Homo sapiens
  misc_feature (95)..(95): n is a, c, g, or t
  misc_feature (136)..(136): n is a, c, g, or t
  misc_feature (241)..(241): n is a, c, g, or t
tagccctcatgtctgcgtgcagcagctgccactgctttgatacttttagaggccctaaaaatcgcaaactatgctcaactcactctctacatttntcctaacttccaaaatctatttttttcctcatacctgacgnaaatactttctgctcccggctccttcagctatactcactctttgttaagtcccacaattaccgttgttcctggcccggacttcaatctggcctcccacattattnctgataccacaactgacccccatgactgtatctctctgatccacctgatatttaacc

SEQ ID NO: 645284 - DNA, 360 bp, Homo sapiens
cctgtgaatgtgtggtgttatgccgtacacaactaataaaagatatgaaagtccatagaagcctgtgcacctccgtacaacaagctaaatcaagatatgatatgagagggttataattcggcttgtcaaaatatgagaaactgtaccctcataggtatccgtgtctgtgcaccacgtgcacaatatgcaactaaatgtgtatgattatgtactaggtctctaatgatacgaattcataatggataacacaagccccgtgcatatccgtgcatcaggtaacaatacatcagtgcacggtgtaccgtcgtacacgtccgtgcaccgtacatcgcgtgcaaacacccataacaccacacaatt

SEQ ID NO: 645285 - DNA, 112 bp, Homo sapiens
  misc_feature (105)..(105): n is a, c, g, or t
gaggctacaagtggtattgtgaccatccatccttttgtagagactcctcagatctcggtacgtgcacatgctgttgaggacctgagatgcagccttgaccacttntcggaga

SEQ ID NO: 645286 - DNA, 214 bp, Homo sapiens
  misc_feature (168)..(168): n is a, c, g, or t
  misc_feature (183)..(183): n is a, c, g, or t
  misc_feature (190)..(190): n is a, c, g, or t
  misc_feature (193)..(193): n is a, c, g, or t
  misc_feature (195)..(196): n is a, c, g, or t
  misc_feature (198)..(198): n is a, c, g, or t
aaatctccaaaaccgcatcttgaccttgacgcatcatcgctgaggtcaaggcccaatatgaggagattgctcagagaagccgggctgaggctgagtcctggtaccagaccaagtacgaggagctgcaggtcacagcaggcagacattgggacgaactgcgcaacaccnagcaggagattgctngagatangcngnntngatccaagaggctgat

SEQ ID NO: 645287 - DNA, 105 bp, Homo sapiens
gccagcccccacagaacacctgaactcaaatgagatgccggaggacaggcgggaggaggtgtgaggaggaggctcccgaggggaaggggcggtgcccacaccggg

SEQ ID NO: 645288 - DNA, 901 bp, Homo sapiens
ttaccactgtctttgtcagcagtgctccggcgagaggtgcagcatgaggtctgcccggctgcgtcactgtccgtggtcgggcgagccacgggggcctgcgcagacaccatggctgaccaccgtcagcactcagctgccgggccggtgtacatcgtgtgagctcccgcaggacttcctccgcatcacgcccacacagcagcagctgtgcatgtgtccatgctgggacgcccagtgcgggcccagcagactgcatgtactgtgatggcagcaggattggagcacctgtgggaccgacttgaacatcacgtgttggtacatgtgcaaatgtttggccaacgaactttactgtgcattgaccccggcattggaaccacccgtacattgcgcggacgtgctgccttgtggcttacagctgtggatgttaccgatggactgccctcatcggtgctaccacaaaatgtgtggctggtcgcaaattgaaaattacccccctagaattggagaaaatgaatgggtcaatcccaacatagcaactgagtgcccccaagtgctgttggaaactctatatcgttaattcttcaggaagcagtcgtatcagagtcgcgcaacgacgccctatcctcccaatgggggaacatgagccctgttatttttgcccttagtgaagccgctagaaattcaagcaattccccccggagaatgttacccctgtgaatgtggcaaagagcgccagatgagttggcgaatgtgacaaaaatgttgggggtacagagccgtttgaagacgaggggaaggtgccaagcgggggcacggacgcaaggggcatgtgcgcgtttgatccaacaccgtgctggttaatggtccactaacagccagcgtgggttcccaaggtttgcctatg

SEQ ID NO: 645289 - DNA, 586 bp, Homo sapiens
  misc_feature (514)..(514): n is a, c, g, or t
gcccacagagccgcgtgaccatgacacatggtgaacgcgcgggcggcaagacggggagagaacctcagtggaacctaggggagctgctggacgctgaggtgagagcgaatctgttcacaccggggggacatgcctaggcaaggcctggggccgttgtaaaacacttggacgggaaggtcctgagccttaatttatccctgtcacgggatggatagcgtaatggaggccttactaggtgcctggtgctgtacaaagtgctgagctcaagttatatactgatgttcacaatgatgcccatttgacatgtgaggaaactgaggctcggagagtcaggcaaataggtcagggttacgggtccagaccagaggcgagcgaggcacagaagactagattttagacagaagtctcgcacacattgtatttcctcaaccgagcctcggacgtagctatgttgggttatccgaacggggaaatttatggactgatccctcgcgatttggaaaaagaatgctgncctggccaagctggacttgctagttacccggtgggccttaactagttcttggcggcccacatagatctccgc

SEQ ID NO: 645290 - DNA, 307 bp, Homo sapiens
  misc_feature (259)..(260): n is a, c, g, or t
  misc_feature (262)..(262): n is a, c, g, or t
  misc_feature (300)..(300): n is a, c, g, or t
tatgtgggaaattggctctgaaataatcaaatgccaaacaaagcccatctgaaagtccaataaagtaaaattattgtaattgcaaaatagcgttactgagctaaatccccacagtttgaggatctttcatttatagaatagatgctgttgtgttgtcagagtggagggaatgtagtttgggccagctgggggcaaatgaggagccaacggttcatttttctgctaggggttagaggagtctgatgagcaattagtagcnnanggttcacgtacagttgctagctcttatgtgttagcacngggttcc

SEQ ID NO: 645291 - DNA, 1253 bp, Homo sapiens
tggtcaactttggaagttttttatttttattttttgtggggttttgggtgtgttctcaaatttctccctttttacagataaaacatacgtgggggtgacggcgaatattcccgccacccttagcaatattcaaccattataacctttccctctatacacttattctatctttcacacaattctcttatatttcttagcgtggaacatatctccctagaaactctcggcgtggtggcccttataatctccagagcccttagcgtgtttctccacactttcttagtatagaggcctctctatacgcgtggccgcgaaaaaccaccttataaacaacaaaaaaacaaaaaaacaaacaaaaaaaaaaaagagagaggggggcgcgcgccacacaagagaattctctcccgcgggagggggcccacaagtctatgcgcgcgcgagacccaccgggatttatgggttaacccaagggggggcgccccaatattgggaggaggagcgttatatatataaaacagagagagccgcgggggcgcgcgcggcttgttaaaaacaaacgggcggagagacgaggcggagaaaaacacagcgcggcaaacgcggagagagaaacactctgtgggaaaagagagagaccccctatatattctgtggggggggggggaggggaacaaatattatgtgggggaccaacaaaatcatcctcaaaagagaagatttatttaagagccctctataaagaaggggaaaaatatatatcaaaaattcttaacagagggggtatctacaacggcgggtggtgtttaacaacacaacgaacgcggcacgaaaatatatattatccgtccgcgcattagaaagcaacaatattgtgagccatcccacacgaaggaggaactataatatttttagacgaaccagaaacatattttttattacaccggcggggacgtatctttcatagatcaacatatcataaatcaagacaaacaccaaacaacaccactcgacgcacagagaaacaaaaccaacccaagaaagaaaggcgggacagcaaacgggagcacagagaaagaagaagcaacgacgcaagagacagaaaaaacaaaaaagaaagacggacacaacaagaaaagggcgcgagcagagtgggaggggaagagagaagagagacaagaaaagagagcgaaagcacaaaaaaaaacaacgaaagtaaaaaaacgcaaaaaagaacaaacgaaacaaagacagca

SEQ ID NO: 645292 - DNA, 850 bp, Homo sapiens
  misc_feature (83)..(83): n is a, c, g, or t
  misc_feature (175)..(175): n is a, c, g, or t
  misc_feature (269)..(269): n is a, c, g, or t
  misc_feature (420)..(421): n is a, c, g, or t
  misc_feature (455)..(455): n is a, c, g, or t
  misc_feature (477)..(477): n is a, c, g, or t
  misc_feature (495)..(495): n is a, c, g, or t
  misc_feature (509)..(509): n is a, c, g, or t
  misc_feature (554)..(554): n is a, c, g, or t
  misc_feature (580)..(580): n is a, c, g, or t
agcggaatggcttcacagcaaggttaccaagaagcagatgggctgtgaaggagacaaacccttctgtctaaacacaaatagcnttgataattaattagctgaagcagcaggggaaattatgaaaatgtgtgaaagcacagctgtgaggcatgtaaagccttcctactccagattnggtctactcaccagcagcatctccatcgcctaagagttttattagacatgcgcaacgtcaagccctactccagacacaccgaattagaacctgnattttaacaagatccccagtgactcatatacaaacaaaagactgagaagcacaggcctagaagatgtctcctcccactgacaaagggcaaagaaaggagttgtctcagaacttggagtaaaaaatactctcctgtggtgatagagagaaanngtgtggagggaaagaggggagcctgtgtatatgngtgtgtatgtgtgagagagatngagagatgaaatgaggtnacaagattcactgncaacagcctgctaaattttcagaactctggatctcagtgtagtanttactcttattgatactaggcatatntagtttctatatcccccctgagatgttcccaaaatgtcataagcggcaggaagataacctgaatttttgtcctttatccaagcactaggtctgacagaggtagtcttcctgacattggcctcactggcccagggttaagaaagctcactaaatgtttctgactattatttgaagcatgcatttccagccatgctattctaccaaaaagcagcacagatctctcttcttgatccattttgggattcttcatatttacatcatcacccttaa

SEQ ID NO: 645293 - DNA, 778 bp, Homo sapiens
  misc_feature (225)..(225): n is a, c, g, or t
  misc_feature (437)..(437): n is a, c, g, or t
  misc_feature (737)..(737): n is a, c, g, or t
gcacgaggccataactgacaccgtataaatgtttgtcacttatggtagaaaaaacttcctacaccagatgcccttgccccatgcccaattttcattctcactttatatgtgtaataataaaatattcaactttccaaaaaaaaaaaaaaaaaactcgaaactatttctctctctctctgggggccgcacccattgagttattgcttcaggctttcagaaagaggnctcgccttcttagtgtgtctccttccggcttgttggcaagaaagaaggtctctggtttagacccccaatgtgaagcccaagtgaaattcgccaatgtgccaacttcccgttcagcagatctccggaagcttcattcaaagattgggcttgattcatctccgcaacgccttgtgacgggctccattctcccggggctctcgattcgccggaanaaacacctttgggcccgccggaaggggcagggcacattgggcattaggtaacgcggaagggtacagccaattgcccgaattgccagagaagggtcccatgtggatgaggagaagtgaggatttggcgcccggagtgctcagaaagaataccgcgaatctctaagaagattcgatcgccacatgtgttttcacagcctgtacctgagggtgacaggggaactgtgttcaaaaacaaggcggatcctcatggaaccacttccacaagctgaagggcggacaaggcccgaaagaagctcctgnttgaccaggctgaggcccgcaggtctaaacccaaggaagcc

SEQ ID NO: 645294 - DNA, 121 bp, Homo sapiens
  misc_feature (14)..(14): n is a, c, g, or t
tcagatcggggtgngctttgaatacgctgggacacacgactaatcactcctggggtgtcgatgctcgtgagcgcaacaccgggcggggcgcaacaccggggcggggcgcaacaccgggcgg

SEQ ID NO: 645295 - DNA, 122 bp, Homo sapiens
tgaagtcgaaatagaggatccccgatgttttccttacgataattttatacctcagcattcatttttaaaatgtagtgcaacaaacaaattaaagaacacacacttgtggaaatcagcattat

SEQ ID NO: 645296 - DNA, 225 bp, Homo sapiens
  misc_feature (15)..(15): n is a, c, g, or t
ccggactacgccganctacatcagaaaacccacctacatgacaagcccagcaggtgctctgagtgtggcaagaatttccgatgcaactcccatctagccagccatcagagagtgcatgcagaaggcaaatcctgcaagggccaagaggctggagagagccctggggctaggaaacggcagcgtgctgtgccagtgccaaagtgccacgtgtgcaccgagtgtgag

SEQ ID NO: 645297 - DNA, 670 bp, Homo sapiens
tcccccccccgacttttgaggcccgggttgcccagattagccaaaccccaaccgagtgctgagttaaacggccaatttccaggtaaacccaagatgaattttcgtaccacttgatatgcccccccgccatatttgggaccacttatgtggaaaatgatttgtttttcttgaaattcacctgttctctctggagtcccgtgaacatgtcccccgaggggattgacgccagaagctctcgggtaatgagcccctgaggtgtgacatgcccggttatattttctcgtccctgggagaccagccctgacacccacactcccctgtcgtcccaagtagcccacgtgaggggagggggagacaccacgacccaccaccacgccacggggcgtccccactggcgagctgtggcccggcccctcctctcttgcctgaactctcctctcttgcctgagctctagacacctaacttagttccacggttcggtgccctcgttggtgctcccgtttcccatagcttaggtcccctggtgggggaggaacctcaggggctatgcagcccccgcccactgccctcgaatcccgctcccggcccattcccagattttaaactgatttttttcatgatattgtccaaaccgtgaggaaaccatttaaaaaaaagccccttaagcca

SEQ ID NO: 645298 - DNA, 217 bp, Homo sapiens
agcaatctgcatgtcatgtcatcgcggtgacccttggttccagcctagcaggaaagcggcttgcgtgagatctacaacgcgaaggctgtagaatacaggagaaaagctgcttaagagctgtaatagtaacacggcttggcttgccttggccctgcgcgtctgtcgacaaccatcttgtagtactcctagagtgaatgtagaagagatgatgagtgaa

SEQ ID NO: 645299 - DNA, 359 bp, Homo sapiens
tagaggttcaccgccaaagaggtttcaccgctagtagtctttgattttgacttactctccagtatattacaggtaaatagatcgcccatcgatctctgttccctgctattcttcaaaggttctctctgcatcagcttctgtcttaaattcaatataagcaatccctttatttttcccttccttgtctgtctaatctgatctccgcaacatcttactaaacacttctttcatattcatcctgagtgactttgtaatgtagattttaagccaaaagtgttctcgcatctcgctctttcttactgtcttttccttttggtttctctagttctatttccttgccggagactttcaaaccagtt

SEQ ID NO: 645300 - DNA, 84 bp, Homo sapiens
ctagaagattcagcaaagtacttttgtgctcttggggactgggggacctttgggggatacggcggagacaccgataaactcact

SEQ ID NO: 645301 - DNA, 234 bp, Homo sapiens
ggtggtcacagaagtagagtcagaagtaggaagagaacgctcggaaggtggttgggtcatccgagatcattaaaatggcggaccctaacaatatgtacaagaatataggaaatgtaaagtaaaagagtacaaacaaatttcctttttaagagtacttttaagaaaaaaagcagggcctggaagtgtgggttttttttgtcctccccggttgcaaattctcatggtttgggttgg

SEQ ID NO: 645302 - DNA, 389 bp, Homo sapiens
  misc_feature (27)..(27): n is a, c, g, or t
  misc_feature (48)..(48): n is a, c, g, or t
  misc_feature (78)..(78): n is a, c, g, or t
  misc_feature (108)..(108): n is a, c, g, or t
accccccctggcccccccaaaagtgcnggggatacaggtgtgaggccnccccacgccccagccatgcgggggcttccncctcacgggtggtaaacctgggctgcatgnttgaatagcctagagatttttaaaaaatacctgatgcccctgggcctcacccttcagagatttagatacaattattggggtccccagaatatttttaaagatagtattgtcataagtatttagtttacgttgcacttcaaaaaaaattgtagatttaacttttatgtctaatatttaaggttttgaattatttgtgaatgaaaaaactctaaaacagagaagtggtaccttttcattttaggtgtactgcctcagctaaagggtgtgtgtgtgtcttgact

SEQ ID NO: 645303 - DNA, 502 bp, Homo sapiens
ctgacgtcaacccaatcaacacactcactacccaaattcaagattatttcaataaaaatatgttcttcccataagaaaatgactgagagctctccagagtcctactagtggatttctattcctaaaagagaaagtgggctaacccaagtgaattatatgctgagcatcccaaatccaaaaatctcaatcctgggctgggtgtagtggctcatgcatgaaatcctcagcatgttaggaggctgaggtgaaaagatcacctgagcccaggagtttgagaccagcctgggcaacatggtgaaacgctgtctctacaaacaatacaaaaattggctgggcatggtggcacgtgcctataattccagctactcaagaggctgaggcaggaggatcacccgagcccaggagttcaaggctgaagtgagccgtgattatgccactaaactctgggcaacagagcgagaccctgtctcaaagaacacacaaaaatccgaaaatctggaat

SEQ ID NO: 645304 - DNA, 211 bp, Homo sapiens
ccagctatacagtaccatgagtactatatagtaagtctttgtatctctgctaggtatctcatgcacgtcccatctctgtagtaagaataactcataaatattactttattagccacctagtgtgggaaatctttgggacttcagggccttgaggtaacacgaacttggtcgcagatattatctacagtacatccctgtgggatgttcaact

SEQ ID NO: 645305 - DNA, 297 bp, Homo sapiens
  misc_feature (77)..(77): n is a, c, g, or t
  misc_feature (90)..(90): n is a, c, g, or t
  misc_feature (198)..(198): n is a, c, g, or t
  misc_feature (207)..(207): n is a, c, g, or t
  misc_feature (232)..(232): n is a, c, g, or t
  misc_feature (249)..(251): n is a, c, g, or t
  misc_feature (262)..(262): n is a, c, g, or t
  misc_feature (289)..(289): n is a, c, g, or t
tagccgacggagtggctgccgtataatgtgatgaatgcagtggatccatgcagtgtgaagaattggaaccctcttgnatgcatggatttnatgcagcatgattgaatgcattggattccatgcagcaagattgaatgcagtggatttatgcagtatggcccaaatcatcccgattgaatacagtggattccatgcatngtgattganagcagtgtaatccacgctgcgtggnaaaatggatcccgatcnnntgcagtggatncgatgcagcgtcattaaatgcgtcggntaatttta

SEQ ID NO: 645306 - DNA, 865 bp, Homo sapiens
tggagacagagtctcactctagcttgggtgacagaatgagaccccgtctcaaaaacaacgaagaagtagataatctgaatagccctatatctatagaaatttaatagtgcggggagatataggtatattatcctcattttcacagatgtgaaaatggaggctcagagaagtaaagtctatggctcagggtcatgtggctagaatatggcagagccaggattcagatccaggtcttcggatcttattccagtgtcctttctagcataccatgtggcctctaaagatggcagctccttatttacttagaaaatggtcccggccccaatctacatctccacttcaccccatctttctataagcactaggtggggtagaaatacagatatcatatccatggtccttgggaatacatgtactggtcgggtgggaaaaaacctctcttctaccagcgttgcaatttcggacaacgtgtggcacaaaaaaaccttaaacgtgtgtggctatgtcccgttacacaatggacgttgcacttaaccttttgtaagaacatctattaacctgctaaagggcgacttgaacgggaactaggaacggcgggagtaagcaatcacttgccggccagcgtcggtgtaaaactgctcccaatggcccaacctattactcgaagtgagaacgcaccggatgacggacaacatgcgtaccatgctgttacaacaccaggggtaaaaaggcggcccaacacacacacgcaccaacccagccagcacacaagcaacagatccagagggcgaacccgccacaaccagcaactaacacacacgagcgagaacgcgagaacaatggtgtaaacgaaaatagcgacgca

SEQ ID NO: 645307 - DNA, 296 bp, Homo sapiens
ggagacatttttgttttgctctgtcacccaggaggtagaggttgcagtgaatcgagatcatgccactgcactccagcctgggtgacagagtgaaactccgtctcaaaaaaaagtctttcaagaaaataaattccaggaccagatagattcacagatgaatcctaccaagtatacaaagaagaactaataccaatccttgtaaaactattccaaaaaattgaggaggagggaattctccctaactgattctacgaggccagtatcatcctgataacaaaatcagacaagaacacaac

SEQ ID NO: 645308 - DNA, 643 bp, Homo sapiens
ggatctgacagtagcattccatgtgttcctccgtggttctggagttggaccatgacagtatgattgctgctactcgtgcgcaactggcaagacgaatgtcgacaaatccaggcaggcagatggagaaatatgtccaccttggttctggtgagtagggcagatcacatgattctgtggcccatatcctcaagtggaagagaagctcaggtgtgcagttgaaggttgtgaccggacatttgtatggccagctctagctttagatgtaccacctcaagactcatcgtaaatgaccgatccttcatctgtcctgcaggaatggttgtgggacaagcttctatgtgctgcagagggctgacaggtgcacattgaggacccatcaattggaccagaagccctttatgtgccatgagtctggctgtggtaagcaggtgaactacagctggagacctgaatgaaccatcggcgcatccacacaggagagagacctttcctttgtgaagcccaaggatgtggccgttcctttgctgagtattctagcctccgaaaacatctggtggttcactcaggagagaagcctcatcagtgccaagtctgtgggaagaccttctctcagagtggaagcaggaatgtgcatatgagaaag

SEQ ID NO: 645309 - DNA, 200 bp, Homo sapiens
tgtaaggtagcggtcatagagaacacgcagatttgggaatctttgtcaggtccattattaatggaggagcagcatctagagatggaaggcttcgggtgaattgatcaatcgtgatagcagtaaatggagaatccctgttgggcaagtacaaatcaagtatgccatgagaaaccctatagaaggtctagtgtctacgtgaa

SEQ ID NO: 645310 - DNA, 677 bp, Homo sapiens
gatggggatagcattgaatccataagttactttggacagtatggccattttcacaatattgattcttactgtccatgagcatggaatgtttttccatttgtttgtgtcctctcttatgtcctttagcagtggtttgtagttctccttgaagaggtccttcacatcccttgtaagttgtattcctagatattttattctctttgcagcaattgtgaatggcagttcactcttgatttggctctctgtttgtctgttattggtgtataggaatgcttgtgatttttgcacattgattttttatcctgagactttgctgaagttgcttgtcgcttaaggagattttgggcaccactggtcccacagaaatacaaactaccgtcagagaataccacagtattctctaatactataaacacctctatgcaaataaaatagaaaatctagaagacacggataaattcctggacacattacaccctcccaagactaaaccaggaagaagtcgaatccctgaattgaccaataataagttctgagattgaggcagtaattaatagcctaccaaccaaaaaaagcccaggaccagattagattcacagcgaattctactggaggtacaaagtttccattccttctgaaactccattccttctgtaactatgccaaccgtagaagaa

SEQ ID NO: 645311 - DNA, 313 bp, Homo sapiens
tgatagaatcagctcggtaccggtgttttatgatgcactacgtgactcatagccacgctgagatgtctccgacattctacaatatccgggtagatcgtggactaggcttgtgcctggaggtggacgtgtgagaagatggtcattatgatctaacgtaacattgataactcgctcattgttggctactgacttcgatgaaagccgcgagatcgaaggtaccgaaagcacagtaagtcactgggtgatcgatagtcaggatccatcatagaggtcgaccttgcatggacttgcaagatttggtgactgatgcgct

SEQ ID NO: 645312 - DNA, 577 bp, Homo sapiens
ctactcgcagcacctgtgcgggtgtactatgaggctgatacaacataagagaaatcaagctctgttagggcatggggttattattattgtggcggggtgtctagtagagtagctttatattgctcttaggtctggagttggccatgtacctatgtatcctgagcattcacggcagtgagctcctttactaacattcatgtgatggcaagagttgtcctctagatgggaaagctaatcctacctagtcagtaacaaccaactgagttttatcttaaagaaaggtaaatttcgtcagctagtttactatgtaccttgaatcataaacaggttataatactcacctgttcactttcactaaatctacgtacagtcatgctgcctaattcgaacatgaggtattctaggtcccatgtatgtcagccttggcatgtcattaacagttatgatgtacctccctgacttaaaaacagaatacttttttcttgatgtaggccttactcagataagtcaaaattctatagaatgactcacttcgaatactaagagacaggaggtatagcctgataacttaccaaat

SEQ ID NO: 645313 - DNA, 739 bp, Homo sapiens
aaccgtggggcccgcggcgacccaagttgtttgtactggccgccttgtgctcttttttctcccgcaaccacttgtgtgcacacccgatggggcgggcattgcgaaaattgtaggatattcgctcgttccactcctccttgcttcccaaccggcttccccctgctctctcccacgcacggttcgttccggtgggggttcccccccgctagatccttcatttatggcctcttcgccccccctcattcgtctccgttgcacctgtccccacgcgctgtgcgctggttgcttgtgtcaaacctctgtcagtgctgtgtgctatagacttgtgtaactaggccccccaggcggtgcggattactcaatctataaatagacggggtgccccctgttaggcccaacgaacgagttgttattgccacagagcagcactcgcccgccgcttctgccaacattgtcggatttctttctggcttgcctccgggaagggcaatagttttcccatgtttggcaggggaaaattcgtggttggaataaaattggggttctgtgcacgcccgcacctataatctgtaggtatacgaacccacaggccaccccagggttgtccctgccacgcagcattgttataaccgatcgtttaaacacgaagtcccctcttttttttttctccaaaatttttaatttcgggaaccccaatttttttaaaaacccacaaaacaaaaaaaacagaacataaaaa

SEQ ID NO: 645314 - DNA, 117 bp, Homo sapiens
aaaatatttattagtatgaatcagtgtgtgtgaaccaaaaataacagatacgattaggctttgttgatggaaatgctttactacagaatagaatacatgcggaaagaggagagtggg

SEQ ID NO: 645315 - DNA, 271 bp, Homo sapiens
  misc_feature (211)..(211): n is a, c, g, or t
cagagatgatgccactgcactccagcctgggcgacagagcaagactccatctcaaaaaaaaaaaaaaaaagctgctgaaatcaggcagcgcctttcaaattcccggcccaggtgatttcgtaactcgtgggcacccggggctacggccctttcctaggcccggccaattacccttcttcctccattttagcacttgggcccatgtgtctcnttacattctcctttaccacagttttaacaggggccggtgtaagagcctttcacccagtgg

SEQ ID NO: 645316 - DNA, 420 bp, Homo sapiens
  misc_feature (19)..(19): n is a, c, g, or t
  misc_feature (222)..(223): n is a, c, g, or t
  misc_feature (236)..(236): n is a, c, g, or t
  misc_feature (395)..(395): n is a, c, g, or t
ttccaaaaaaggcggcctngggcttccgggaagccgtttcccaaagggccaagacccctggccaaccaacgggggagagccttccctcttccacggagcgcaccaggcggcggaggatctcgggagggacgaagccggagcccctaagggtgaggttgcggaggtagaggtccctcaggtccaggtccgccttgggtccggcgatggccccgaggtcacgtnngcgccccggggcncagggcctcgaggagggcggggaacagggaaccccccaccacgtcgccacggcgtccacgtgggcctccccgtggcgcctccagggcctttgggaggtttccggggctccggggaaggcagacgtccgcccccaaagccctcagggcctcgtgcttttncgggctcgcaagggcatcaaccggg

SEQ ID NO: 645317 - DNA, 107 bp, Homo sapiens
atgagtgatgaaaactatattaccaacgggaatgaagtacaataaactactaacaaacatactaactggctacatatactaactaaaataaattagagtggtcaagt

SEQ ID NO: 645318 - DNA, 990 bp, Homo sapiens
cttgaagccaaaaggatttaaaaccgctgctctaaagaaagagaaaactggaggctgggcgcagtggctcacgcctataatcccagaggctgaggcaggcggatcacctgaggtcgggagttcaggatcagcctgaccaacatggagaaaccctactgaaaatacaaagttagccaggcatggtggtgcatgcctgtaatcccagctgctcaggagcctggcaacaagagcacaactccagctcaaaaaaaaacagaacgaaaagaaagctggacgctgggtggctcaggccatcacccttccctgggctggaactacgggcacagacccttcggacactgtgccgtgtggctgctgcggccactgccgcgcacggcgcctctacgctcatacgctccgagcctccgccgctgctgctctccgccgtccgctccttacgctcggctctgccgacccctccggcgcgctgctgctccggccggcgcctcctccagccccccgcgcgccgaacgactggcactccctactcggcgcacccgcactcacgctgccccgcccccgggacacactcacacaccctgcgccccgcccaccggcaccacacaccagcacgcgcacccccacccaaagcgcgcgaacacacgagccaaaacgacccggacccaagacgcctcacacaaggacacgaacaccggacaccccatgcccacaaaaacgccaagaacccaagacaccccgcgacgccgccaccacaccagccgccccccgcccacacaaccagacgccccacccccaggcccacagcccccccaacacccagccccccaccccccacaccccccagcacacacccgcccaaccatgccacgccgcaaccgccccacgacgaaacgcgacacccacaccagccaccaccacagcccacaaacaaccaaccccaccccacgcaccacccccgaccacacaacaaccacacccgccccaacgacc

SEQ ID NO: 645319 - DNA, 640 bp, Homo sapiens
agaccaagggctaaagctgggagactgaaaaaatgcatacgtcgggtgatgatcatgtctccagctcgtgatccgctgttgtccaggggtactaatcaggcctgtgtctgccgccattctagaatagcacacgagggcaatgctagtcgtaaacagtcgttccatactaacaacgttcaccactctcaggtgggacagagctgggagcttcccagaccagtgttgtctcccgggcgtacaattgaaactggcgagcctacagtttcacttcggtgcatgtgggcaagccacagtgagggtgtggatgggttcagtgcgcatggcagtgggaaccggtgtgggcagcttgatgcatcggctatgccaggaagccggtctctcaaagcaggagttcttctcctatgccattcttggactaaggccctggtcggaggccatggggcatatccggtttgatcggtccgcttcctcatacctctttcgccatgtgaggctccaatggggggtcaccgggcgtgttgtgttacatgcaagttcccacacacattctcggtgcctggcaatgttgttaaggctttgaccataaaaacaaacatggttttcttgtgacataacttcgccttcccaccaagtcacaaag

SEQ ID NO: 645320 - DNA, 991 bp, Homo sapiens
  misc_feature (268)..(268): n is a, c, g, or t
  misc_feature (288)..(288): n is a, c, g, or t
  misc_feature (991)..(991): n is a, c, g, or t
gcatcaagcgcttcctttccgtgtgctctctcccgcgcgtgcgtgctgttgccctgtgaactgcacggatgggagcagagaagagctgctcagatctatgagagcaaggtagtctcttcagcaacttgtctgtggctgtgttcgtggagccagcagcagtactctccgcatgatgactcctggtataacaatggtcttgtgcaccttaggggcgcccctactctccaatggagattaccattgtctggtgagcgatgagttggtctgncaacctccttctactggagncttgtgcctagtagggcccatagctgtggtgcatgggataggtgctctggagtcgtgttggtcctgcattcatagccaagacgcacccagacgtaccctaataggcagatcggacaagcacacatctttcgcagcggtaggagtccagcgtgagaacgatacgttgatacatgccatatagctgtacgatccaaatgaccttcttgcttcggaagttttcgagaagatctaaagcagtccgaaggatgagttcaagtatatgcttctctcattgggggtcctttctggctcatgcattcagttcaagtagtacctgttagtccctaggttcagagatgctgactttctgaagaagatcatctgacctctagcaggttgtgccaatgttcttgaatcaatcaggaaatgggatacaattgctttcacgatgagtctcaccttcttctggtttagcccttctgttctctgtacacggtgaacttctgtcatctccttctggcttggttgcctctgacaatggagggaaacgtctcgttggctaaaattactctcttatagtgctgggtattggctggtttactcttgctgcccgtctttgcaaggttctcctctcactgggtttgcaaggctttcataggtaaggcttggcgaagcaattgttccaaacattacacttttggaattctaggggtggtaaccctcn

SEQ ID NO: 645321 - DNA, 241 bp, Homo sapiens
tgtgggtcgatcactgtactccagcctgatcaacagagcgcgatccgtctcagaaacaaaaaaaaaaaaaagaaaacggtttaaccagggtgtactaaccacaattaaaatattgatggtaatggccctatcatctataaggattttaagtactctggcaatatttcaatttaaattcccatttccatttggtggacaaggttgaagaaaacccagtacggtgttcgaccagggatcccgg

SEQ ID NO: 645322 - DNA, 370 bp, Homo sapiens
tctggtaatctagaggatcccgaagcgcacgatggttacgtcaggcagcctgatgttccgctgctgggccactgaggcggctccagctgcgttgggacgatggccgacacccccagagatgccgggtacaagcaggcgcctgaatacacggaacgagaaggccccggtggacttctggctacgttggggattgactccatcctggacgcagatgcgccggaaggccatgacgcaggggctttcgagttcaaacatcatggtggtcgggcatgagcggccttgggtaaatccacctttaatcaacaccctcttcaaatccaaaatcagccggaagtcgtgtgcagcccacctcagaggagcgcatccccaa

SEQ ID NO: 645323 - DNA, 105 bp, Homo sapiens
  misc_feature (12)..(12): n is a, c, g, or t
  misc_feature (42)..(42): n is a, c, g, or t
  misc_feature (84)..(84): n is a, c, g, or t
ccaagatcaccnaagtcctgcacttcaccaaggatgtcaagncgctgctaatcagatgcgcaacttcctggttcgagcctcctngtcccttcgcttggaacctgg

SEQ ID NO: 645324 - DNA, 474 bp, Homo sapiens
acgaaccgagctcgtacccccttctacgtctcatcactgggccactagacataattaaagaaatctgagtcagagtaagatatccatctcagaattccaatctattgttgttgttgttgttgttataataatgttgagcacagaaggtgcattaatctttatttagtcttttacttcttcctacttttagcagtcaatacacagagatgtattgtcatcttctcaaagcagaacaacaatttgttctgtatcatgctatattatactacttttcagaggcattcctaccttgactgaagtagcaatgcacagatgacaaaagtttccgtcattatgtgctctgtagaaattgttatattgtccttacattaaggtagaatgtttattctataaatataatgtaagatgataaactcctctcttcacctctaagattgcacctctctgcatcctacagtgatgagacgtagaagg

SEQ ID NO: 645325 - DNA, 313 bp, Homo sapiens
gagctttgctagtgggtcagagcaagcgaagcttatgtgggtaccgccccagcctcgggcacctagctgcccctgagggccttgcctgtcagcccccagccctcaccccttcacctaagggtgggtgaaggggcctctaagaggagccatggccaggctggggtccaggtctgagcatctgctccctcccctcctgccctgtcttcctccagccctgctccgctcgttgccactagtccctgctccgttcattgacactggtccctgttctgctcattgacagacactggaccccactctgctcattgacaga

SEQ ID NO: 645326 - DNA, 173 bp, Homo sapiens
gcctagctgccgtcgccgccgccggggctctatggtctctcctagagctttgcgttggagggcggcctgctgcgggtcttgttgaagtttgaccagcggtcggagcgggcacaaacaatggagggagttcggacctcccaagactttcttctaccgtcggaggaggaccgaag

SEQ ID NO: 645327 - DNA, 681 bp, Homo sapiens
  misc_feature (103)..(103): n is a, c, g, or t
gagacgctgcagcgcaggaccccccgagacacatatgacccaccagcccatctctgaccatgaggccaccctgaggtgctgggccctgggcttctacacctgncggagatcacactgacctggcagtgggatgggggaggaccagatccaggacacggagctcgtggagagcaggcctggcagtgggatggaatcctttccagaaagttgggtcggctgtggtggtgccttctggtagaggagctagaagatagcacctgccatgtgcaggcatgtagggtctgtcgcgaagcgccctctagcgcatggagagtgggagctgtcttcccagacccaccagtccccagtcggtgggcactcattgctgggctggttctccttgtggagctgtgatcacttggagctgtggtgtcgctgccgtgatgtggaggaggaaagagctcatgatagaaagaggaggggaggttagcagagtcgaggactgtaaggagtgacagtgccgatgggctctgatgtgtcgtctcacagcttgtaacagtgtggggacagtggtcttgtgttgggactgagaggcaagagtcgttcctgccttccctttgtgacttgaagaagcctgagtttgttgctgcaagggcactgcatgtgtctgtgtacgtgtcaggctcatgtgtgaggacgtgg

SEQ ID NO: 645328 - DNA, 384 bp, Homo sapiens
ccggcagctgcttgacctggccctggaagttgctcttacggccctccagctcaccgatctggcgcatcagcgcctggtaggccgggtggtcgcgagtgaacttgcgatccatctccgcctgctgaagacgcagctgctggatgctggtttccaccgccacttcctgatccagaaggcccttggtctgcagagtcagatccaccgagttggcacgcgtctggtaggcactcggcgccttctgggccgcgtccacctgatttcggacattcggcagctgctccttcacgaaggtcagctgcgccgatgcttcggccgagttgcgctcgacgttcaggcggacgtaggcctgggccacctgctgcaggaagctctgtgcgagggtcg

SEQ ID NO: 645329 - DNA, 465 bp, Homo sapiens
  misc_feature (31)..(31): n is a, c, g, or t
  misc_feature (38)..(38): n is a, c, g, or t
  misc_feature (40)..(40): n is a, c, g, or t
  misc_feature (44)..(44): n is a, c, g, or t
  misc_feature (67)..(67): n is a, c, g, or t
caggcgatgtctgctcaccttgcctgccttnagcaagntncctnttacctgggttccttagcctctnccacctccaggccgtgtctgctaaccctgtctgccgtcagcaagcttcgttttacctggtcccgaacaaaatatgtgtttcaactgctatccagttctggtttcccttgacattgacggcacctgcagaacttaatttcggtgtccagcaagacttatggagcccatactgccagcgagactcagaagccccaccctggagttctgcaaggggctgatgaggaggagggatgaaagcgacagccggaagccaaggcggagggaccaggggtgggaggggaggctgcatctgggcccagaaaaacgtggaaatgcaggaagggaaacaggagggtggtggggctgcccctcggagagaccttctgtgagcattaaagggcattttttaaccaggtgtca

SEQ ID NO: 645330 - DNA, 127 bp, Homo sapiens
tcttacctgcatgctcggctcccaaagtgctgggattactgcgtgagccagtgcgcccggccttctcatcgtacttgggagaagtcaggttcctctttacacacccatgtttccaaatgtgaagtcc

SEQ ID NO: 645331 - DNA, 321 bp, Homo sapiens
ttttagaataaattcccaccttctctggccttttatgcgggttggggtgaaataatagaatgggccccccttcccaagcttttttccccgggggggtggggcctgtttgaaatggggtttgtttaaaggggccattcccgatgccgtttgggggggccgtttttttcccctgaatttctttcgataacccccagggggggggggtttttttttttttgaaaaaaacttccttttcggggggcctttaaagggggcccagggccccccgggggcttaggggtttggtttggttttttttttattaacccctttttggtttta

SEQ ID NO: 645332 - DNA, 455 bp, Homo sapiens
caggatgccttagctgttgtcagtggaaatgggtaacatcctgacacttttcagacctgttgtcatcaatgatctggtcacacacaggcagcaggtacagccatgacttaggcctaatcctggcagctacggctgctaggccacttgtggtgtgtcacacagaggagagtaagagctttcaaaggggctgccagggcctgggagtcagctggtccgcagggctgagggaagagactcctatgctgcactcctgcttctctgcgcgttggtgggtcaggttcgcagcacatgagcagtcaggatcagaacctctaaggtgacactggagtccctgttctcagcggggtatggaaaagatacttcacctgaattagagaaactggtcagagtgaacaccattgatcattctggaacagacctagccactgggctactgacctcactgacaacggact

SEQ ID NO: 645333 - DNA, 702 bp, Homo sapiens
tgtgaccaatgcatccgtgcctgagtctgagataaaatgaaacgcatagaacgccagatagtagtgccaatatagctgcaagtacaaggccaaattcctttatgcctattgctgctgtaactatatatctcagagtcaccacggatgtagacccctgatctggaccacacagtgaagcatctagctaagcaagcaatcaatgcatgaaagcagaaataactctctacgaaagccaccttcttgcggcaccaaagacattatcaatagctgcaagactgctaacagtctcttaactgactattctgcatacgtattcttcagctacgcagacaatatgagtatacgtgactagcttgcatacggactgatcacggcacacacacgaatccgtctacccctacgcaactggcaagtactacgtactggtagctcacacctggcacatacgtatcttactatattactcttacctgactcaatgcacagctccagccccctataacattgtgtaaccaacttacacgcactggaaacaatggcgacacccagcattccctaaacatgccctagcacagaactgttacaatatgatccaacctacaaatgagctacctacaccccccaactcaaccttccctgcaatgtacgctacaccccttcatcaccacaggcttcctactacacccttccactaaagtcacc

SEQ ID NO: 645334 - DNA, 240 bp, Homo sapiens
agagggaactttgtttacagtttatagtttgaaacaaagatgatacagccctttctcaaaacaaacccccttcattcctggggactcggcggcccatggaggactaacaaattagtccaaagattagaaattatggcttaggagtcatgcagctggaggctacaagattctgaccctccccagtattgctcctggggataaaaccactattgttaaacctaagccagtacttgagatatt

SEQ ID NO: 645335 - DNA, 569 bp, Homo sapiens
  misc_feature (1)..(1): n is a, c, g, or t
  misc_feature (65)..(65): n is a, c, g, or t
  misc_feature (113)..(116): n is a, c, g, or t
  misc_feature (122)..(123): n is a, c, g, or t
  misc_feature (143)..(143): n is a, c, g, or t
  misc_feature (166)..(166): n is a, c, g, or t
  misc_feature (169)..(169): n is a, c, g, or t
  misc_feature (172)..(172): n is a, c, g, or t
  misc_feature (184)..(184): n is a, c, g, or t
  misc_feature (187)..(187): n is a, c, g, or t
  misc_feature (200)..(200): n is a, c, g, or t
  misc_feature (209)..(209): n is a, c, g, or t
  misc_feature (224)..(224): n is a, c, g, or t
  misc_feature (234)..(234): n is a, c, g, or t
  misc_feature (237)..(237): n is a, c, g, or t
  misc_feature (243)..(243): n is a, c, g, or t
  misc_feature (252)..(252): n is a, c, g, or t
  misc_feature (254)..(254): n is a, c, g, or t
  misc_feature (257)..(257): n is a, c, g, or t
  misc_feature (269)..(269): n is a, c, g, or t
  misc_feature (275)..(275): n is a, c, g, or t
  misc_feature (284)..(284): n is a, c, g, or t
  misc_feature (292)..(293): n is a, c, g, or t
  misc_feature (295)..(295): n is a, c, g, or t
  misc_feature (302)..(303): n is a, c, g, or t
  misc_feature (311)..(311): n is a, c, g, or t
  misc_feature (316)..(316): n is a, c, g, or t
  misc_feature (320)..(320): n is a, c, g, or t
  misc_feature (325)..(325): n is a, c, g, or t
  misc_feature (347)..(347): n is a, c, g, or t
  misc_feature (361)..(361): n is a, c, g, or t
  misc_feature (364)..(365): n is a, c, g, or t
  misc_feature (403)..(403): n is a, c, g, or t
  misc_feature (406)..(406): n is a, c, g, or t
  misc_feature (417)..(418): n is a, c, g, or t
  misc_feature (433)..(433): n is a, c, g, or t
  misc_feature (443)..(443): n is a, c, g, or t
  misc_feature (481)..(481): n is a, c, g, or t
  misc_feature (500)..(500): n is a, c, g, or t
  misc_feature (527)..(527): n is a, c, g, or t
ngggggtctatcaaacaaaattcatttttgttatattcaagtaactcatatatattcaaatttanaccaaatcaagacaacaatccaatacacagattattatatagctcaannnncaaaanncaacagtcttgtcaatacanactctacataaatacacaaatcncangtnttaatataacangancaaatcacaagtncatgtgttngtgttctttctccanatttctagtnggnaatctngtatatttngnaanggcatatggggngtgtangggcttccnccccatgnnangggggcnngggggggnaaatnaggnggaangggggggttttatatgtaaagnggtacatttcaganagnncccaacatgaagtaaattaacaaacatattgcgagggnggncgctcccaaanntgcttatcatttgcnattgtatacngggaacaaactgcccagatttttttttttttttctttntggggggtattatagtaancaaccttaaaggacaaataacttattngggggggtaaaatagcgggggtcggtgttttttttttaaccc

SEQ ID NO: 645336 - DNA, 302 bp, Homo sapiens
cgagccgctacccatttgcaccccaaaaatatgaggtctcagtaaagtcagaaagtttattttgccaaggttaaggactcacgcctgtgacacaacctcgggaggtccttgacaacatgggcctaaggctggtgagtggacacagcttggtttgatacattttatacgagacatgaaacatcaatcaatatgtgtaagatgtacattgtttcactcttggataggcgcggacacctcctaggtgtagcgttaacgtgcacacaaggggactggtgcttccaggtccttcctgctaatgttgg

SEQ ID NO: 645337 - DNA, 172 bp, Homo sapiens
tagaagtccaaatagcacctagttgagaagtttcaatcagccacatagccctcgctagtaacagccatgctcatccaaacccccggaagcgtcagcggcgcagtcatgctcataatcgcccacggacttacatcctcattactattctgctatggaaacttctaaaactagg

SEQ ID NO: 645338 - DNA, 125 bp, Homo sapiens
actggaatagtgagtgtatcccaaaagtaatccataatgaggtccagtttttccttcatccttggactggttagtcatgaaatcagcaaaattccagatgagctctccaaccagtgtggagagag

SEQ ID NO: 645339 - DNA, 220 bp, Homo sapiens
tctcctctccttaatgctttttatccacttttacacgtagcaatttcatctcattctatggcctttcatgtcgtcttcttctcaaagccttcttggaccaattaatcaacattaatctctttctctctgtattcccctggctcttactttttttctttactttacttgtctttctttttattttttggagacattactcacgacgggagggaactgccca

SEQ ID NO: 645340 - DNA, 179 bp, Homo sapiens
atcccccttctggccgctgggctgagcccctaccccacaccaggcctgtcctcccgggccctcccttggaaacctgtcctgcctgagggcccctctgcccagcttgtggcccagcgtgggctctgccaccactaccttgttcatgtgtccacggtgcgcattctagtgacgggggtacc

SEQ ID NO: 645341 - DNA, 458 bp, Homo sapiens
  misc_feature (202)..(202): n is a, c, g, or t
tataaagtatgacatgtcagaggatgatgagtgattgtgaggtcttactagatacccggttcttccttgtttgcttctttcagaatgctggagatacatgcagtgatccatctaatcaccctcagcactctttctctggtccctgctgatagatttagatttcctttcttttattagggactcagtctgctatctcctttgntggtaccaccactcactcccttgatatcttctactcccttgccttcaccttgcttaagactgagaagggagttagagttggtcactagctctgctgtttcctcactgtgtaccccaccaaagaagattagttcaagtgaaaaagaagctactgtaggtaaactgggagagcaagtgttggatctgggctggtccctttcccataaaattaggtccgtggttgtatgttgccatagcaccccatacttgctctctca

SEQ ID NO: 645342 - DNA, 171 bp, Homo sapiens
ctctggaccttggagcaggcctgccgccttcatgtccactctcctcatcaatcagccccagtatgcgtggctgttgagctgggctccgcgagtaaacgagggcgtgtataatggagctgggagccgggtagaggtattacgacctattgcctgctacacgagccaatagca

SEQ ID NO: 645343 - DNA, 401 bp, Homo sapiens
ccgacgacaagggcgacgcaccaggctgaataaaattaggctgagacctactgggctgcattctcagaacagtggaagcattactaagtcacagtgatgagacaggaggtccgtacaatatacaggtcatgaatactttgccgctcgagcagattgcagtaaagaagccaaccaaatcccaccaaaaccaagttggccacgagagtgacctctggtcgtcctcactgctacactcctgaacagcaccatgacagttttacaaatgccatggcaacatcaggaagttacccgatatgacccaaaagggggaggaatgaataatccaccccttgtttagcaaatgagcaagaaataaccataaaagtgggcaaccagcagctctaggcgctgctcttgtctat

SEQ ID NO: 645344 - DNA, 252 bp, Homo sapiens
caatgcttatgctatttgttcagtcagagggtagagaatgagtgtgaggcgtattataccataggcgcctagtataagagtactgcggctagtactattgacccagcgatgtgggcgttcgagcggggcgttcgatagtcctaagtggagtccgtacaggggtgatcttcactatgacagctattgtgtccgctagtcatattcagtagtaggcccaggagtttgacagttcttgggcttacggggtcagcg

SEQ ID NO: 645345 - DNA, 1424 bp, Homo sapiens
caggcgtgagccaccacacccagtggcaaattccaatttttattttattttattttagctttgagactccaccacaaaaaaaaaaaaaaaaaaaaaaaaaaaaaagtttctttttttctggaaattaagtttttccttttcgaagtggttgtgcgtgggcgaggaattacaggggaactttccttatttcgacgaccaattttcttgcacagtggagataggttttccgcaaaaggtaacgtcgctatatgtggtgttgctccaatttggaggggaagaagaagaagaagacacccttcttcaaattatgtggctcctaatatccctcagaaaagagaggaaaagaagaagagagagaaacattaaaggggcggagtgttcacccccaaagtgtggcctttgagagaacaccacagcacctgttgaaaaacaccgaggcgctctatgaaaggcctgtcgcgctgggcacaataagacgccggtgtggttgagttaacaacatttgtccgacaccccggtgtgatattttacagaccagtcgtggtgagtgtgttcttctcttataagggatctctctcgattttttttcgtgcgtctctttgtgcgacaccacgacacacttttttgtggtgtgaaaaaacccccccttcacaagaggtctgtcctggtgtatctcggtggttaacccgcctctcgtgttgacaccccccagtggtgagttggctcttgtgttgcaagacccccccctgttttgtgtctgtgtgatttcaccccccccattaaagtgtgtgtgactccaaaagatggaaacttgaaatgtagacaccccctctctctagagtgttgtgtggaggatctcccccttttattaaaaaacgtctttgttgtagagcgccctctttatataaagcgcagccaaacatagttgattgggcgccgcaccccttataaaaaaagcgctctggcggctctctttgagcaaaccacggagacggcgttttcgcgaaggaatggctctcccaaagaagcgagaaaaaaacaccccctatcactttcttttataaacccccggggtcgcacgagcaacggcagttttggcgcataagagaggacacccactcgttgcgaaaaaaaactgggggtcaacaacaagagaatatcagggggagggatgcgcccatggaggtgggcaaccacacgctgtatatggccccccagaaatctttgggggccacgtataggtttgggggagaaaattctttttagcactcctcgacaaaactttaaaaacacgtgtgcgctgtgacaacaaactatatatgtgaacagagtctgtgcctcattaaccaaaacaatttatagaacattttatctcccgatggtaatgtatgtgaatacatcaagttgcttgtggtggatccaca

SEQ ID NO: 645346 - DNA, 806 bp, Homo sapiens
  misc_feature (336)..(336): n is a, c, g, or t
agcggggcgggcggagccggggctggagagcggagaccactgcggatctcggaaggaagaaatgatgtaaatcactcatccaaaccttaaggtcaaaggtgagaaggaaggtcaggaagaactatggcctggccaaatgttgttcaaagatgggtctcgtgcatgtcccacgttcagctcatcatcatgttgtatgtgttcgctgcatcagctttcattcagtgtatctcgttgcatccattgcttcacagaagaaacattgagcaaatgtcaacagtcacgtatctactgagcagtggacccgcaagtgacttttaactacgtcagtatgagctngcctgtgggagatctggcagcaggcaaccatgttgttccgccagtgcagagaaagcgagtcttgttcctcgagcacactggaataccagtttatcctcgttctcctgtatgctgtgggccatattcatcaagtggatcgttggcggatcaggttgaagtttgcgaatgggttctagtctattatgggcatgtgcgtcttctgcgataagtgagatgtgagtcttatggaagcgctcacagcaatggctgcgtttctacaacagaatggctgtactgctgccctgtggattagtgaacgagctgctgcagtccacttggttggccctgtgtggttgctgttatgggcaactggttcgggaaagccggacgacgagtagtcgtaggtctctggagtgcctgtgcttcggtgggcaacattggaggagcgtggcctagcattctttctgttcttcagaatggtctatgaataa

SEQ ID NO: 645347 - DNA, 362 bp, Homo sapiens
gccgcgtcgacgccctttcagcccacatgactttggcgcaggcttttactaccagggcccaaacacagtgtccaagaatggcaccaattatactgcatattgctgtatattattttatccagcactgtgaaggccaacctgaactgcctgaaaaatctttgtcatttagtggtttagggtatgtgcaccctccatacaaatgcattaaataaattaaataatggtgtgtgtgtgtgtgtgtgtgtgtgtgtgtgtgtgtgtgtgtccagctaaattgcactgctttcttagatcatttaagcacacttaatctaatggaacatggtaggatttcagcagcttctgaatagaagttggagaga

SEQ ID NO: 645348 - DNA, 217 bp, Homo sapiens
gtcatacccttttgcacagccacactctaccacatgcacaaaaatgtctgcatgacctcttagaatcatccacttggtcccgtgacacattgatgcaccattcatacactcagccacacactggtttgtgtcacagtcacggaagtgcatatacaccacacacacaatacaatcacatatgcaataatacactacacttaaacacaaatacgtagcc

SEQ ID NO: 645349 - DNA, 325 bp, Homo sapiens
  misc_feature (8)..(9): n is a, c, g, or t
  misc_feature (50)..(53): n is a, c, g, or t
  misc_feature (71)..(71): n is a, c, g, or t
  misc_feature (120)..(120): n is a, c, g, or t
  misc_feature (122)..(122): n is a, c, g, or t
  misc_feature (143)..(147): n is a, c, g, or t
  misc_feature (163)..(163): n is a, c, g, or t
  misc_feature (192)..(192): n is a, c, g, or t
  misc_feature (211)..(211): n is a, c, g, or t
  misc_feature (231)..(232): n is a, c, g, or t
  misc_feature (322)..(322): n is a, c, g, or t
ctattatnntctctactgaggaacccaatgtagaacttgcactgatattnnnnttactgcctttatatgantctataggtatctaaatgttaaggcatgtatgatctttgatcatttctntnttcaaattaaagttgtataannnnncaatatcttgccttanattagttgcctattctttctaggattcanatattgtgacatttaaaanagaaaacattcacttttganncttagacttcagatcaaaaaggactgaacccccactatcataatccatacattcatttccatgttgtttgactagcagtgcatatatggntgg

SEQ ID NO: 645350 - DNA, 254 bp, Homo sapiens
agtacatcttaaggacgacacattccctacaccggggttaactcagcctgtgcatagttgagctctgtggctgtgtaatactttgttgtatgaggctgtcctatgactagtaggagtacttagcaacatccctggcctctacccacaaggtgccagagaaccttactgagcgccaagcgtgaagcttgaattaacttattttattatgatgtgcactactgcgttctctcccccaaaccccagaacaagaaaca

SEQ ID NO: 645351 - DNA, 255 bp, Homo sapiens
aagatccgtactgtggtgtaccgtctgtgctcagaagatccaaaatccctggaatttgaatttttaacggaatttggttttaaggaagggtttttaaagacagtgtaagggagagggtcacagggcgcatgatcagcttcttgcacaattctctgactggttgatgatgagggaacagggcaatgtttcaggaacctctgtcatcaatcttccagttccaaccagtctggggtcttcattgctggtggtcagcat

SEQ ID NO: 645352 - DNA, 145 bp, Homo sapiens
ctgccctcacatccctgcagatcttttctggccacactggtggcccgcggggtatggctgcttccgtctcgcggcgttggcctccctgactggccgccggtgtagggcgccgtgggcggggtccctggggcgaggctgcctggcc

SEQ ID NO: 645353 - DNA, 122 bp, Homo sapiens
gtcaattgaaacaggatggaaacacacctttatgtcacccacaggccttgggtggtacacaacctgactagggaggccaggagcgtaaagagagacaggaacccctgggccaaccctttatt

SEQ ID NO: 645354 - DNA, 916 bp, Homo sapiens
agaggatcccggaaagcacactgcaacataaagtaaacctgagcccccacgtcccaatttttttaatagattatgtgatgtggaaagctcattgatttgtatatgtttcagcgtgttacctttctggcttccagttcccaggtgttctttgtttgcctttgataaaatacaggatttaagaacagagagtactgcaaaatgccatgcagactttaaagagaatggcctgtttactaattgctgcccttctgatgtctttatgtatagctctgatagaattttcaccagtctatgtatctctggagtgagatctatgtacaaagtgacatacaattggaaatccatttttgttgtaaagacattgtttttcagacttttcagatcaattagaaaaatgtcattgctttaaaatcatagctgttctgtttaagaggaattgaatttaaaaatgagagagtattaaaactcatgtggcagtatcctggtcttaatcaggtattgcagtgttcaaacaaggtatggacacatcaacatattcaccttttggaaggactagtgacttggttaaaaactaatgagtgttgcgtgtggtgtttctatgcgagcacccattctcaattttttctccggaacagcgttcatggtactgtgtggtgggcagccgcgtgggggcggatctctctctgggtcgccagggggttggggcccccgtataaggataaatgtgtttccctcctttaaaggcgtggtgcccatattagcacccggctgggactaaagcgcgctaatgtgtggaccgaccctctcccgtcgacaatatgcgcttttttgcccgcgtcttgtgcgacacttcgggtatttgcgaccgcatggtcttggggagcagcaggacgggaagcatatctcttcttggagc

SEQ ID NO: 645355 - DNA, 759 bp, Homo sapiens
agcggattgggggagtggaaacggagcagtgacaggtatcccggagggtgctgctgaggcgacgatggccgagagggcccgaggaagcccgaggccacctcccggttgcagggacgactggacggaagagggaccacagagcaccgtcaccattccacatgagaaggacccatcgatacacaaaccgcacagatactcaatgaccaaccgacgatagtacaacactagtgaacagaaagcacagggtacctagtggaaggatacacaaaagaacacaggaaacaacaagaaaatgctagaataaaagaagaacataaatgaatacagagaaagaagaagatagaaaaagaaagaaaaaagaaatgtagagaaaagaggatagatatgtataagaagaaagaaatatgaaagaggaaaagaaagaaaaaaaaagaaaaataaaaaaaaataagaaagaatgaaaagatacgaaaaaaaagcacaggtaaaggtacagaaaaatagagacagaaaagaagagtaaaagtagagtataagaatacctaaaagagttgaaagaacaggataatcgtgatcaacgacacataacaaagaagcaagaatggagaaacaaacaaaaacagagaaacaaaacgaaaaagacaacagaagcgaaaaaacacgaaaagcaacccggataaagagagaaaaataggaacaacatcgtaagaaagatagaagacaaaacacaagaaaagaacaaacgacagagaggaagaa

SEQ ID NO: 645356 - DNA, 123 bp, Homo sapiens
ataccactagtggtcgcatcctactaaatacccaaccagaactccttagaactgtcatgtgtcatcagaaacaagacatgtctaatgatgacaacatgccacagccatagaggcacctcacag

SEQ ID NO: 645357 - DNA, 368 bp, Homo sapiens
aatgtcggtgtgtctaatgtcggtgtgtctaatgtcggtgtgtctaatgtcggtgtgtctaatgtcggtgtgtctaatgtcggtgtgtctaatgtcggtgtgtctaatgtcggtgtgtctaatgtcggtgtgtctaatgtcggtgtgtctgtgtagaaagaagtagacatgggagacttttcattttgttctgtactaagaaaacttctgccttgggatcctgttgatctgtgaccttacccccaaccctgtgctctctgaaacatgtgctgtgtccactcagggttaaacggattaagggcggtgcaagatgtgctttgttaaacagatgcttgaaggcagcatgctcgttaagagtcatcaccact

SEQ ID NO: 645358 - DNA, 1161 bp, Homo sapiens
tacaagtgcagccaccattgagaatgaaagccacagcaaccatcagtgccaagccacagatcactaatcccaaggcagagattactcgatttgtgcccactgcactgagagtacgtcgggagaataaaggggctactgctgctccccaaagaaagtcagaggatgattctgctgtgcctcgttgccaaagcagcacccaaatcttgtccttctgttcctgtctcagtacaaactaaggatgcatgtctatgaggctttcatgacaagcagcatggaagggctcactgtgacagcttttgatgcccagaaacaggcttctgttcacaacagtggccccatggcgaaagaggctcttattaacacttagatgacacgagctgacttccactcgtcagggtatacgactaataaacagttacaaggcatatcctaaaatctagcctatgttcagaattgactgcacataaaacagggtatatcatccagaatagatcagttattgaagcagctgctgctacacatccattcccttacataccaccataacaccctgtatacttccccatcctaccagttactttgagcacatttgctgatcggggggatcttacgttgctaattggacaagactctagtgatgctgatgggcactggacgtacgagatgctcggagaacaaaaaacacagcacaaatcacaatactggccaacaagggaaagaagcatacacgacaagacatacccccgcacaaccacatgaggccacgacacgtagcacacagcacaatggcacacccacgacaatcccctaagctaccaggcagcaacatgcgcgacagccacacccgccaaccacatacgagaaacaaacataagaccaccacggtgcaccaaagccaaccaaaggcacaaaagggaggagaacaaacgacagcaccaaaggctcatacacgccagagcccagcccaacagaagcggagcacaaaaaacagccgggccaacaacaagaaaaatacacaagaagcacacaacacaccgccacaccgacacgaacaacaagcccccccacagaagagaaccaccaagcacgcccccgcgacaccgagacaccaaacacacccacagcactcagtgacacaacgcgacaacgaagaaacgacca

SEQ ID NO: 645359 - DNA, 280 bp, Homo sapiens
aatgtcggtgtgtctaatgtcggtgtgtctaatgtcggtgtgtctaatgtcggtgtgtctaatgtcggtgtgtctaatgtcggtgtgtctaatgtcggtgtgtctaatgtcggtgtgtctaatgtcggtgtgtctaatgtcggtgtgtcttgtatgttcaaactgtcattttatttttacgttgttagatatccggagtagtgtgattgaggtggagtagattagacataggtagaagtagaggttaaggagagtgatggtggctatgatgggacacatc

SEQ ID NO: 645360 - DNA, 232 bp, Homo sapiens
  misc_feature (232)..(232): n is a, c, g, or t
aatgtcggtgtgtctaatgtcggtgtgtctaatgtcggtgtgtctaatgtcggtgtgtctaatgtcggtgtgtctaatgtcggtgtgtctaatgtcggtgtgtctaatgtcggtgtgtctaatgtcggtgtgtctaatgtcggtgtgtcttcagtgcctctgcctgcggagaatgtgacaattactgctggtcagagaattgaccttgctgttctgctggcagacacaccgn

SEQ ID NO: 645361 - DNA, 358 bp, Homo sapiens
  misc_feature (176)..(176): n is a, c, g, or t
  misc_feature (256)..(256): n is a, c, g, or t
aatgtcggtgtgtctaatgtcggtgtgtctaatgtcggtgtgtctaatgtcggtgtgtctaatgtcggtgtgtctaatgtcggtgtgtctaatgtcggtgtgtctaatgtcggtgtgtctaatgtcggtgtgtctaatgtcggtgtgtctaatgtcggtgtgtctaatgtcggtgngtctaatgtcggtgtgtctaatgtcggtgtgtctaatgtcggtgtgtctaatgtcggtgtgtctaatgtcggtgtgtctnatgttgaacgtgtgcccatcatccagaaagagctctccttgagctgtaccctgagggctaagtgcaacaaagagagtgatgggcacacgttcaactatcaga

SEQ ID NO: 645362 - DNA, 290 bp, Homo sapiens
cggtaccctgattgctgcaccgctgcttgaaggtcccagattctaccacacagcagcagttacaaaaaccttccccaggctggacgtggtgggtcacgcctgtaatcccagcactttgggaggccaaggtgggtggatcacttgaggtcaggagttcgagaccagcctggccaacatgatgaaaccccatctctactaaaaatacaaaaaattagccgggcgtggtagcgggcgcctgtagtcccagctactcgggaggctgaggcaggagaatggcgtgaacccgggag

SEQ ID NO: 645363 - DNA, 449 bp, Homo sapiens
tgggaattaaaagttttattgggtgtgttaaatgggttaatttctccaaaaataatttaagggagttggaggggaaatttaaatcggggatggggggataaaaaattaaatggggtaaaggggaggaaaagggaaaaaaaaaaaaaaaaagaggtcccggggaaaattataaaataacagccgagggaggttgtacaaaaacctttcaagaattttaaaatataacaaaagaaagacaaaagcaaaagcggggaagacattcgacttacaagcgttgtcacagctttataaaaagaactctcctgtgtgaggaaacaaaagtggtgtgcacaggcttacaacgggtgctccacagaactatatattcatcgaggaaacagcggtggaaatatttatcttttagatcaaaaaaaaaacatctcccgcggtgtctccctatccgtgtagcc

SEQ ID NO: 645364 - DNA, 151 bp, Homo sapiens
ttagctggtacctgatcgacgcatcaatgagagcgtaacggcttcatcctgcacgcgatctgcgcgttgggcgcctgatcagtcctgttctgcatgttgtggtgaatgtctagatgtctgacctgcatgtgcgatcaatgcttgtgcactg

SEQ ID NO: 645365 - DNA, 293 bp, Homo sapiens
tgaggatcccacgtaccaccctcctctttcctacatcagcatcctggagaagaggtagggaaggaaggtggagacggagacgcccagctttgaagacacccagtgaggaaagagcttgaggatgtggcctagtttagtgggatggtcagggcacagagatccatttgtgcctcctcaccacgagacagggagccttatgcccgaagcgaagaagttgtggcctcgaaaaaagacatgtatttgtaatacgtagtagaactgtatttgtgatacaaggtggtttaattccactg

SEQ ID NO: 645366 - DNA, 235 bp, Homo sapiens
gggaatacttactctacgaaaactgcgaaacttacttgcgatgaactgtattaccttagaggaagaggaagaggtgataaagaggggcaggaatatcaaaggcatatgcagaatggctatctccatattcaaaactggtaactaaaaatatttaaatacatggcacatagggcaccctttgaaggacaaagaacactcttaacccagcagtaggctacattagcactaatatctt

SEQ ID NO: 645367 - DNA, 885 bp, Homo sapiens
ggacccgccaacatgggccgcgttcgcggcaaattgcgtgaagaaggcggcccgggtcatcataagaagtactatatgcgacctgggcaaggattttcatgaaggaacaagcgcggctgtgcggagcgcgatcgccgttatccgcacaggcacaaaagctcccgcagaagagatagctggttcatgtcatgcgatctgcatgaatcgagttccgtgagaggaccagtgagaggtatctcgcatcagagctgcatgagcgaggaagcagagcaacggagagaccaagttatgcttccgtggatgctgtcgaagcttggagtcaggggagactaatgtgagatgtggatctgtgacgagtagggcaaatgctggaagcttgcggacttcgtgcagctctgtccaggcttcaggttgactcagcactagagttgggatgaaatttcaggacgtctgcggggacctggtcggaactggtgtcactgtacgtggcggaagttactgcatcaataaactcgggtgaccacaggaacgagagcccgaagcaacatgaaggggctgtccaggggggggcggaagcagggctggttgtgcctagcctgaagccgagtctggggaccgagctggacagagtaatggatgaaccagtaatgggcctcgtggaggctaccaggaaaggggtccgtaggcgagagggtgaagcggaggtgacagccggacccgcagctgggaatccccgggccctcggcctggcggaatgggacgtcagctcacgggacgggggcgaaggcgggaatgagacacagggaggggacagaaggagcgaaggacgagagcggagaaaggagggagatcaaacgagggggcacaaaccagaaaaagggtaag

SEQ ID NO: 645368 - DNA, 922 bp, Homo sapiens
gatctctggtgttaccttcgttctgcgcggtggttctctgagagcaggcggtaactttctatcattcggtccagcgcttctctcacgtagccataatggtgcagtgcaagccacgcctgattggaagacttccgattggatcatggtacagtgaggccctccttgaggccccagtaactcatctgtattcggcttgtgagcgtatcggccgactaatgattatcactttaaggtgcgatcaactgatgcacacagtgagcacccagttatctttagatgaacggctcattttacgggctggtgcacaaggatgcagttgcacattagttgcaagctataggccaatgaattacgaatgcacgtccaattacagtaacgactggcaatcttttgacacattgtctgtactaggccaatcgggtttcccttggggggctttgagagagtaacacgcagacagtggtcttaatggtctgaagcgtgtaggttcatgggccatgtgcatattaggtggacaagtacttagtatcttgtggaggaagatgcatagtcagaagatgaagaggaggaggactgtgaaagctcttaatgtatatctggaaagcggtctgtccctggaggtgtgtacgcaggttgcactagaaaataggtataacttgctgtctgactgaagattactgacgactgactgactgaccggaggactgatcgatgatccagtgcctgagttgcttgagtgattaccggattaatggacgtgaaccgctcgatggactgaaaagcgcgtccgtggacgcatcttgatacggaacactatcttcgccttcagtgaattggcagacccgtgatagatcagaaaggcgcacacgacttcaatccgagtagtcgacgccacgctcactaagaggctaatccttgacaa

SEQ ID NO: 645369 - DNA, 326 bp, Homo sapiens
ggggccttaggcaatctttccaaagtaaaatcagggccccattgctacttaagccaaatttggacaaacttttttttttttcaattttgtaaacttcctggaaagctgttttcactaaggatcccctagtttctaaaaatgtggttagtagtcatggaaatgacacataaagtacgccaaaagtttgatggaacgtgttaaaaactgttttgggcttttatggatgtcaaacttgacaaaacatgggtaagttactaaaatatgaattgatggtaaaaaaattttacatttgaattccttttggataaagttattttttgatgtga

SEQ ID NO: 645370 - DNA, 120 bp, Homo sapiens
tgtcatgagcatcacacgtggctgtttccacttcttactaaccaccctcctcctttgtgactcgtggaaatgtccggcatatggcatacagattcataaagtggagactcgtgaaaatgt

SEQ ID NO: 645371 - DNA, 351 bp, Homo sapiens
  misc_feature (186)..(186): n is a, c, g, or t
  misc_feature (221)..(221): n is a, c, g, or t
  misc_feature (329)..(329): n is a, c, g, or t
  misc_feature (341)..(341): n is a, c, g, or t
aaccctccacccattgatccagctagcctggaggaattcaagaaaaggatcctggagtctcagcggctccctgtagtcaaccctgctgcccaacccagcggttgaggacccagctgccgcagacgctgggtgccagaatcgccacctgtggatgggggcagcaggtgccacagtgctggacaccgnccgtgcctgccggaagcctccacccccacgccttntctggcaccccttcactgtcccctgcatccccgccattccccagacactggatttaaggcacacacagctgtgagatgactttcacatcgacccctttgtgcagtganccggatggtggnccacccacaa

SEQ ID NO: 645372 - DNA, 270 bp, Homo sapiens
ccattcagtgagggatggaaagaacgatacagagttcaggcaaacgtggatgccgtttgagtagaattgcttgtgcatcctcgttgggggctggcctctgccataagtcaattctattgatgatacttgtgcacttatcagaaatactcctcttctccctcctttctgtcaaaacactttcccctcaaggattcctctgtttttcttgaatggtcctttggacaatagaatgccagcatacacgcaaaaacgcccgcgaatttagtagta

SEQ ID NO: 645373 - DNA, 304 bp, Homo sapiens
ctctcagctgcaagttacctttgaaaacttagtctaaaaaatcatacagcccgtgcccggccaaatcatatacattttaacttacagctcatgcctgtaaccctaccactgtgggaggctgaggcaggtggatcacttaaggtcaggagttcgagactagcctgaccaacatggtgacacctcgtctccactaaaaatacaaaaattagccgggtgtgtagcgcacacctgtaatcccagctacttgggaggctgaggccggagaatcacttgagcccgggaggcagaggttgcagtgagctga

SEQ ID NO: 645374 - DNA, 177 bp, Homo sapiens
  misc_feature (2)..(2): n is a, c, g, or t
  misc_feature (5)..(5): n is a, c, g, or t
  misc_feature (9)..(9): n is a, c, g, or t
  misc_feature (77)..(77): n is a, c, g, or t
  misc_feature (79)..(79): n is a, c, g, or t
  misc_feature (81)..(82): n is a, c, g, or t
  misc_feature (86)..(87): n is a, c, g, or t
  misc_feature (127)..(127): n is a, c, g, or t
  misc_feature (160)..(160): n is a, c, g, or t
  misc_feature (163)..(164): n is a, c, g, or t
  misc_feature (166)..(166): n is a, c, g, or t
  misc_feature (170)..(170): n is a, c, g, or t
anagnaacnataatgtgtcccctgagtagaaggatgctgctatgcgtgagttcatggacacaagttgattacatggntntnngaannataattatggattcttcttatttcatggtaggttgtcttnaaagatataaaaattaggatgcctttatgaagnacnnantatncccaaaa

SEQ ID NO: 645375 - DNA, 320 bp, Homo sapiens
gaccacttccagttttaaaaatatatgattaggccaggtgtggtggctcacacctttatcccagcactttgggaggccgaggcaggcagatcacctgaggtcgggagtttgagaccagcctgaccaacatggagaaaccctgtctctactaaaaatacaaaattaatgtggtggcgcatgcctgtaatcacagctactcaggaggctgaggcaggagaatcacctgaacctgggaggtggaggttgcggtgagctgagatcgcaccattgcactccagcctgggcaacaagagtaaaacgtcgacgcggccgcgaattta

SEQ ID NO: 645376 - DNA, 307 bp, Homo sapiens
ctacagcaacatattacaggaatctcagcaaatgccttggaagacttattccagaaaaacagatactcaatgaaccaattaaaacaagttcagcagaacagttttgcacagagattcacttgttacacttaaaagagccttagaagcaaaagaaacctagctcggcagcacctacgaagaccaactggatgaagtggagaagaaactagattcaaaacttacagggagattgataattttccaaattaatcaagctgaaggaactaggaatacacattagcacaaccttccagaaggcaaaagttcc

SEQ ID NO: 645377 - DNA, 231 bp, Homo sapiens
  misc_feature (4)..(4): n is a, c, g, or t
  misc_feature (7)..(7): n is a, c, g, or t
  misc_feature (213)..(213): n is a, c, g, or t
  misc_feature (216)..(216): n is a, c, g, or t
tttnttntttttttgtatcagctttatttccattggtccaaggctgttaggatagttaaggctgcctattggctggagggagaggctaggcagaagccctatactttgcaagggcccttcagaatcgcgggctcagaaggctcttaatcgtgctgagagtgagccttcgaagagatactcgcccagcccagcctccgggccccagccgtggangtngtcagtggtcacccc

SEQ ID NO: 645378 - DNA, 250 bp, Homo sapiens
ccccaataggaatccaactatatgctgtctacaatagatccactgtagatcttaagacacaaataggctgaaagtacaaaaaaaaaaaaaaaaaaaaaaaaacccaaagggtgggttttaggggcccacccttgttttcccaacgggtttccttttaaaaaaaactggaaaatcccttaaatttatacacccttctcaggacattgagaaacattaaaacactctgggcctgggcccctaggggctctca

SEQ ID NO: 645379 - DNA, 1720 bp, Homo sapiens
  misc_feature (271)..(271): n is a, c, g, or t
  misc_feature (1371)..(1371): n is a, c, g, or t
cgttgcggtcttcctccatcaggatggtgggttgcacttctcgtcggttggtgttgtggtggttgcgccggccccgcgctgggtgttcgtcaagatcgcgggaggtgtgtgtcggtcccgccgaggctctctgtgtgtggtgtgtgtatggaatgctgtgcagcgaggccttcttgtccagatggtgtgcgccagcgttcgctatctaagggcgtttgaggcgccccgccgcctggcgtgcacaatccgctagccgtgtgcaaccgaaagncgttgtgtgctctgtgaatatgccgacgggggttgttccgcgtctggccctttgttgtggcgatttgatggaggtagtctcgcgcttgtggtcccccatgttgggggtcctttgggagaaacacatatatagtggtgcgctgctttagatggagtagtggctctggtcttgttgggcggacccgctttttgtagtggtcgttgcgccggtggcgtccatcctagaccgctgggtcggtatgtccccccgtggcgcactaggagtgtccttggcaaaggggactccctcgtgaaagggagcgggaagtatccagggcctacgcccccgtttctaccacgggaattatgggagtccgccgtcctgtcgtcggtgccgtggtgcaccgtggcacactttgggcgaccacaggcggtctaatgccgccacacgtgcgccccccgttagaaattggccgcggtgtttcttattggcgctttggatggggagattataagggcgcttttataggggacctttgtcccccctggagggccccttcttttgcgacaccccggtgctctggtcgttgtctctttggagggggcccatagccctccccagggggacccacctttttgggcgccagagttctgcgcccacggggtcttccccagggcgctcgccaattttgaaggggttctcggtgccccttggtgcgcacacaaggcgcccacggtgcgcttaagcaccaccgtgtcgtgagagacccacggagtttttttcccaacacatgcgcgtgcacattgcacacaaatctggggcgccccacgataaatattgttttccgtttgtgtgggcatgtcttttggtggtctaatggtttagggggtcgcctctcacgccagcgcatcccctgtgtgcctcgtctgcgcccacatgtggcgacacactctcaggaagaccacagtctctctctccaggagtttggtgcacacacaccccacacagacatagtctgtctcccagaacaccttgcgccacaagtggtgtattctgtgttgggggcgacaaaatgtgcccgctccacacttgtagaacacccacctgggtctgtgagactnagaaccctgccacgtgtgtccccaggtcaccagatgagacccaccctataataacacacgagtggcgtaaacattctaaatcttacagatttaatattaagaatctaaaacgactccagtttttccagtccaccatatagtccagatccaagatgttccagcaccagcccacacatagaaggggcaccactgccagctcaccaggataatagcccatcctaggccagaaaacttctgttgcgttggcaccacctttctctatactgactcttatttctcccgggagcatccccagcccacccttaattcacccacgatacccttttcctaaacaaaaataaaaaaaaac

SEQ ID NO: 645380 - DNA, 630 bp, Homo sapiens
  misc_feature (38)..(38): n is a, c, g, or t
  misc_feature (238)..(238): n is a, c, g, or t
  misc_feature (301)..(301): n is a, c, g, or t
  misc_feature (334)..(334): n is a, c, g, or t
  misc_feature (337)..(337): n is a, c, g, or t
  misc_feature (350)..(350): n is a, c, g, or t
  misc_feature (398)..(398): n is a, c, g, or t
  misc_feature (420)..(421): n is a, c, g, or t
  misc_feature (437)..(437): n is a, c, g, or t
  misc_feature (460)..(462): n is a, c, g, or t
  misc_feature (477)..(477): n is a, c, g, or t
  misc_feature (481)..(481): n is a, c, g, or t
  misc_feature (484)..(484): n is a, c, g, or t
  misc_feature (533)..(533): n is a, c, g, or t
  misc_feature (587)..(587): n is a, c, g, or t
aactttaagaactctggatgaatacatggtggcaacantccatgacacctgaaaacatcatttgtggagtggcgtagagttcagtgttcgcagtcgcatattacaaccatgtttcacacagccctgctcggtttgattttctccacgtggttgataattgtcttcagttgctgctaagtgattttgcaaatttcatttataatcctcgccctacaattacctaagtactgtttctgcnggttaacctgtatgctacgctcagtcatatacctttcaaagttactaatgcaactgccaaagngggacagtgtcaatatcattgtcttcattaganggncggctgccccccnctgtgagaacactgctgttcctaacagtagtttagagggatgtgaganttagtttgaccttaattcccgnngtgcatgcctcaaaanccaaatcccattctccttccttnnncggagcacttttggnggcnccngggctggtgtggggtggtggggggggcgctgggcttagggtcacaaccnggtgtgactgctctggtcttcgctggctgtgtgacttgggcaagcggcttgcgntctctgagcctctgagatccctgatggacgaggagaacaatga

SEQ ID NO: 645381 - DNA, 228 bp, Homo sapiens
cccaattaatttttgtatttttagtagagactgggtaacatgacaagatgccattctacaaaaaaatagaaaaattggccaggtagggtggtagtcccacgcctgtggtcccagcaactcaggaggctggccctgggaggactgcttgagcccaggatgtccagactgcagtgagccgtgattgcaccattgccctccagcctgggtgacagaaccagaaccggtttc

SEQ ID NO: 645382 - DNA, 130 bp, Homo sapiens
atccccgcgcgttgttgtttcagaatgtgcgatgtggcaggttatggttggtttcgatggggcccttcagggccacgcggttccggcggatggccatgatggcattgcgaatgtcctcttcaccggccat

SEQ ID NO: 645383 - DNA, 448 bp, Homo sapiens
cacaatcgaatattctcattagtcagatgatttactgctcttgtgcagatgacagaaaaagaacatggcgatagggtaatatttggtaaaaatttagcatcttcatttgacatgcatgatttggaccactttgacgaactgccaataaatggtgaaactcagaaaactataagcctagattatatgaagtttctgaatgaacatctccaggaggcttgcaacccagaactcaagcctgtggaaaaaacaaatggctcctttttgtggtgtgaaagttgaaaagtacctaaattcaactttgaaggacatgactgaagtgccaagagtagaagatctttgctgtactttatatgatatgcttgcttctattaacagtggtgatgaacttcaggatgaggtatagtcgacatgattcatcactaatattaatgttgaactatcctaatga

SEQ ID NO: 645384 - DNA, 138 bp, Homo sapiens
tcccctttagagaccctctcttaccctcgttctgggaccatctccttctctccatgcgctgcgttttgcacctgatgaggaccccatccgcggctctcagaggcttcctcctccctcgcgaggtcctccaggagtgca

SEQ ID NO: 645385 - DNA, 99 bp, Homo sapiens
tcttctgagattgtagcagattattccatcagtatgagcaggagtgaggtggaagtacatgagatgttaagtcaatatttaataaatggatgaccagtt

SEQ ID NO: 645386 - DNA, 348 bp, Homo sapiens
  misc_feature (342)..(342): n is a, c, g, or t
ccaccacttgagcagctagagggacctctttaaaacatccactggtcaggccgggcacgtggctcatgcctataaccccagcactttgggaggccgaggcgggtgcatcacctgatgtcaggagttcgagaccaccctggtcacatggtgaaaccccatctctactaaaaatccaaaagctagctgggcatagtggtgcatgcctattagtcccagctacttggggaggctgaggcagggagaatcgctttgaacctgggggaggtgggaggtttgcagttgagccgagatttgttgccacttgcgcttcccagcctggggttgacagagttgagattcttnatttca

SEQ ID NO: 645387 - DNA, 240 bp, Homo sapiens
tgcccatcccccttcgacaaacctgcccgttatccatcctgtttgaccacgctatgctacaagcccatcgcgcgcaccagctggccattgactcctaccaggagtttgttgattcctatttccctttggtcctgttgttttctttcctgcttgtctccctttccttcttctgcttctctgtctcttttccgtctccctccttcttgtttgtttcgcttctgttttcctttcttgtgctgc

SEQ ID NO: 645388 - DNA, 556 bp, Homo sapiens
ggggtgggcgggctgtcccagggctcaccgccattcatgaaggggtggagcctgcctgcctgcgggcctttataagagccactggctggctttccgggcaggcctcctggcagcacctgctgcagtgaacaggccggctgaggtgcacgggagcccgccggcctctctctgcccgtgtccgtccgtgaaattccagacagggctgcccgcgatggccctcccgaaaccttcagacggcaccctccccgcggaagtccagggacggggacagcgaaggagactcgtttggaccccgagccaaagcaaggccctacaagcctgctttgagcggaacccgtacccgggcatcaccaccagagaacggctggcccaggccatcggcattccggagcccagggtccagattctgtttcagaatgagaggtcatgccagctgaggcagcactggcattaatctcagtcctggcctgggagatgcggcccacaagaaggcaggtgaaagcggaccaccgtcaccggatcccagaccgccctgcccctccgagcctttgagtag

SEQ ID NO: 645389 - DNA, 804 bp, Homo sapiens
  misc_feature (59)..(59): n is a, c, g, or t
  misc_feature (203)..(203): n is a, c, g, or t
  misc_feature (774)..(774): n is a, c, g, or t
tgaagaagtgggatatcctgaagaagccccttatgatgccatggatgtgggagctacancccctgttgtaccccaggcgctaatagatcagttaaagcccggaggaagattgatattgcctgttggtcctgcacgcggaaaccaaatgttggagcattatgacaagctacaagatggcagcatcaaaatgaagccttctgatnggggtgatatacgtgcctttaacaaataaagaaaagcagtggtccagggatgaattgtaaaagaaacatcaccttgaccaatataaaattacagtggattgctcatctcagtcctcaaagctttttgaaaaccaacaccatcacagcttgttttggactttgttacactgttattttcaacatgaaaatgtgtgtttttttaaggtttctgattcttcaaagaggcgcaaagccaaatttgtaaaggaaagattcaaagtttaaatttgttgaatattactttaacattcccatattttactttgaaatattaaaaaaaagggttctgtaaaattaaaacttaatttgtgaattgatcttaaagagtgggttttctttttttaacccttaatcctgttctaaaattaataataaaatggctttatacattgaataaccccacatttacaagttaaaatccttggattttgaatatttttaaaaaccttccaaaaaaataaaaattaacttttttttttaaagcttttggacctggcgtgactaaaaataatagatgagaaaaacatataangatcctttggaacctcaacaactagcactt

SEQ ID NO: 645390 - DNA, 301 bp, Homo sapiens
ctcatctgctcccttccctgcgacactatgcaagacgttgtaccgcagctggtgatatgctgtcaggacaatgccactgaggagcgcagcatccttgctcttacttgcgcgaacgacctgctgactggcttccgacaaccgaacatgtctgctccatgcaacggagatagtgcactcctacctccctgtcatcctggacatcacttaaacgcgagaacatgagccgtcctgggcaggtgtgctctgctctcaacctctgcgagtctctccagaagcacctagcagatgaggctggtggtgt

SEQ ID NO: 645391 - DNA, 924 bp, Homo sapiens
cttaccataatcatagcgcaactaatacctaatatattactgttccacactatttacctatttatatgttccaaccattcagttactcgcgccaatttttattcctcttacgttaaatcccgataaggtccccctcaccgatactctgtccaaatttcatagtctctcccaaatctttccggataccacacttttatttcctattcatgcacctttccgagttacatattcttcgtcccgaataattcccgccccgggaaaaggtattctctgggcgcccatacacgtaaagttattatcgggggcaccttctccggctgaccgcaaaaggttatatatcgtgtcgcttatagtccgtagtgccatgggctgcgtataattaatggggggtgggaaaacgccccccctcttccctgggtgcccgacagccgtatcatggtctcctattcaatgacgaaacagatccgtgtgttgactctactaatgggtacaccgcacggctttttctatatctcatattgaggtgcgacactatcgcttggttgtcggtgtgatacaagcgctttatgttaccccgggaggggagcaccttgtgacgtcacaaggagcgcacgactgtctccttccccctacccacgtgtttctctcggcgcatgtaactccggaagtttcccttgctacagtctttctgatttgtgaagaatgcccactggaccttctctcccggtgtatcgtcgccgcggcccccccccagggcggggtgcctcccccaggcacttcctcgctaactgcgcactcgcagagttgacgccttctggtaccaggcggatcaccccccttcttcccgtcctcccgtttcccttgactcccttgtgcccccccggccccgatcaagggcggtccccccccaacccacaatacaac

SEQ ID NO: 645392 - DNA, 384 bp, Homo sapiens
ttggattttagcacttttatttaattgtgctccttaaatttggcaatgagcaagtaatttagcccccatatgttggccgccctaaacccaatttaatgcctaatattgattaactagtgtattccttatcaatctcacccctcatgcctgtaattctagtactttgggaggccaaggcaggaggattgcttgagccccaggagaccagactgggcaacatagcgagaccatttctacaaaaaaatcatttaaaaaaattagccagtcatagtggcacgcactcgtagtcccaattacccaggaggctgaggtgggaggaacgcttcagctcaggagatcaaggctgttacattctagcctgagcaacagagtgaaactgtctca

SEQ ID NO: 645393 - DNA, 110 bp, Homo sapiens
tcgactcttaggatcccctgatcttccgtgccctgacctcggtggtgttcattatccttcttgagtgttcacggaagatcagggcacgggaagatcatggcacgtaagat

SEQ ID NO: 645394 - DNA, 817 bp, Homo sapiens
attaatcccctggcccaacccgtcatctactctaccatctttgcaggcacactcatcacagcgctaagctcgcactgattgtttacctgagtaggcctagaaataaacatgctagcttgtatgccagttctaaccaaaaaaataaaccctcgttccagcaggaagctgccatcgaagtatttcctcacgcaagtaaccggctatccagtaatccttctaatagctatccgtcttcaacaatatactcgtccgggacaatgaaccataaccgaatactaccgaatcagttactcatcagttgaataatcatagatggctatagcaatataactaggaatagcccccttgcacttctggagtcccagaggttgacccaaggcacccctctgacatccggcctgcttcttctcacagtgacaaaatagtagcccccatctcaatcatataccagatctctccctcactaaacgtaagccttctccgtcactctctcaatcttgatccagtcatagcaggcagttgaggtggattagaccaaacccaggctacgcaagaagtcttagcatgactcctcaatgtacccgacataggatgaataatagcagttctaccgtacaggcctaacataagcattcttaatttaacctatttgtttatatcctaactaatacgtgtcctactaactcaattaactccagcaccaagacctatatatctcgcaactgaacaggtagatgataaaacccttattcatccacctcttctcctaggggcggcccgtaacggttttgccaaggctttgggaatccaaaaatgc

SEQ ID NO: 645395 - DNA, 1791 bp, Homo sapiens
gccgagctgagtaacattatggaaggcaatatcactctcgtggcactctcctgctatctcctgtcagacacgactcatctgggaatgcatcgcagcacttcgcagtctccagctgcgctctgcgagccacgtgacgtgaaatccattcgctggagtcatcgcaaacgaggcttagtaccgtagccgccatggaccgtatcgtcattgccagacgttgtcaaacgcctggcacgtgtataacaatcaaaatcagtgcgcggtagtcttgtcggaagtgcagtacactgtataatgggtctagtatgtcaatctcgggtgaggcatttcaatggcacaaacatgttgccacagtcaaaatgaatacgtgtagagtgctcgacgcatttgtaccccttatggagccattcagtgaggctgatgggcgcattactaagtatatccgaggaatacgaatttaatcttgcgtaactactatgacaagacatgggaattgcaatccgcgacatattttcagtacccttccccttggaaccttgtgggaacaacgtaaataaaggtacattcaagtcaacaaacagtcatgtgcaaaagcatccgtcatgcggagatttgaacacaaacagtattccattcacgtggatgtaggtctcccccatgactaaagatcatccataaaaacgtcaaaaggtaaatctacattaaacaattcccctaatgaaaacggtctcgagaggagccattgcagcaccttatgtctttgccagagctaggactattcgtggaagagaacgtgtggtcctccatccttccaggtggtaacgtgacccgcaaggtaacattataaggcgcctgcgacaatcggtatattccctttcaaacacttcttatttaggagcgtaacgaatacgtttgtacattacttctacaacaggacatctctggacacatgctccctcaaaggcatagttcattggttcacaataccctctcttagtttccctatggcaaactttactaatcgaagaggaaagcagaatcacaactcggaacctgatagtaagtgctgcgcaacacgcgatcttccgaaatcatagatcctaaccatatgtcggagttcctttagctagttggcatattgacagataattggggcatcacgggtttgtgaacattgacgcatattctagttagcgtacctacgtctatatatgtgacaccactaagtacggatagtacttggctgtgaccacaagagaagcagtcgctattagggacaagaaaacctaggcacagtatgagagtgtgcgcagaagacgccagaggtccacccatttaccaagtgatcgggttgcacacaacattgtcgaaaagacacgaggaattgaagtagtattccccatcttttgtgtccacttcggtatagtttcatcccgaaattcgtggaccatgtattaggccacaccataagagggagagtcgttttgctgtttacacttaaggtataggaaaatacaagtcacgttccaattggtagaaaaaatgaaaatcagcgaagtgacatactgttggtaattcaccacaaaaggaagagaggattaatattaattgcagggccacgttagtggccacatgcaaattgatatggcaatcgctatacgagagagtacatgtgtgattttaaacaggtgattgtgggaagaaaacaaacaggaaagttccctgattgacagtcatgatgacccagaaagtaggggataataacaatgccacaaccatatctcaagtacaaga

SEQ ID NO: 645396 - DNA, 743 bp, Homo sapiens
  misc_feature (7)..(7): n is a, c, g, or t
  misc_feature (85)..(85): n is a, c, g, or t
  misc_feature (87)..(87): n is a, c, g, or t
  misc_feature (93)..(93): n is a, c, g, or t
  misc_feature (103)..(104): n is a, c, g, or t
  misc_feature (178)..(178): n is a, c, g, or t
  misc_feature (180)..(180): n is a, c, g, or t
  misc_feature (185)..(185): n is a, c, g, or t
  misc_feature (306)..(306): n is a, c, g, or t
  misc_feature (335)..(335): n is a, c, g, or t
  misc_feature (340)..(340): n is a, c, g, or t
  misc_feature (345)..(346): n is a, c, g, or t
  misc_feature (348)..(348): n is a, c, g, or t
  misc_feature (414)..(414): n is a, c, g, or t
  misc_feature (432)..(432): n is a, c, g, or t
  misc_feature (487)..(487): n is a, c, g, or t
  misc_feature (535)..(535): n is a, c, g, or t
  misc_feature (547)..(547): n is a, c, g, or t
  misc_feature (550)..(550): n is a, c, g, or t
  misc_feature (574)..(574): n is a, c, g, or t
  misc_feature (576)..(576): n is a, c, g, or t
  misc_feature (641)..(641): n is a, c, g, or t
  misc_feature (674)..(674): n is a, c, g, or t
  misc_feature (707)..(707): n is a, c, g, or t
cccaggnctcaatctggcttcggaatcgctgcaggaagcggtcagggtgccagcggacctgctggaccctcaagtacctcctcanancccccngttcctccannggggggcccctggccaccagggctgcagcaatggcctctgggtcccctcccccagggcagggccagggcacaanancaaancgccagacgctgcccctccccgctcctctggggtgctcttccctgggcccggccctggttggcttgggttctcggtcccctaaagcctcctgcgcccccctggctcggctctaacgcagcncttcctccttggcccgggctcgctccctnaaganccgcnncncctcctcctgctgtagccagcactggctggagccctcaacacgtgggggtagacaggatccctctncttctcgctgctgctgcnggaacttctgggcatgttcccgggccaggtgatctgaccaggctgagaaggactnaggttcctgggtttcatgggaggtatcaccttcaaacctccccatganttcctgccactngtnctccagctcaccctggagcttctntnttcatttccgctccttgggaggcatcatcttcttcctcctcttcagcagattcccagggggggtncccagcccaaaatttggccaggggtctccccancctttattctttattcccatggcagagggacancggcttagcagctggaggtagatatcggtgtgggat

SEQ ID NO: 645397 - DNA, 157 bp, Homo sapiens
tgagcggcatgggggtacccaatctgaagtcatgtacatgaactaatctacaagcgtggttatggcaaaatcaataagaagcgaatgcttgacagataacgcttgactgctcgatctcttggtacatacggcatcatctgcatggactctgctgggg

SEQ ID NO: 645398 - DNA, 111 bp, Homo sapiens
tacttccacagggtgtgtcgatatggtgtccactggactctgttccactataggtaaacacttccttcatgaagttaattatgtggaactactacaggtacttctactttt

SEQ ID NO: 645399 - DNA, 430 bp, Homo sapiens
  misc_feature (317)..(317): n is a, c, g, or t
aatggtaagataactgtataaactatctgagctgtgaaaagaagtcactgtcggccaggtgcaatgacttaacgcctgtaatcccagcactttgtggggctgaggcaggcagatcaattgagctcaagagtttgagaccagcctggacaacatggcaaaacccagtctctaaaaaaaaaaaacaaaaaaccaggcatggtggtgtgcacctgtggtctcagctactcgcgatgctgaggggggagaattgatttagcttgggaggtcaaggctgcattgcacttcagtctgggcaacagagtgagactctgtctcanaaaaacagaaaaccagaccaaccttccccttcaaaactttagtaccttgggattatatgtagccttggaatatttatcctggtgttggccaacattgaaccggatagcttgcc

SEQ ID NO: 645400 - DNA, 137 bp, Homo sapiens
acgagtgcgacaatcgccgatcttcacgcgtgaagatcggcgacttcggctttcggcgtgtgcagtctggagactcggcgtgtacatgcacacgccgaacgaccagactgagcaaaccgtagtcgccgatcttcacg

SEQ ID NO: 645401 - DNA, 1613 bp, Homo sapiens
ggctgccggcagccgagtcgcacggtagttgaggtttgcgcgccgctgccggttagataagtcgatgtgcgccgcgggtgtgtggggcggccccgcaccgtgatgggtgtgctgcccggcagcgacgggggtgtgctgcagacgggacgaggcagccagagcaacgggggtgccacacacgccggtcgtagcgcggagtgggggggtataaataacacaagggggggtgggaacaccgcgccgaagaacaagccgctacgaggacggtgtgtgtgaagaatgtcgttcctccgccttagaagcgcgacactgttggggggggggaaaaaatatcccgctggggaaagatggtgggagacgatgtagggggggacgacatgtttcctcgccgcacataatccgctcgcaagacagaaggtgaagagaagtatggggggtgccaaaaaagagaagggggagagtgggggcgaagaggtcgctccgcagagagggggacccaacgagaggggggagaggggggggttgtaaagacgaggtggggtagcgcgaggccgtgaagtggcgccccgacgaggggagggtgtccacagccgaggacggggggggggcggcgccggtgtgagaaagagtgtgcgccgcgccgcggggtgggaccccacgcacgcaaggagtggtgccacgcggcctgggggagagaaaaaatattcgccgagagagggagatggaggcccgccgcgactgttttgttgccgcggcaagagacccagcgccctgctgtggaagaagagccacttccccccccgcggcgttgtagaggggcagaaaatagtcgctctcttctgtataaggaggggggagaggacccactactgtgtgggagaaaaatagctgggagaaagatgttgggggcccgcggggcacacgcggggtgtttacaaagcgccccgcggtaatgatccccgcgcgcccctctctggggggagagagctcaaggagggggggggcacgagatagcacccccctctagaggtctcacgcgggaggtttccaagaagatatagagcgctcggccacaacacgggggggagaagacccccactcttgtattcttgaagagaaatcccaccactctatagccgcgcggcgctcggtgtggcgcgcggcggggttaatatgtgagagatgtccccgcgctgatagctctccgcgagagggctcgagaggcccgcgagagagaatccgccttgagaacctgggagaaatgaaagggttgcacacggagagcccgcggagtatgcgcgcgcacacttgcgcgcgctccacccacacagagagcgcggaaaccccacactctctccacaaaaaaaaaaaaacaaaaaaaaatctgaataagttggttatattataccctcttatagccacccctaaatggtttccacgaagtggaggggggaaaacttttataaaattgctcacattcctggaaacttcacgtcacatttgaatgtggttttaaaattatgcctaaatccgtacctatatgtacgtattatctttggccatcttttttccctgccccccttttgaaaccataaagagtatagtattttcca

SEQ ID NO: 645402 - DNA, 190 bp, Homo sapiens
  misc_feature (145)..(145): n is a, c, g, or t
  misc_feature (172)..(172): n is a, c, g, or t
  misc_feature (180)..(180): n is a, c, g, or t
agagattactcgtgggcagggcttgtccctaggggggccctgtcattcaatggttaaccccgtggtcccagggtttactctgtggttcctgggggtttattccatggttcctggcggtttactccatgttcctgggggtttactntgtggcctggggggtttactccatggncctggggngtttactccg

SEQ ID NO: 645403 - DNA, 307 bp, Homo sapiens
agttagcgctcgcccctgagttagcagctcgcccctgagttcgtgaagtgcgtgtagatctccttggtgtctttgcgcttattcaggtcctcaaagttactgttgtttttgcttgctgatgttgtgaagaacctgctgattctctcctccttggagttgttcttcttctcttctgggctgctaatctgctcctcgggcgcgttgttctccacgtgatgactcctcgctccgctgctcctcctgaagcagctcgcccctcatttgtggatccatcttcagtagacctgctggcgtccataggcttgtt

SEQ ID NO: 645404 - DNA, 740 bp, Homo sapiens
cgaaaaaaaaaaaaaaaaaaaaaaaaaaaaaaaaaaaaaaaaaaaaaaaaaaaaaaaaaaaaaaaagggggaggagaagaaaaaaaaaaaaaaaaaaaggaggagacaagaaaataaagagacgaggaacgcagaggatggaagaggggaaaaggggggccccaaaaggggggccgcttattatataaaagagagaagaagggggcatgaggaataaaaagaggagaagaggggaaaagagcgggcacacagtgggagtaatatttgtggtgtgaaggagcagccctcattatattgtgtgggaggagagggagaaagataagggtgtggagaaaatatctccaatgacgaagagaatatattataagagggtctattgtagggagatatttatataaaaatatctaagaagcaggggatcaaaagggggggagagaaaacacaagaggcggaatgcggaggcgcgaggagaggcggaaggaagaaaaggtgagggaaaaaaagggaggagcgagaggaaaaatagagaggaaagaatatattttaaacacaagggtgggtgtagtgtttatgttggtattaaaaaaataataagatgagtgtaatgaatgatgagtatagtcgaagagagagatagtgagaatgtaggatagtaggtgtgagaagagagagaaaaaaaggaggcacgtagaacttgagtaaatatatatggtgaaataaatcgtgttagaaagagagag

SEQ ID NO: 645405 - DNA, 741 bp, Homo sapiens
gaggaccattcttgattctacataatcaacactattatcacacccaagaatattaacaggaatttagtaatattatttaatatatgattcacaactggagaaatccaattatgaatcatatattaaataatattactaaattcctgttaatattatttaatatatgattcataattggatttctccagttgtctgtagccgtctttttgtattttgtttttccagttcaggattaatttttcatttggttaaatctgtagttttttcaaatttgaaagagtacctcattcatgttttttgttttctataacactaatttaacttttcatgttgcagtaatttcagatttacagaatagttacaaagatagtataaatcactcttatgtacgctttacccagcttcctcaaatattaacatgttatagaactgtaccacagttaacaaaagtagacagttaatactggtatgttattactaactaatctgtagaccttactcaaatgctgtcacttttctcacaagtgtcctttttctggttcaagacagttgaggcctccacgttgcatttagttggtgtgtctcctttgtctcttgtatttaatcagtgtataaatttgtatttaatcatcttgacaatttagaagagtgccagtctgtaattatgtggaatgtcttttatttttgagtttgcctaatgtttcctcatgaataaattaagattattcatttttggcaaga

SEQ ID NO: 645406 - DNA, 895 bp, Homo sapiens
  misc_feature (291)..(291): n is a, c, g, or t
ggctttgcggtgtcgtcaagcgcgggttgggccggcgggcgggggctgaggggctgccatggggcgggggccggtcccgagctcctgggccctcttctcgccgctcctcgcagggcctgtgcactactgggagtcgggccggtcccagcgcgggcgctgcacaagtcacggcgagctcttttgggggccgaggcctggggcaaccctgtgcggctttcggggacctcaattccgaaagcagaggatcttcttcgtgctgcgggaaaagaaatgactttaatcgtctttttnggagaccagaatgcaccctatttgaaaaccccaaaagtaaggtatctttcaaggaatcacagtgctggatcacaagtgtagtccctggggattatgatggagattctcaaatggatgtccttctgacatatcttcccaaaatttatggccaagagtgattaggagctgtatcttctggggacaaaatcaaacattagatcctaacaagtatgaccatactcaataggactttcaaggatgagccactaatttatggactttcaatggtgatctaattcctgaatatttcggtatcacaaattgatccaaccagcacagatactataggcggaatttatcagtgtcttcacagcttgcccacttacaagtaaaatgcgaattcacattctcatgcattttgatcttggtgagattaacagcgattattcctgccgaattgatggcgcatagtccttccgtggactgggagatggcgacttctggcgccattggaacccaaatgtgtgtgggcgcttgggtcgttcggcgccccgcctttgcggggaaagcacgcgccacggggggagggccaaaaagacggcggggccgccaccggaggcggacc

SEQ ID NO: 645407 - DNA, 91 bp, Homo sapiens
tattattggagatgatttattcggagccaaacattagtgaccctgacctgttgacacagcctcggggttcccaggaactcggtcagaggtg

SEQ ID NO: 645408 - DNA, 862 bp, Homo sapiens
ctttgtgtgttggggggggatcgtgttgtctactcggccccggactcatcatgcatgcgactgtcagcgttccgccttttctgttagcgcctggcattcgccggacgcctttattgtacccccctgtctcttcgggccttttccctcttttgctctcgtccttccatggggtccttcccgccgtactgttcttcatattggccttctacccagccgtgaccgataccagatggccgatgtacccgggagcacttcccaaggccccccacacaccaccggtccgaaaaggccttcgataacgggataatcctatttagttacctcagaaggtttttttcttcgccggatttttctgagccgttttacccctcccgcctatgcccctacccccccattaggagggcactggccccccacaggcatcaccccgcttaatcccctagaagtcccactcctgaacagcatccgtattactcgcatcacggagtatccatcaccctgaggctcaccatagtctaatagaaaaccaccgagaacccaataattcagcacctgcttattacacattttactgggtctctattttaccctcctaccagcctcacgagtacttcgagtctcccttcaccactttccgacggcatttacggctcaacacttttttgtaagccacccaggcttccaccggagcttcacgtcacttaattggctcaactttcctcactatctgcttcatccccccactaatatttcactttacatcccaacatccctttggcttcgaagcccccgccctgatactggccttttgtagatgtggtctgactatttctgtatgtctccctctattgatgagggtcct

SEQ ID NO: 645409 - DNA, 447 bp, Homo sapiens
  misc_feature (24)..(24): n is a, c, g, or t
  misc_feature (41)..(41): n is a, c, g, or t
  misc_feature (72)..(72): n is a, c, g, or t
  misc_feature (76)..(76): n is a, c, g, or t
  misc_feature (89)..(89): n is a, c, g, or t
  misc_feature (186)..(186): n is a, c, g, or t
  misc_feature (194)..(194): n is a, c, g, or t
  misc_feature (230)..(230): n is a, c, g, or t
  misc_feature (235)..(235): n is a, c, g, or t
  misc_feature (245)..(245): n is a, c, g, or t
  misc_feature (247)..(248): n is a, c, g, or t
  misc_feature (277)..(277): n is a, c, g, or t
  misc_feature (290)..(290): n is a, c, g, or t
  misc_feature (293)..(293): n is a, c, g, or t
  misc_feature (298)..(298): n is a, c, g, or t
  misc_feature (307)..(309): n is a, c, g, or t
  misc_feature (334)..(334): n is a, c, g, or t
  misc_feature (342)..(342): n is a, c, g, or t
  misc_feature (348)..(348): n is a, c, g, or t
  misc_feature (359)..(359): n is a, c, g, or t
  misc_feature (384)..(384): n is a, c, g, or t
  misc_feature (427)..(427): n is a, c, g, or t
ggttcccggcacgtgtctcggcangtggcagcgcgcctggncctgggcttggaggcgccggcgccctggatncgcnggccgtggtcgcngagtcggtgtcgtccttgaccatcgccgacgcgttcattgcagaccgaggcgatgagctcagctccgaccccgcctgctgacccgcgcttcccagtnggttcatntgctccttccttgtatttgtcagtcgccaattaaantaaancttgcgatancnnttatgcgctgccattctttgcatattcantacgtgggtgatntcnttcangtagattannnttcttaaagtggtagggagccgatnccaatccngtcgcngttcaaggcgntgtgtgcctgccctcctgttggtanacctagtgtgtggtgtgtgtgtgtagtagtgaaggggtggtgnccaaagtgcccgtgtcagtc

SEQ ID NO: 645410 - DNA, 212 bp, Homo sapiens
agtgcttacttcgacggtgtctggttgggcaggatcagaagtcgggctggggaagggagtggtaagggaggaacaggcctccaggtgtcattcgagtgagtggcccccacagcaccagatttcaccaacacatggtccctggcaccgcgaggaacaagctgaagtgctcttgatcctcaagtggagctccggagaatgtttccatttaattc

SEQ ID NO: 645411 - DNA, 940 bp, Homo sapiens
  misc_feature (703)..(704): n is a, c, g, or t
  misc_feature (769)..(769): n is a, c, g, or t
  misc_feature (771)..(771): n is a, c, g, or t
  misc_feature (800)..(800): n is a, c, g, or t
  misc_feature (802)..(802): n is a, c, g, or t
  misc_feature (809)..(809): n is a, c, g, or t
  misc_feature (815)..(815): n is a, c, g, or t
  misc_feature (838)..(838): n is a, c, g, or t
  misc_feature (846)..(846): n is a, c, g, or t
  misc_feature (883)..(884): n is a, c, g, or t
agcggctgcttcagcccaggcaaggctggggcctgggcagcctccaggtgcagtgccctcccgtgggccgcacccttgccactgccccagggcatgtctctactcaccaattatgaagggcttcggcatcagatagagaggctggtgcgggaaaatgaggaactgaagaagttggtgcggctcattcgggagaatcacgagctcaagtcagcgatcaagactcaggcaggcgggctcggcatcagcgggttcacgagtgggcttggtgaggcaacagcaggccttccctcacgccagaacaatggtgtcttcctgcccccgtccccagcagtggcaaacgaacgagtcctcgaagaagtggggatcatggccttggcacccctggccgagatgctaaccagcttgcagcccagcgccacaccgggctcactcatgagccccctgacaggcaccctcagcacgctgctgtctggcccagcacccacgtcacagagcagccccctcaccagcttcctgaccagtcccattgcgggacccctaacaggcacactggccagttccctgggcctgccctccactggcaccctgactcccagcagcctcgtggcaggccctgtggccatgtcccagagcagccccctgatagcccctgtgatgggcacggtggctgtctctctgagcagcccctcctcagctccactgnnatcccacaggggtctctcagaacctgctggccaacccatgagcaactggtcctgccagaggcccnangctgcggctggctgagccactccgcggangncccactnggcccnagtcccagcttgcgtggtaccantggcacancaaagtcccaatctccactgagccccccagtcgaccnnggaccaaagctcttcaaatggcggtttgcaggaaaaccctcaaaaattccacccta

SEQ ID NO: 645412 - DNA, 143 bp, Homo sapiens
cgtgtagtcccatgctactctgtgaggctgatggtcggagaattgcttgggccctggaattcaaggctacgagtgagccgtgatcaccatgtgcactctacgcctgggctacatacgaaggaccctgtctcacacaaaaaaca

SEQ ID NO: 645413 - DNA, 666 bp, Homo sapiens
taaaacccctttttttttaaaaatctattccgccctttggttttccccccaccccggggagctaaaatttcaggggtttccaacctcttttggctaaggtgcgtcgcttttgtgggctcgccttcttagcagcccgccatggacgttctttttaacgactgcttgtggcttctacccttttttggcttcttcctttagcaccccttggatagctttgtttctcgtggagctttttctaacttttcggagttcttctgaatctccctcgtggggccattattttctacgtaagagagtgcactcagtaatgtcgcccctcgtgatatttgtgcacttgcactccggggaggatctcatttcttcttctgtgtgaatatttctctcccgagtgtgtctcccctttgtgggtggctcctctttgtgttaggaggaaacgagctccgattttttttcgtgcgcggaggtatcccttctgttggagagagcgaaaaagccgcgacctcgtctctttcccctattaagaaacatgtgggaaacaactctcccggtcggctccgggcgttaagcgcccccccgtgtgttccgggggataacattattgtttcccccgtataaacacttgcgtcaggttcagccctttcatgggcgagacacgcgtctccatat

SEQ ID NO: 645414 - DNA, 732 bp, Homo sapiens
  misc_feature (495)..(496): n is a, c, g, or t
  misc_feature (561)..(561): n is a, c, g, or t
  misc_feature (563)..(563): n is a, c, g, or t
  misc_feature (592)..(592): n is a, c, g, or t
  misc_feature (594)..(594): n is a, c, g, or t
  misc_feature (601)..(601): n is a, c, g, or t
  misc_feature (607)..(607): n is a, c, g, or t
  misc_feature (630)..(630): n is a, c, g, or t
  misc_feature (638)..(638): n is a, c, g, or t
  misc_feature (675)..(676): n is a, c, g, or t
agcggctgcttcagcccaggcaaggctggggcctgggcagcctccaggtgcagtgccctcccgtgggccgcacccttgccactgccccagggcatgtctctactcaccaattatgaagggcttcggcaaacgaacgagtcctcgaagaagtggggatcatggccttggcacccctggccgagatgctaaccagcttgcagcccagcgccacaccgggctcactcatgagccccctgacaggcaccctcagcacgctgctgtctggcccagcacccacgtcacagagcagccccctcaccagcttcctgaccagtcccattgcgggacccctaacaggcacactggccagttccctgggcctgccctccactggcaccctgactcccagcagcctcgtggcaggccctgtggccatgtcccagagcagccccctgatagcccctgtgatgggcacggtggctgtctctctgagcagcccctcctcagctccactgnnatcccacaggggtctctcagaacctgctggccaacccatgagcaactggtcctgccagaggcccnangctgcggctggctgagccactccgcggangncccactnggcccnagtcccagcttgcgtggtaccantggcacancaaagtcccaatctccactgagccccccagtcgaccnnggaccaaagctcttcaaatggcggtttgcaggaaaaccctcaaaaattccacccta

SEQ ID NO: 645415 - DNA, 286 bp, Homo sapiens
  misc_feature (11)..(11): n is a, c, g, or t
  misc_feature (18)..(18): n is a, c, g, or t
  misc_feature (25)..(25): n is a, c, g, or t
  misc_feature (29)..(29): n is a, c, g, or t
  misc_feature (67)..(67): n is a, c, g, or t
  misc_feature (75)..(75): n is a, c, g, or t
  misc_feature (77)..(77): n is a, c, g, or t
  misc_feature (95)..(95): n is a, c, g, or t
  misc_feature (100)..(102): n is a, c, g, or t
  misc_feature (105)..(107): n is a, c, g, or t
  misc_feature (110)..(110): n is a, c, g, or t
  misc_feature (239)..(239): n is a, c, g, or t
  misc_feature (244)..(246): n is a, c, g, or t
agtgtttgcanccatatntgtcatntaanaaaatccctaaccctggggaccttgtgaaatacccagnaaccaggnanaccatctggtccagtggnttttnnncannnctncttagcacctggaattccctggtcagggagatggagtcagtggggcattgcagcttggaatctattttatgtcaccagttggtcctcatcaaataaaatttccttaggagtgcagagggctcattgggnaaatnnnaataataaaaataaataaaacttcctaaaagaaaagattg

SEQ ID NO: 645416 - DNA, 132 bp, Homo sapiens
cactgatctcatatctctctgtctgattgacttgtgcactttgctagcccatagcaatcgcatttgaaattcagtcttacagatttcattcatttcttcatctgcgttgaaaacctgccaggatcctctctg

SEQ ID NO: 645417 - DNA, 226 bp, Homo sapiens
  misc_feature (2)..(2): n is a, c, g, or t
  misc_feature (46)..(46): n is a, c, g, or t
  misc_feature (132)..(132): n is a, c, g, or t
antctagaggtcccctgtacgctcagccaagcgatgcaaatccaancccaaccaccctagttcctccggtagcttttcagatgctgaccttgcggatggcgtttcaggtggagaaggaaaaggaggcagtgntggtggaggcagccacaggaaagaaggggaagagccgacgccccaggctgatccccgggattgtggggctgtcgtgtcccgtgctagagcgtat

SEQ ID NO: 645418 - DNA, 134 bp, Homo sapiens
ttctcatggtgcaatacaatgagcatctgtagcgtacacgaaaagacgctagtgtggtctcctcatacctctcgggcattcttagttgccctttgagctactcctcctctgatagaccttaagtgctatgcccg

SEQ ID NO: 645419 - DNA, 479 bp, Homo sapiens
gtctgcctattggtcagctagctgcgattttcagtacaattcgcactgtggccaatgtttcgcacccattttgatgacatcatggtcgctgtactacatgttcagttcatacaccttcaagtaccgcacctttacgccagagtgcgcgaatggcacctcaaagttcatggaaatgaatggtcgatcccatttcttcttgtcgttggtacgcagaaactcaatctctgcgctgatctgcaataccttcatgcctgccatgcgcttgatcttccacatgattggcattctcgctgatcttgtacttgatcttccccttcatgcagatcacctgcaccccgcttgtgttcagtgtggtctgggatcctcatctcgatcttctgagccagcatctgagagtttaaagttgtacttgatgaccacctttacctccattttgttgcttaccacttttcgcactagcgggatcagccggaatggaa

SEQ ID NO: 645420 - DNA, 484 bp, Homo sapiens
  misc_feature (270)..(270): n is a, c, g, or t
  misc_feature (378)..(378): n is a, c, g, or t
  misc_feature (392)..(392): n is a, c, g, or t
  misc_feature (477)..(477): n is a, c, g, or t
  misc_feature (482)..(482): n is a, c, g, or t
ggaaattagcagctttgacaaaaaaaagtactgtttcatctgtcttccctatgagaaggctctcactttgtcacccaggctggagtgttgtggtgcgatctcagctcattgcaacctctgcctcctgggttcaaacaattctcctgcctcagcctcccaagtcgctgagattacacacacccgccacatagcccaggaagtcagggaccccgaactgagggacgggctggagccatggcaggggaacataaattgtgaagatttcatttnaatatggacatttattagttcccaaataatgcttttataaatttcttatgcctgtctttaatctcttaatcctggttatcttcataaagctgaggggtatgccctcanctccaggaccactngtggataattggtggttaaactggtacaaatttgatttgtggaaacatggtggtggtttgaaccaattaagaaatccaggtggcncttgngt

SEQ ID NO: 645421 - DNA, 310 bp, Homo sapiens
agccaagaagacaccccaccactgtcccagtagcatcccccgcaccagagcgaagtcgatggacaaaaaacgcgcacacacaagtgagccatggagtagggatggggacggtaaggacgccaggcggcaggggacctctgtaatggtcaagaaagtgatgtgaagcccagccaccggtcaccccgggtattcctccccctattggataaagaggcagcgcggggcacaaaggccttaatcacaggcagactggcacacggtagcaacctcgggcagagcaaggagaataaattactgtttaaagccgcac

SEQ ID NO: 645422 - DNA, 370 bp, Homo sapiens
  misc_feature (7)..(7): n is a, c, g, or t
  misc_feature (97)..(98): n is a, c, g, or t
  misc_feature (131)..(131): n is a, c, g, or t
  misc_feature (152)..(152): n is a, c, g, or t
  misc_feature (172)..(172): n is a, c, g, or t
  misc_feature (174)..(174): n is a, c, g, or t
  misc_feature (177)..(177): n is a, c, g, or t
  misc_feature (196)..(196): n is a, c, g, or t
  misc_feature (244)..(244): n is a, c, g, or t
  misc_feature (349)..(349): n is a, c, g, or t
gaaccantcagggtcctgtgcgacagctcacctcagtggcaatggatccaggctcccggacgtccctagctcctgcgcttttgccctgctctgcctnncccccgcttcaagcgcgctggtgccgtccaaancgttccgttactccaggactnttgcaccaccgctactcctncnagnccactcccgtcgcaccagntgcgacattgcaacacctacccaggcagctttgaagaaaccctatatnccaaagcaccagaaggtattcattcctgcatgactcccagacctcctctctgctcctcagactctattccgccaccctccaacatggaggaacgcaacagaaatncaatctagagctgctccgcat

SEQ ID NO: 645423 - DNA, 4240 bp, Homo sapiens
gatcgactgttctactaaacaacgggaaaatgtgtatctggcagcctgtggagaaacactaaacattgatttttctttgccttttacggacttgttccagctacatgtaataccaagttctctttaagaggagaagatgttgatcttcatttgtttctaccagactgccaccctagtaaatattctttatttatgctggtaaaaaattgccatccaaataagatgattcatgatactggtattcctgctgagtgtcaaagtggccagaaaacagttaaaccaaaatggcgcaacgttactcaggaaaagtctggttgggttgaatgctggactgtcccaagtgtcatgcttacaattgattatacatggcatccaatttatccacaaaaagcagatgaacagctgaaacaatcattatcagaaatggaagagacaatgctatctgtattaaggccatcccagaagacatcagacagagttgtttcttctccctctacttcttcacgcccacctattgatccctcagaacttccacctgataaacttcatgtagaaatggaactttctccagattctcagataactctctatggacctctactaaatgcctttttgtgtataaaggaaaactactttggggaagatgacatgtatatggattttgaagaggttatctcaagtcctgttttgtcactgtcaacatcatccagctctgggtggactgctgttggaatggaaaatgacaaaaaggaaaatgaaggttcagccaagtcaattcatccacttgccttgcgtccttgggatattactgtacttgttaatttgtacaaagttcatgggcgtcttcctgttcatggaactactgatggtcctgaatgccctacagctttcttggaaagactatgttttgaaatgaaaaaaggatttagggagaccatgctgcaacttatcctgtcacccctgaatgtgtttgtcagtgataactatcagcagcgaccccctgtggatgaagtactcagggaaggtcacatcaatttgtcaggtctccagctgagagcacacgctatgttctcagcagaaggtcttcctttgggaagcgattccttagaatacgcatggttaattgatgtgcaggctggaagtcttacagctaaggtcacagcaccacaggtatggttttcagagtactatctcctgacttattttctttttcctttctctacccaccttctcaagaataacttgtatgcctgtttgaatgttcattgcatttccactgatggcattctgatgggagtcattcttgccattcagaattttagttataggtgaatcagagacaagtttgacttttctgagccacatataatttgttgggtgtaatgtgtgtagacctatataatatttcaaagaatttgagactttctttgggaaaaattcaggatgagtacttttctagaagtcattaatatattattaaaattatattacttggccctccattgttggaaaaatcttatttttctactatatggagtaattttctaagaactttgttttcttacatatgtttaaagtaggatttgaaagtagcccttatgatactaaggattaggtaataaggttctttgcttgtcatgtcccaaagcaagattacatcatttgtacctgctgttagtgatgtggataatagtttcaaaaaacaaaagtgaatttactggtatgtaagtctggtctagaattctagatgtgatccttttggataaattgtcccccaccacccctttcacttaatccttagaaggcacaaaagccttaatgtattatttgtttctaattggccactgaagtttagttgaattgccgtattattgtaacatttcacctgagtcatatatttattataatatgaatgctcatcttgatatttcaaaagactggaatttgataggaatgttacatactcaattttgataaaaagttttagaatgggtataaaacatataatttagaggtaggtagtagcaacaagaaagtaataaagaacctagatgccctttatacctggaagaaatcgtcagagggtagcaaaaattaatattctagaaatggtgagaaaatgaatagaattgaaaagggatattttggagttgaacgtcatctcaatataatattagaatgtataatgatatttataaaaatatgtgaaaagaaatgcataatggaatgtataaaaatggatgaaaagcaatagtcattgctcactggtcttgtaactgtcctctccttattatctcccatttcccatccctaagtatactagtaaaaactgaagcatattccaaagcagcttgttccctacgaagggaataaagccatgctgatcctgcaagactgggtacaattcctttattccaaggcctgctagaatcttacatgtttataaattgcctttataaggtaaaacatttctctttctcctgcataaaatcttggcatcactgtttgctgcacagttcatgactctgtaggcacttttatgtttattccattctctgtatgttttaaaagtaaaatttatattttccaagagtttaaattatgtacttatttgaggggataatgtcatgtgtatctatccctcaatgtttttaacagctctaatcaattagggtgttttttttttttaaactgaagatttgaagaattatgatatatacttacttaagcttctatttacataaacaaaagtgctttaatcttcaaaatacctggttttaaaaaaactgtagctcaatgtgatatttagatactttttcacataaaagtttggtttatgattggagaattttaggtgcttttctatgtggagatttcagttagctatataagagggaagatatataaccttgaataaaaggatttgcgttaaaagttgctgaagtgaaatttttcagttgcaattagttttcattttgacagtgcattttgtcattcataaaggaaaagtaacataagcatgtaaatgatattaaaggtagaaaaaaatcattggctaacaagttgcttatttagcagaagttttaagacagtgtttgggttctttcaagctacgttaacattcttcagaagcttttgaactctaaacccttgtttagaatgctaacagtgttgtcaacttgtcactgattatctgtagctggcatgcctcttggagtggggacagacatttgtttttcatgtggtatgtcgggagtatgaactggaaagaccgaaatcagttataatatgtcagcatggaattgatcgtcggttctgtgaatccaaggtatattaacaaatatgttagcaatattataaacatttatgaattttaaaaaatggaatattgagatatcagcttcaagtcaaatacacatagccatgcagcaaactacagttttttcagttaataaaattattttttaaattcttacccattttagttttaagtatctaaaatatgagataattattaaaacatacaaattaaaaaagaaacagaattataaaaattatattttgcttacatttttactgttaacattcatgtcatattgcattattatacttgttgggatatggctatatatttatgtagaagatttagaaattgaagcaaagagaaggttgaattcttcacatgacatggtttgcagaccactctggacatgccgtttctcccataatgtaatagcaaggttggtcatttgccaggtttcctgactccacatgttatgctcttttcacaacattgtgccaccttcattaagagtcattacaatatcttcacaagggttgcaaaaagtagatggtaatccctaaaaccatgtgcagtggcaatgaaatgccatagtattattgtgcaataaatactctcccttatgaatttggggagggaggcattttcttcccctgattttggaagcatggttatttcagaaaatctggaaaacatggctgtttcaaaagagaaaaataacttaccctggttctacaacacagtggttaacaacttagtttttctttctagttcgttcctatatgtctttccttttttgttcttctgctatacaaattatatttgtttgctgttatattactgtgaattgaaattagttcatcctacttttatgtccaaaaaaaatctgtaacgcatccttatatattgacaataaaggaaacagctatacttggtgat

SEQ ID NO: 645424 - DNA, 1901 bp, Homo sapiens
  misc_feature (1375)..(1375): n is a, c, g, or t
  misc_feature (1380)..(1380): n is a, c, g, or t
  misc_feature (1385)..(1385): n is a, c, g, or t
  misc_feature (1434)..(1434): n is a, c, g, or t
  misc_feature (1511)..(1511): n is a, c, g, or t
  misc_feature (1703)..(1703): n is a, c, g, or t
  misc_feature (1705)..(1706): n is a, c, g, or t
  misc_feature (1801)..(1801): n is a, c, g, or t
gatcgactgttctactaaacaacgggaaaatgtgtatctggcagcctgtggagaaacactaaacattgatttttctttgccttttacggacttgttccagctacatgtaataccaagttctctttaagaggagaagatgttgatcttcatttgtttctaccagactgccaccctagtaaatattctttatttatgctggtaaaaaattgccatccaaataagatgattcatgatactggtattcctgctgagtgtcaaagtggccagaaaacagttaaaccaaaatggcgcaacgttactcaggaaaagtctggttgggttgaatgctggactgtcccaagtgtcatgcttacaattgattatacatggcatccaatttatccacaaaaagcagatgaacagctgaaacaatcattatcagaaatggaagagacaatgctatctgtattaaggccatcccagaagacatcagacagagttgtttcttctccctctacttcttcacgcccacctattgatccctcagaacttccacctgataaacttcatgtagaaatggaactttctccagattctcagataactctctatggacctctactaaatgcctttttgtgtataaaggaaaactactttggggaagatgacatgtatatggattttgaagaggttatctcaagtcctgttttgtcactgtcaacatcatccagctctgggtggactgctgttggaatggaaaatgacaaaaaggaaaatgaaggttcagccaagtcaattcatccacttgccttgcgtccttgggatattactgtacttgttaatttgtacaaagttcatgggcgtcttcctgttcatggaactactgatggtcctgaatgccctacagctttcttggaaagactatgttttgaaatgaaaaaaggatttagggagaccatgctgcaacttatcctgtcacccctgaatgtgtttgtcagtgataactatcagcagcgaccccctgtggatgaagtactcagggaaggtcacatcaatttgtcaggtctccagctgagagcacacgctatgttctcagcagaaggtcttcctttgggaagcgattccttagaatacgcatggttaattgatgtgcaggctggaagtcttacagctaaggtcacagcaccacagctggcatgcctcttggagtggggacagacatttgtttttcatgtggtatgtcgggagtatgaactggaaagaccgaaatcagttataatatgtcagcatggaattgatcgtcggttctgtgaatccaagttgagttgtattcctgggccttgtccaacttcagatgatttgaaatatactatgattcgtttagcagtagatgganccganatttncattgttgagcatggttgtgctacaaatataaagatgggtgcaattcgngttgcaaactgtaatctccacaatcaatcggttggggaaggaatcagtgctgcaattcaggattttcaagtgagacngtacattgagcaattaaataattgcagaattggacttcagcctgcagtgctacggagggcctattggcttgaagctgggtcagccaatttaggacttattactgttgatattgctttagctgctgaccatcattctaaacatgaggcacaaagacatttcttagaaactcatgatgccagaactaagaggtngnngtttttatggccagatgatatcctgaagaataagaggtgtagaaacaaatgtggttgtctcggtggctgcagattctttggtggcacagtaactngcctagatttcttcaaacttgaagacttgacaccttccagtagctctgcattttcaagcacaagtgcagagtctgatatgtatatggacacgaatgttca

SEQ ID NO: 645425 - DNA, 205 bp, Homo sapiens
ggagatgctggtgcaagagcagctgctcgccatcctgcccgaggggctcgcgccggcggatccgcccgcacggatgtcattcactggctgagcggtggactgcgggcggccagggcggcgctctgtgcggactggggccatgatcgggcccgtggggctgtagtcctgggaccccaccccgtgttaatgaaaaatgagttttggc

SEQ ID NO: 645426 - DNA, 920 bp, Homo sapiens
gtcggtctcttgcttccatcagtgttggacggaacgagatccggtggactctcttccagcctccgaccgcctccgatatcctctcgggttgtaacctccgggaccatcttctcggtcatctcctgcttctgggagcctgattcagaccgtctttggtggttagttccttcttgccatctcaaccatgagctcccagattcgtcagaattattccaccgacgtggaggagagcgattcaagagacctggtcaaattttgtgacctgtcagtcctcctacacctacggtctgctggtgggcttcgtgatttctgaccgtgatgatgtggcttcttggaagggccggtgttggcatttcttccgcagaattggacgatgagagaagcgcagatggtgtaccaagcggtctcctgaagatgcaaaagcagcgtgaaggccgcgctttcttccaggacatcaggaggccatgctgaagagtgatttgggtttaaaaaccccagaagccatgtaaaggttctcatgtccctggttcacaaatgctagacaggcttccttgttggatctacatcgccctggtgttctggcgtgggatcccgcatctactgtggcttacctggtgactcactatcatagatgaagagtgagttgccacggagagggtgcactgactagctcacgggtgttgaccggagctgggtggcgagaccttcaagggcaggtcaaagaggaaaaaggtcggggcagggagtctggggcctggaagaatagggtgagcaaggtctccgcatatgggttctaactcaaaactggcatgaaagttggcccacgaaaaaacaaatgtgcgcaccagaatacccgcggggcacagaggattatcgaggatgttaaccagcgacacgtggtaagacccacagaggacaac

SEQ ID NO: 645427 - DNA, 1968 bp, Homo sapiens
  misc_feature (1375)..(1375): n is a, c, g, or t
  misc_feature (1380)..(1380): n is a, c, g, or t
  misc_feature (1385)..(1385): n is a, c, g, or t
  misc_feature (1434)..(1434): n is a, c, g, or t
  misc_feature (1511)..(1511): n is a, c, g, or t
  misc_feature (1703)..(1703): n is a, c, g, or t
  misc_feature (1705)..(1706): n is a, c, g, or t
gatcgactgttctactaaacaacgggaaaatgtgtatctggcagcctgtggagaaacactaaacattgatttttctttgccttttacggacttgttccagctacatgtaataccaagttctctttaagaggagaagatgttgatcttcatttgtttctaccagactgccaccctagtaaatattctttatttatgctggtaaaaaattgccatccaaataagatgattcatgatactggtattcctgctgagtgtcaaagtggccagaaaacagttaaaccaaaatggcgcaacgttactcaggaaaagtctggttgggttgaatgctggactgtcccaagtgtcatgcttacaattgattatacatggcatccaatttatccacaaaaagcagatgaacagctgaaacaatcattatcagaaatggaagagacaatgctatctgtattaaggccatcccagaagacatcagacagagttgtttcttctccctctacttcttcacgcccacctattgatccctcagaacttccacctgataaacttcatgtagaaatggaactttctccagattctcagataactctctatggacctctactaaatgcctttttgtgtataaaggaaaactactttggggaagatgacatgtatatggattttgaagaggttatctcaagtcctgttttgtcactgtcaacatcatccagctctgggtggactgctgttggaatggaaaatgacaaaaaggaaaatgaaggttcagccaagtcaattcatccacttgccttgcgtccttgggatattactgtacttgttaatttgtacaaagttcatgggcgtcttcctgttcatggaactactgatggtcctgaatgccctacagctttcttggaaagactatgttttgaaatgaaaaaaggatttagggagaccatgctgcaacttatcctgtcacccctgaatgtgtttgtcagtgataactatcagcagcgaccccctgtggatgaagtactcagggaaggtcacatcaatttgtcaggtctccagctgagagcacacgctatgttctcagcagaaggtcttcctttgggaagcgattccttagaatacgcatggttaattgatgtgcaggctggaagtcttacagctaaggtcacagcaccacagctggcatgcctcttggagtggggacagacatttgtttttcatgtggtatgtcgggagtatgaactggaaagaccgaaatcagttataatatgtcagcatggaattgatcgtcggttctgtgaatccaagttgagttgtattcctgggccttgtccaacttcagatgatttgaaatatactatgattcgtttagcagtagatgganccganatttncattgttgagcatggttgtgctacaaatataaagatgggtgcaattcgngttgcaaactgtaatctccacaatcaatcggttggggaaggaatcagtgctgcaattcaggattttcaagtgagacngtacattgagcaattaaataattgcagaattggacttcagcctgcagtgctacggagggcctattggcttgaagctgggtcagccaatttaggacttattactgttgatattgctttagctgctgaccatcattctaaacatgaggcacaaagacatttcttagaaactcatgatgccagaactaagaggtngnngtttttatggccagatgatatcctgaagaataagaggtgtagaaaccacaacctcttagttctggcatcatgagtttctaagaaatgtctttgtgcctcatgtttagaatgatggtcagcagctaaagcaatatcaacagtaataagtcctaaattggctgacccagcttcaagccaataggccctccgtagcactgcaggctgaagtccaattctgcaattatttaattgctcaatgtactgtctcacttgaaaatcctga

SEQ ID NO: 645428 - DNA, 187 bp, Homo sapiens
aggtacgccatgtcgcccaggctggtcttgaactccaggtctcaaagtgatctgcccgcctcggcctcccaaaatgctgggattacaggtgtgagccactgtgtccggccgcagcttgtcatttttagtctcagtgtctaagactaagattctgtaacacaaaagccttcttcctggttcgtcatct

SEQ ID NO: 645429 - DNA, 497 bp, Homo sapiens
  misc_feature (19)..(19): n is a, c, g, or t
  misc_feature (61)..(61): n is a, c, g, or t
  misc_feature (132)..(132): n is a, c, g, or t
  misc_feature (141)..(141): n is a, c, g, or t
  misc_feature (147)..(147): n is a, c, g, or t
  misc_feature (174)..(174): n is a, c, g, or t
  misc_feature (224)..(224): n is a, c, g, or t
  misc_feature (264)..(264): n is a, c, g, or t
  misc_feature (351)..(351): n is a, c, g, or t
  misc_feature (496)..(496): n is a, c, g, or t
gccctgggcctccggctcntcctcgtcgtcttcgttcatctcgccctcttcctcggccgtngcgtcctggtactgctggtactcgggcaccaggtcgttcatgttgctctcggcctcggtggtctccatctngtccttgcnctcgcncgtgttccagtgccggggggccttgcnccgggtcgtggccgtggtctgctcggcggtgcgcttgttcagctcctggntggccgtgctgttcccggtgggggtggtggttatcttgtngttgcggggcgggatgtcacacacggccaccttcacgttgttggggatccactccacgagtagctgctgttcttgctctggatgganagcatctgctcgtccacctccttcatggacatgcggccccggaacacggtggccaccgtcagtacgcggccgtggcgcgggtcgcaggcggccatcatgttcttggcatcgaacatctgctgggtgagctcgggcacggtcaggnt

SEQ ID NO: 645430 - DNA, 467 bp, Homo sapiens
ttctggggacatctttaagcccagtagaggggtgtaaactggagacaaataacgatgggaccggtgatatgggttttcccctctaatcttctagcccattcatccagatcatccatcaccttaaagggcatccccagagggaggcaggtcgggccagagctgaagatggccgggcaattggcgggcggggataagtcgtggtggtgcacccaccggtctagatcgaagtcttttttccccaggtcgtgggacaagagggcacctcggcccagcaaactcgggccgggattaagtccaggggccctcgaggggctttttaggggggtgggtctttccagggaggtgacgacttcaagaggggatacaaggggggaaatacctttacagcctcggacctgggtaacaatctagtttcctttaaagggagcatggtgggggccgggggccacatagaccttcggatgctc

SEQ ID NO: 645431 - DNA, 1210 bp, Homo sapiens
ggagagatcgtccaggaggcggtgtagatgcggcgaacagggcaacagggacagggcacttgaggacttggaaatccggagacgcacggctacgtggtgagtgcgagtccatgctgtcgggtagacccttgcgtaggccctgggtaggaactccgggcttttctgtcttgcgtgagctggcaggagagtagccgaaggtttctgcgactgagtacggacctgccgtgcctcatgttctagaggacacatcaccgtgggccgacgcttggtgacacgcagagaaagggcgcgtagcgtggggagccacggaaccacaatgggctggctgggaaacgggtggggcgtgtcgtgagactgtactagggaagagctagcaggacctactagtactctctgcctgcagaacgcaagaaaaaggggcgccgacgaagacgagcgggacaagagggtcgaggaccagcccaggggtcctgtggcggcgcggaatagggatgctaaggcaggatcggacgtgatcgactgggtaaggtgcgcatgacctgacgcaaggtcccgacacaccagacgggcctcaccaccgaccaggcccagggaaccattgcggagagggtacccctattgcatttgtcagagggctgatcttggctctggtaggcaaacagaataagtcggaggcaaacagatgatctaggtagaggagccagcaacatggcgggtagggcctgacggcatatgatcacagataacgcgttcacaaccagatttggcaggcaccctggttgttcccccctgcatagcacagccggggtgtgttccaaggcaagaagcaaaggtccaaggttcaaggtgaggtatatcggttcggcatagagacattcccgtggcgcaaggggaccttctgcaaaatggttcccacggtggtgacaaaggggaattcgcgacacagcacttgtgggcgggggattcgagagagcagggcgccctggaatgtggcagggccccggggcccgcacaggaccccgattcctggaaggggcgatccaaacgcaatttagaggggctcccccatgcggcgccaaggacacccattattcacaccaggacgacaaagcaaaccacaaaatccccaaaaagcccaagaacaatacagcaacccaacgcgggccgcgaaactaccataggccggcactcacccaggggagcacacatg

SEQ ID NO: 645432 - DNA, 145 bp, Homo sapiens
ctattccatgtcaaacagttctcagcatggcaagcacccagcatggccactcctcccgggggcaaggggttcccagccccccaccctctccagccccgtccccgtgcccagctccaactcgtgccagggtcacggcagctcgcaa

SEQ ID NO: 645433 - DNA, 599 bp, Homo sapiens
cggtggcggcccgctctaaaacaaatgggtcccccggggctgcagaaattcggcacaaggttcgtacgctgtgaaggcatcaacatttctggcaatttctacagaaacaagttgaagtacctggctttcctccgcaagcggatgaacaccaacccttcccgaggcccctaccacttccgggcccccagccgcatcttctggcggaccgtgcgaggtatgctgccccacaaaaccaagcgaggccaggccgctctggaccgtctcaaggtgtttgacggcatcccaccgccctacgacaagaaaaagcggatggtggttcctgctgccctcaaggtcgtgcgtctgaagcctacaagaaagtttgcctatctggggcgcctggctcacgaggttggctggaagtaccaggcagtgacagccaccctggaggagaagaggaaagagaaagccaagatccactaccggaagaagaaacagctcatgaggctacggaaacaggccgagaagaacgtggagaagaaaattgacaaatacacagaggtcctcaagacccacggactcctggtctgagcccaataaagactgttaattcctcaaaa

SEQ ID NO: 645434 - DNA, 111 bp, Homo sapiens
atgctggctcatgactatcgttaaggtgtattaaaaaagaaaaaaaaatccttccacttcagcaacagtgttggcctgtcagttcatatttgttaaagggcaaaagtattc

SEQ ID NO: 645435 - DNA, 244 bp, Homo sapiens
gaccggggtttgaaccaaatgtcatgtattttccgggcattatctggccctgtttaactttaacaggctgcttgagagagaatgccagcttctatcttgtgcaaaccaacagcagaattgattaattagaaataagctgaaccctagattcaataagaactgggcttaggttcagaaccttggagcaagagatacaccctggaagagccaagaaaaatctagggagactttttatactcggagt

SEQ ID NO: 645436 - DNA, 692 bp, Homo sapiens
gctatgaccatgcgtttggcgcacatggccggaggtgtaagtccatgatgctcgtaggtggaggctatcgtcatgctgcgcatgactagtgttgggattctcacggtacatgatgggccggaaggtgggtcggacgtacgtggagaaggtgccctcgatcgatgtcttggcggtcattactgaatctattaagaagtgagcttcggatctgacgtccgatatcggagatgaaagaccagacctgcccgaggccccattaccaacttccggggcccccaagcccgcatcttctggcggaccgtgcgaggtatgctgccccacaaaaccaagcgaggccaggccgctctggaccgtctcaaggtgtttgacggcatcccaccgccctacgacaagaaaaagcggatggtggttcctgctgccctcaaggtcgtgcgtctgaagcctacaagaaagtttgcctatctggggcgcctggctcacgaggttggctggaagtaccaggcagtgacagccaccctggaggagaagaggaaagagaaagccaagatccactaccggaagaagaaacagctcatgaggctacggaaacaggccgagaagaacgtggagaagaaaattgacaaatacacagaggtcctcaagacccacggactcctggtctgagcccaataaagactgttaattcctcaaaa

SEQ ID NO: 645437 - DNA, 458 bp, Homo sapiens
ctacacccctctcttgactacagaaagtggaactccctgaccccttgcacttcccaagtgaggcaatgcctcgccctgcattcggatcgcgcacggtgcacgcacccactgacctagcgcccactgtctggcactccctagtgagatgaacccggtacctcagatggaaatgcagaaatcacccgtcttctgcgtcgctcacggctgggaagctgtagaccggagctgtaccctattcggccatcttggctcctcccctgaagctcttaagtgtatttcacaatttcattcagtgaattctttagtaccagtatatgtctagattctttttaaaaaatgatatgtatctcttgtatacatatttcattcatacccgtggatggttatcctaatttcttagtattgtctatctctgttctcttaatatctccctgagcttatatagtgtcattatattg

SEQ ID NO: 645438 - DNA, 128 bp, Homo sapiens
ccacgcgtccgcttatttaatgctgtaaagttgggggcaaccgttcaggaggggaacgatggccccttatttaatgctgtaaagttggactgttgttcaataaaccagagcaatgcattagctcctca

SEQ ID NO: 645439 - DNA, 1105 bp, Homo sapiens
  misc_feature (1)..(1): n is a, c, g, or t
  misc_feature (914)..(914): n is a, c, g, or t
natttcggcacaagcggctgccgaagatggcggaggtgcaggtcctggtgcttgatggtcgaggccatctcctgggccgcctgcgtcgtggctaaacaggtactgctgggccggaaggtggtggtcgtacgctgtgaaggcatcaacatttctggcaatttctacagaaacaagttgaagtacctggctttcctccgcaagcggatgaacaccaacccttcccgaggcccctaccacttccgggcccccagccgcatcttctggcggaccgtgcgaggtatgctgccccacaaaaccaagcgaggccaggccgctctggaccgtctcaaggtgtttgacggcatcccaccgccctacgacaagaaaaagcggatggtggttcctgctgccctcaaggtcgtgcgtctgaagcctacaagaaagtttgcctatctggggcgcctggctcacgaggttggctggaagtaccaggcagtgacagccaccctggaggagaagaggaaagagaaagccaagatccactaccggaagaagaaacagctcatgaggctacggaaacaggccgagaagaacgtggagaagaaaattgacaaatacacagaggtcctcaagacccacggactcctggtctgagcccaataaagactgttaattcctcaaaatgcgttgcctgcccttcctccattgttgccctggaatgtacgggacccagggggcagcagcagtccaggtgccacaggcagccctgggacataggaagctgggagccaaggaaagggtcttagtcactgcctcccgaagttgcttgaaagcactcggagaattgtgcaggtgtcatttatctatgaccattagaatgagcagcagttactatgagtgaaagggagccagacgagtgattggagggcctatcntgtgaggtgggggatctgttggatttaccactggttatatactctggcagctgttagaattgtgcatgcacttggggagagcatgaggttggtgtgtccacagggtattctagaagcagaaatagactggaagatggaaccaaggttaaggattgccagttcctactgttttttatcggaatagttgcttt

SEQ ID NO: 645440 - DNA, 101 bp, Homo sapiens
agacgtctgtaaacctatggcagaagtatcgatacattgctctcgggtcgttacatttgtcgggagagcaaaccagaattgcactgcgaggtagacggtac

SEQ ID NO: 645441 - DNA, 698 bp, Homo sapiens
  misc_feature (18)..(18): n is a, c, g, or t
  misc_feature (38)..(38): n is a, c, g, or t
  misc_feature (618)..(619): n is a, c, g, or t
  misc_feature (622)..(622): n is a, c, g, or t
  misc_feature (625)..(626): n is a, c, g, or t
  misc_feature (637)..(637): n is a, c, g, or t
ataactccgctccccccnctcggccattatggccgtgncttttccaagcggctgccgaagatggcggaggtgcaggtcctggtgcttgatggtcgaggccatctcctgggccgcctgcgtcgtggctaaacaggtactgctgggccggaaggtggtggtcgtacgctgtgaaggcatcaacatttctggcaatttctacagaaacaagttgaagtacctggctttcctccgcaagcggatgaacaccaacccttcccgaggcccctaccacttccgggcccccagccgcatcttctggcggaccgtgcgaggtatgctgccccacaaaaccaagcgaggccaggccgctctggaccgtctcaaggtgtttgacggcatcccaccgccctacgacaagaaaaagcggatggtggttcctgctgccctcaaggtcgtgcgtctgaagcctacaagaaagtttgcctatctggggcgcctggctcacgaggttggctggaagtaccaggcagtgacagccaccctggaggagaagaggaaagagaaagccaagatccactaccggaagaagaaacagctcatgaggctacggaaacaggccgagaagaacgtggagaagannatngannataacagaggnctcagaccacggatactggtcgagccattaagatgttctcctcaacaaaaacacgatatgg

SEQ ID NO: 645442 - DNA, 142 bp, Homo sapiens
  misc_feature (44)..(44): n is a, c, g, or t
  misc_feature (79)..(79): n is a, c, g, or t
  misc_feature (100)..(100): n is a, c, g, or t
  misc_feature (106)..(106): n is a, c, g, or t
  misc_feature (129)..(129): n is a, c, g, or t
  misc_feature (132)..(132): n is a, c, g, or t
cgccaaaccatttctccacttctgcgccaaaacgcttccactanaagatcaagagttcctgaattacgctgaacttgtncgggccacccctttcttactncatcanaaactatatccagccagctgttntgngagcctcttc

SEQ ID NO: 645443 - DNA, 388 bp, Homo sapiens
gaagcttgtaaggacatgcttgttttagtccagtggttccacagctgctaagccaggagtcacttggaggcttttaaatacaaaacattggagctggaggccattatccttagcaaactaatgcagaaacagaaaatcaactaccgcatgttctcacttataagtgggaggtaatgataagaacttatgaacacaaagaaggaaacaatagacattggagtctatttgagaggggagggtgggagaaggaaaaggagcagaaaagataactattgagtactgggcttcacacctgggtgatgaaataatatgtacaacaaatccctgtgacacatgtttacctatggaacaaaccttcatgtgtatccctaaacctaaaataaaagtt

SEQ ID NO: 645444 - DNA, 450 bp, Homo sapiens
  misc_feature (18)..(18): n is a, c, g, or t
  misc_feature (38)..(38): n is a, c, g, or t
ataactccgctccccccnctcggccattatggccgtgncttttccaagcggctgccgaagatggcggaggtgcaggtcctggtgcttgatggtcgaggccatctcctgggccgcctgcgtcgtggctaaacaggtactgctgggccggaaggtggtggtcgtacgctgtgaaggcatcaacatttctggcaatttctacagaaacaagttgaagtacctggctttcctccgcaagcggatgaacaccaacccttcccgaggcccctaccacttccgggcccccagccgcatcttttggcggaccgcgcgaggcatcgctgccacaaaaccaagcgaggccaggccgctctggaccgtctcaaggtgtttgacggcatcccaccgccctacgacatgaaatagccgccggctcctcccgttgccccaagctctgccccccgccctctggcc

SEQ ID NO: 645445 - DNA, 905 bp, Homo sapiens
ataatgttcatgaggtacatatatattgttcccatagtcttcagactataaaactataaatatgcccaactctatgttcatttgccctactttaacctagggttgatagtgtctcgtaatttcagctgactgtgtaccgtctctgcctgagactcaggaattctgaaatgtgaaatggtctcatgttgtctctatctcttgatagcatgaaactcagaagtgtattaccattcaatagcacttatgactatagaatcctaatttgtcatcctgattcactattacatatgatacttcgtctatcattggtacgatagtagcttataagacttaatgatgctattgacaaatgcaggttttagaatattagtgcctgagattctgcgtaggtaggtatctctacctctgctatgatgataccaagttactcagagacctcccattatgcctgtggtcaggctacggtgaaagctttgccctctactctacctactagttcaaggggaattcttgggaagcagatgattctagttcttgtgctagagatgagattgatcatcttgcatgtgtgctctttgttgctctatcgggctataatctgtttgcctttccgttaataaatgggtaaagatttactccacgctggacgtaacaggtcagagtacgagattgtcgtcccgtagccttggaaggagcctgtgcaatactttgagagcccctgagtctacgggacataatggctctaaatccccattttgcttttaggtcggaaacccaatatagttaggaaacacttgtgtctctggaccaaaaccacatggataggcccttgagaactggggcgtgaggtttccgaaaaccgccgaacagtgttttacgaggccggacctgccactggggatagc

SEQ ID NO: 645446 - DNA, 258 bp, Homo sapiens
tgaaataataataattaaatttccggccgcgtcgaactggctcaacgagggtggctggaagtaccaggcagtgacagccaccctggaggagaagaggaaagagaaagccaagatccactaccggaagaagaaacagctcatgaggctacggaaacaggccgagaagaacgtggagaagaaaattgacaaatacacagaggtcctcaagacccacggactcctggtctgagcccaataaagactgttaattcctcaaaa

SEQ ID NO: 645447 - DNA, 662 bp, Homo sapiens
  misc_feature (1)..(1): n is a, c, g, or t
natttcggcacaagcggctgccgaagatggcggaggtgcaggtcctggtgcttgatggtcgaggccatctcctgggccgcctgcgtcgtggctaaacaggtactgctgggccggaaggtggtggtcgtacgctgtgaaggcatcaacatttctggcaatttctacagaaacaagttgaagtacctggctttcctccgcaagcggatgaacaccaacccttcccgaggcccctaccacttccgggcccccagccgcatcttctggcggaccgtgcgaggtatgctgccccacaaaaccaagcgaggccaggccgctctggaccgtctcaaggtgtttgacggcatcccaccgccctacgacaagaaaaagcggatggtggttcctgctgccctcaaggtcgtgcgtctgaagcctacaagaaagtttgcctatctggggcgcctggctcacgaggttggctggaagtaccaggcagtgacagccaccctggaggagaagaggaaagagaaagccaagatccactaccggaagaagaaacagctcatgaggctacggaaacaggccgagaagaacgtggagaagaaaattgacaaatacacagaggtcctcaagacccacggactcctggtctgagcccaataaagactgttaattcctcaaaa

SEQ ID NO: 645448 - DNA, 337 bp, Homo sapiens
ggaggtgaggggcgcctctgcccggccgcccctactgggaagtgaggagcccctctgcccggccagccgccccgtccgggagggaggtgggggggtcagccccctgcgcagccagccgccctgtccaggagggaggtgggggggtcagccctccgcccggacagctgccccgtctgggaggtgaggggcgcctctgcccggccgccctctactgggaagtgaggagcccctttgcccggccagcccgcccatgtctgggagggaggtgggggggtcaggcgccctgttccggccagctgtcctcgtcctgtgaggtgatggtggcagcctctgcctc

SEQ ID NO: 645449 - DNA, 894 bp, Homo sapiens
  misc_feature (8)..(8): n is a, c, g, or t
  misc_feature (80)..(80): n is a, c, g, or t
  misc_feature (320)..(320): n is a, c, g, or t
  misc_feature (352)..(352): n is a, c, g, or t
  misc_feature (354)..(354): n is a, c, g, or t
  misc_feature (383)..(383): n is a, c, g, or t
  misc_feature (400)..(400): n is a, c, g, or t
  misc_feature (412)..(412): n is a, c, g, or t
  misc_feature (420)..(420): n is a, c, g, or t
  misc_feature (574)..(574): n is a, c, g, or t
  misc_feature (594)..(594): n is a, c, g, or t
  misc_feature (677)..(677): n is a, c, g, or t
  misc_feature (733)..(733): n is a, c, g, or t
  misc_feature (789)..(789): n is a, c, g, or t
  misc_feature (806)..(806): n is a, c, g, or t
  misc_feature (818)..(818): n is a, c, g, or t
  misc_feature (822)..(822): n is a, c, g, or t
  misc_feature (875)..(875): n is a, c, g, or t
cgaagccnggtcagggacagaatccccaaagggtcacagttccttgaggaaggtggcaagaggtgtagatcaaagctganctgggacaaaaggctgctttgagcctttttgggtgagctcttcaggaaccaggaccccagaagggcaagctcctcttttcacggccattgccatggagggatcctccaagctcccactttctgttaattcagagttcctcagactcggccgatgggtcatttttcttgtatattttctcttgatttcccttcttcatggctgcatattttgctagcgttaagagatagttacttagtttntttaagaacttggccacgttcgcatcggtctntnccatcttgacaagaggcaccacacgtctnttggcccggcggcacanggcccggcaganattcagcnccgagctgatcttgccttccgaagcaggatgaaggccgttagttgtgggagctggctggtgtacttgttgatccacttctccagccccaggatgggccccgccttgaacgtggtatactttaagttagctttccgggccgaggagcatggtgtngccagggccgagccgacgtnctgcaatgtgcactggattttctgaagctcttcggcaaatgtatggcccttttctgttacttatttcagagcaaacccaatanctgaacttaattcaactgttgtcccacggcttcaaacacttgggcatctttgggtnttctttctcctgttaaggtactagaaaaccctttgtcttccgttttggtgtaaatnttggggatctgggtgtnttcgaggaaggntgtngcctgttcccgttttccacgccctgagggccgcggctcttgaaaaggggatanaggagccttggggcgcgaa

SEQ ID NO: 645450 - DNA, 87 bp, Homo sapiens
cccgaggacacggctgtgtattactgtgcaagagataggagtggttattactttaagggtttgtggttcgacccatggggccaggga

SEQ ID NO: 645451 - DNA, 203 bp, Homo sapiens
cgttatggttatggaaatgactgcttccattagtacacaggggagtggtcgtgcttgtgaaagtcaagcctggcgtgttgctggggttaacatgaaagaattaaataaagtcaagcatgagatggattttgatgctgagtggctatttgaaaatcatgattagaaggattccagagtctatgcgagtaagactgctgacagtt

SEQ ID NO: 645452 - DNA, 696 bp, Homo sapiens
  misc_feature (18)..(18): n is a, c, g, or t
  misc_feature (38)..(38): n is a, c, g, or t
ataactccgctccccccnctcggccattatggccgtgncttttccaagcggctgccgaagatggcggaggtgcaggtcctggtgcttgatggtcgaggccatctcctgggccgcctgcgtcgtggctaaacaggtactgctgggccggaaggtggtggtcgtacgctgtgaaggcatcaacatttctggcaatttctacagaaacaagttgaagtacctggctttcctccgcaagcggatgaacaccaacccttcccgaggcccctaccacttccgggcccccagccgcatcttctggcggaccgtgcgaggtatgctgccccacaaaaccaagcgaggccaggccgctctggaccgtctcaaggtgtttgacggcatcccaccgccctacgacaagaaaaagcggatggtggttcctgctgccctcaaggtcgtgcgtctgaagcctacaagaaagtttgcctatctggggcgcctggctcacgaggttggctggaagtaccaggcagtgacagccaccctggaggagaagaggaaagagaaagccaagatccactaccggaagaagaaacagctcatgaggctacggaaacaggccgagaagaacgtggagaagaaaattgacaaatacacagaggtcctcaagacccacggactcctggtctgagcccaataaagactgttaattcctcaaaa

SEQ ID NO: 645453 - DNA, 714 bp, Homo sapiens
  misc_feature (14)..(14): n is a, c, g, or t
  misc_feature (17)..(17): n is a, c, g, or t
  misc_feature (52)..(52): n is a, c, g, or t
gaggacttacaagnttngggtcaaaaaaaaccccccgggcggttatttatanactgaacggcatactataagtctagtacagctggtggatcgacagcgagatggagtgcagtctgtgctgatgtcagcatctctggcgctgggcatcgtgctaacagtactgtggcgggagtgtgtcgtacgctgtgaaggcatcaacatttctggcaatttctacagaaacaagttgaagtacctggctttcctccgcaagcggatgaacaccaacccttcccgaggcccctaccacttccgggcccccagccgcatcttctggcggaccgtgcgaggtatgctgccccacaaaaccaagcgaggccaggccgctctggaccgtctcaaggtgtttgacggcatcccaccgccctacgacaagaaaaagcggatggtggttcctgctgccctcaaggtcgtgcgtctgaagcctacaagaaagtttgcctatctggggcgcctggctcacgaggttggctggaagtaccaggcagtgacagccaccctggaggagaagaggaaagagaaagccaagatccactaccggaagaagaaacagctcatgaggctacggaaacaggccgagaagaacgtggagaagaaaattgacaaatacacagaggtcctcaagacccacggactcctggtctgagcccaataaagactgttaattcctcaaaa

SEQ ID NO: 645454 - DNA, 191 bp, Homo sapiens
taaggaagggtccacaagttgggagagcccaagattgagaacaataatgaacacttattagtatgaacaattagttagaaacagataatcacaaacaagctgagggacacaatgacctcattccacacgtagcgcaccctcagcaggaccctctaaaactttcctccagacccttgacctcatttgcagag

SEQ ID NO: 645455 - DNA, 592 bp, Homo sapiens
ggggcccggaagtggtaggggcctcgggaagggttgttgttcatccgcttgcggtcgtacgctgtgaaggcatcaacatttctggcaatttctacagaaacaagttgaagtacctggctttcctccgcaagcggatgaacaccaacccttcccgaggcccctaccacttccgggcccccagccgcatcttctggcggaccgtgcgaggtatgctgccccacaaaaccaagcgaggccaggccgctctggaccgtctcaaggtgtttgacggcatcccaccgccctacgacaagaaaaagcggatggtggttcctgctgccctcaaggtcgtgcgtctgaagcctacaagaaagtttgcctatctggggcgcctggctcacgaggttggctggaagtaccaggcagtgacagccaccctggaggagaagaggaaagagaaagccaagatccactaccggaagaagaaacagctcatgaggctacggaaacaggccgagaagaacgtggagaagaaaattgacaaatacacagaggtcctcaagacccacggactcctggtctgagcccaataaagactgttaattcctcaaaa

SEQ ID NO: 645456 - DNA, 231 bp, Homo sapiens
  misc_feature (23)..(23): n is a, c, g, or t
cctagggagagatggcatgctgncaatcactatttctttaaatggaaggatttcttttcatggtctagcatttaaatccctcccaataggagctccctaagatagtgttggtatttcccagaaaaacaggattcgtggttaactattcctggcctagggagagacggcatgctgccaatcactatttctttaaatggaaggatttcttttcatggtctagcattttaaatc

SEQ ID NO: 645457 - DNA, 333 bp, Homo sapiens
  misc_feature (48)..(48): n is a, c, g, or t
  misc_feature (61)..(62): n is a, c, g, or t
  misc_feature (152)..(152): n is a, c, g, or t
  misc_feature (186)..(186): n is a, c, g, or t
ggcacgagcccatgtgacctcactgaggaaaaaggcatgccaaatgantcccatttatttnnttcataacattctcagagagttctggcagggaaataacagacaaatccttacctttatacagtgctttcctgctaaaagtacattctaantttcaactaggcacttgacaagtgtgtgaaattntgtgagcaagatggagaaacatagattggagagtggtgccgctggctggatgttagctaaggactatactcaaagagcatggattaaagagggcgaggtcccttgtagatgctgcaaaaatctatgtggagtggaattgaattgagg

SEQ ID NO: 645458 - DNA, 311 bp, Homo sapiens
  misc_feature (9)..(9): n is a, c, g, or t
  misc_feature (11)..(11): n is a, c, g, or t
  misc_feature (13)..(13): n is a, c, g, or t
  misc_feature (150)..(150): n is a, c, g, or t
  misc_feature (171)..(172): n is a, c, g, or t
ggtcgaccngngngcctgctcctgccgcgcgcacccccgggcattcggctccgcacggtcgcgccagctttcctgcacctgaggccgccgcagccgccgccatgggtgcctacctctcccagcccaacacggtgaagtgctccggggacnggggtcggcgccccgcatgcnngctgccctacggcttctccgccatgcaaggctggcgcgtctccatggaggatgctcacaactgtattcctgagctggacagtgagacagccatgttttctgtctacgatggacatggaggggaggaagttgccttgtac

SEQ ID NO: 645459 - DNA, 358 bp, Homo sapiens
cccacctgttctgcgaagtcggtcgctactagtggtatttccatcgattgctcaaacacaagtgtctggctactagaattaaactgactcgcttcatgcgactcacagtacattgagtcgtgtacccgttgtaggtaaatgtcggagctcgcagttaccaccagttaagagtatctgacagcagacctaaaatatcgcgtaaaaatgtaccagaatcactataataacactaatccttggcatatatatccgctaggggagattatatacgacgaaactttacaggcttcgacgcgagtcataacatagcatatgcaaatcaccactcgcggtataagatcctttttcaattgccctg

SEQ ID NO: 645460 - DNA, 142 bp, Homo sapiens
  misc_feature (135)..(136): n is a, c, g, or t
gcttaagagatgtgagcggtggatttacaggtgtttaatattattattatggtgtgggtttgtttctcatggtctttaggaaatattgagtaatttgtaatcaccgcattgatactataataagttcattcttanncttaca

SEQ ID NO: 645461 - DNA, 1250 bp, Homo sapiens
ggggtgcgggtgcccgggtgaggggcggagctgggggcatggcgctccggagtcggactcgctggctctgtattggcaccccgtcaggtcctggcggctctccgtgagcggtgcctagcattgagcgaacgactggcgagtgtctccgaccgccatggagcgggctactatgccgcgagacctggtaaccgtctgcacggtgcaggtcgatcgctctacccgcagatgtgacgggccattggtagcccaaaaccggatgaaaattggtccatcgagacttctccgggtgtctctccatttgtggatcacctttgctctaatagatccgggaccatctcagttacgccaaggaaccgtcttgggctggcctctatctagatggacagcactgagcattgatctgtggccatgcaggactgactgagtgactgatgagctacacacggtaacaagcttgactctcacccatagactggaagactacggaaggcgagggatgggatgcaatcttgctacttgatgaaatggctagggtcctaggaccatgtgtgtagcaagacatatcgtggacaactggaggtggcaagcaagacagattcagatgccaattgggtggccccactgttgtgctgccgtacactggttaggaccgtctgaggtacccgtgttagcctagagcacgagaagatatatccgcctcctgggtaggaccacagagcatggcatgtggcaatgggggctattggattctacggaccttgctaccttgggagacgcttccttgaccctttcccgaatggttgtacaaggccgcaactattcgtccccttggtcgcataccgatggaaccataagaaccgtagtggtaaagcccttgggaggcactttacaccaatgtacctacttgtggggaccctaacttggagtagaccaatttgagacaatttaaaaatgtaagaatggggggtaacattttctgagctcaaggcgatcacagaaacggaaacgggagaagagatcatagcacatcacccaagttgggatcatcacggagcgcaacgaggggagcataaaacgggtcgcatggcaaagaagaaaactgcccaccagggaaagccctatcgacgagcgttggaaatagcaggagacaccacagaaggcattttgggagagcaactcatgagccacagaaaaagataggcacatagaaagaaaaatcatagccaagggagcacggttggaagagaccg

SEQ ID NO: 645462 - DNA, 837 bp, Homo sapiens
cacacagagctgatctgatcggccggtgacatcactcagtgagaccggccgggcgcgtgggccctgcaggcgaggcgaggaggccagtgccaagttctccgtgacgtcccctggcagcccttccaggctctcgcacccgcaactggcgcagacgtaactagaccgccatggctgttgggaatcgtaatgtgcgccctggcggtctctgccctcagtccgggctgctgcgctctgagcgcctttctatctgtccgtcggtcctgctacagcgcatggatgccagcccgccttgagacctgcgtctccgagctcgactgcgccagcagtcagcggcgagtgacctatccaggcttccttcacctgactgaggaagactgtgccagactccaacatggcagcctccgcttcggggccgcccgtcgccggcccgcaaggggctgcagcccaatatctcccgggcgatctgaggttccaggggcacaggacgacgagcaggagaggcggcggcgccgctggccggacgcgggtccgctccgaggcgctggtgcacgtcgctggcgcaggagccggcgcgtcaaggccaacgatcgcgagctgcaaccgagatgctacaacttgaacgtcggcctggacgcactgcgcagccgtgctgacctcgttccccgacagagaccaagcgtcacgcaataatcgatacgctgcgcttcgcctacaactacagtctgggctctggccgagaaagctgcgcctggcggatcaagggctgccggaggcggtgccggggagcgcctctgccgcgcgagtgcgtcccctgcttgcccgggtccccaaggcccg

SEQ ID NO: 645463 - DNA, 318 bp, Homo sapiens
cacccccagaaccctcctcctcccatccctgcttcgaggggcagccgacagcccgagacgggcaacccatcctgacctgggatgtccccaaggcctggccccacagcagtaagccagggacgtggggacggggctccacaggcctttcaggttctgccgcagtgcggtcggctccgcctgctccttcagcctctgtcccacccacaccaaccacccacaggtcccgacggcaggcgcagggcggggctgtgtgggctgcgtactgggggtccaggctggtgagctgcgacaggaggaggctgctgctctcagtgatgg

SEQ ID NO: 645464 - DNA, 331 bp, Homo sapiens
cacccggctcaatcctcatttctgtctcaccattttcccctgtgtctcatgcggttactgacgggatttccccagccgaagccagctgtgggctcccgctcccgcacccactccccaggcctgaaaagtcaggttccaacgttaactggggaaaaaattggtccccctaaaagggagcaccacaagaaatcctttccggtgatccagagccactaaaaaacgggagctcgttaaaccttggtcatggagctgacgtggattaaagtaccctgtactgcagccctgttagtattgcaggatggagccccactgacactttaactagatcgcc

SEQ ID NO: 645465 - DNA, 316 bp, Homo sapiens
catataaagtaggtgcccagagttacactcagtgccagttggtggccagtctgccaatgtctacagtcgggccctcaattcaaacacacaacttgtcaactcatgcccattcacattttcaatcccagtcaccatttttcttctaatcatgcatggcagcacattctgcaatcttcacatttctgcagggggtttcaatgcacccactagcagcttgtcctcatcattcagtccgagtttcaatcactgtcatgtctcagtcagcatgggctcatcatcattgcctctcattctttgcagtgtgcattctggccgg

SEQ ID NO: 645466 - DNA, 187 bp, Homo sapiens
cgctattcaccacactggcctgactgtgcttaggagaacgtacctcgcctctgactcagtccggaaggcagagacaaggctgggccccgtgaaaagggagtcacagtgcagcgctgccgtgctgtggctaggtccgcctcgtcagcatcctgggacagccctgtgtggggtgaggtggagagcgggt

SEQ ID NO: 645467 - DNA, 909 bp, Homo sapiens
  misc_feature (230)..(230): n is a, c, g, or t
gttcacagtcacagaactaatcatatttatatcttcttcgaaaccacagttattgcccaccttggctatcatcacccgatgaggcaaccagtcagaacgcctgaacgcagtgcacatagttcctattctacttagcctagctagagatccacttgcccgctactcatcagtcgaactgaatttcagcactctacaacgaatcctagtgactctagctagaacattctacntactcagctctcactgtcccaagcaactatcaaactcgctgatccaacaactgaatatagattagctttacacattgaacttttatagttaaagatacctctttacggacctccagttatgactccctatatagtccccactgtgcagagagactcccccatcgactgggtcatagtatgatgacttgcgcgcaagttacgtacttaccaagtagagcggtctaataggaatatatacggcctctgactgcattctcaaccccctgagaatcaagattagcctaacccgtccgagtatctatccctatgaggcttaattattagtaagctccgtcttgactagcgacgacacacaagaaccgtaagaaatcagtgcaacttgcaatactcgtctcaagtacaagccgacgtagtcctcgctagttcacatggcaattaggtactatccaaagaccctctggaagcttcgaggcggtgcagtcgattcggcgataatcgcccaggacttcctgtcctcattactattctgcctagtcataactgtagacttacgaaggctctcgacagtcggcttcatagtgctctctcagggacttgaaggtctggtcccataatagctttttgatgacttttagcaagcctcgtgactcggttacccccgataataactactgggaag

SEQ ID NO: 645468 - DNA, 471 bp, Homo sapiens
acagtcaagaaccaccatggcagcccataatatgttttcttatttctgtattctccttgctgtggcgtctggagcccttacagacccagggagacactatcctcccacagctcactaattactaaacacagtgacagcccacttaggagccggcctcccctgtcagccaacccctcagctagttctcacaccaagcctatagatatatatgtgtgtgtatatatgtgtgtttatgtgtctgtgtgtatatatgtgtatatatcggtgtgtatatatgtatgtatatgtttatacatgtgtatatgtgtgtatgtgtgtgtatatgtgtgtatgtgtgtatatatgtatgtgtgcatatgtgtatacgtgtatgcatacatgtatgtgtatgcatgtatatgtgtatgtgtacatgtatatgtgtttatacatgtatatgtgtgtatgcgtgtatacgtgtatgtatacatg

SEQ ID NO: 645469 - DNA, 184 bp, Homo sapiens
aagaaggtgggagggtcatgacgcacgagttcagtcgtgactttctgggggcatcgcggcgtcccttttttgcctttaaagtaaacgtcgcccgacgcaccccccgcgtatttcggggtggcggaggggggggtggtggggtggtggggtgtggggggtgggggggggtgggtgggtggggggt

SEQ ID NO: 645470 - DNA, 430 bp, Homo sapiens
  misc_feature (72)..(72): n is a, c, g, or t
  misc_feature (146)..(146): n is a, c, g, or t
  misc_feature (176)..(176): n is a, c, g, or t
aaccattgaccccttcaaaccccatcgaggtttagatctccctcactgcccgagaaaggctgccctgtgtancctttttagaagaggagtgctgtttcctatactaacccagtcaggacctagtacaagatgctgctggacgaatnaatgaaaaagcttctggccgggtgcaagtntcacgcctgtaatcccagatctttgggaggctgaggcgggcggatcacgaggtcaggagatcgagaccatcttggctaacacggtgaaaccccgtctctactaaaaatagaaaaaattagccgggcgtggtggccggcagctgtactcccagctactcaggaggctgaggcaggagaatggcgtgtggggtgaacccgggaggcggagcttgcagtgagcagagatgatgccactgcactccagcctgggcgac

SEQ ID NO: 645471 - DNA, 913 bp, Homo sapiens
gctgtggccgctgtcgtcgattgttgattgttcgtgacgccggcctgtgcaggggccattggtcttcctcatcgcgcagctctagctgctgaatcgattcgcacgagcgatattcttcgtatcccggaggtgctgagaagcatgctcacggacgcatgtctcgaggggagagggcatagatagagtccaggtggctcatccacgcggttcgagcggagtcacgagacccgctagatttgatgcccttttggtgacaattgcagcacaagagcccagatacctgtaacgaaaaatgcaaccagtgatggaaaccctctgggaatcacagtcggaactcaccaggcgtgctagaccagggaacactggacttgaaagttatccatgcgcttctattgggactggaacttaacggtgccacggtggtcatctcataggacggtaagatgtcctagcgggatctggcgcatcttatcgagccatgagacgttccagaattcttttgtgctgcctaggcacacgtctacgcgaggcgacccgaacgagatttgcctgcatgacctttagggaggattgtcgacccgcgaagccgtgaaaggcgttgctcccccacgacataggataggccccgataccccaacaatgcaaggcaccaggcagcgaggcactggacgtcaggaacaataggcacgcacggcagcgacactgtggcccggactcgggggcaggcatggactacatgcacgggtggcactcatacacgacccgcaactaaaaaacacaactgaggggattggcccgtgcacatcccctggcgcaaaaaagcctatcacagaactgaagtccaccgtcgccgtcgaagtcacccccaacgcgcaaacaaaacaccacgcccccaccacaaccaaaaccaacc

SEQ ID NO: 645472 - DNA, 297 bp, Homo sapiens
  misc_feature (53)..(53): n is a, c, g, or t
  misc_feature (107)..(107): n is a, c, g, or t
  misc_feature (137)..(137): n is a, c, g, or t
  misc_feature (140)..(140): n is a, c, g, or t
  misc_feature (287)..(287): n is a, c, g, or t
tttcatattgagtgagggaaaaagaaaattacttcagggagacacactcgggngatcagcaccaaggcaggcatcgtcattctgcatatgcaggccttgactggcancaaagctgagtggggggaggggtacgtcantancacacagaaggatgaagggccgaatcagctctgggttcaacagcgactcctcaagaggccggtccacgtggaagtcatggatgtgggggggccctggatgggccttgggggcaggtccccctatacgctggggggggtggggctcanatggatgggc

SEQ ID NO: 645473 - DNA, 408 bp, Homo sapiens
  misc_feature (24)..(24): n is a, c, g, or t
gaggcccaagaattccggcacggnggtacccaatctgatgactgttattttcttgcctaattgccctagctaaaacctccagtactatattgaatacaaatggtaagagtggatatccagccaggcacagtggctcacacctgtaattccagcactttgggaggccgaggcgggtggatcacctgaggtcagaagttcaggaccagcctggtcaacatgatgaaaccccgtctctagtaaagataaaaggaattagccaggcgtggtggcgagcgcctgtggtcccagctgctcggggggctgaggcaggagaatcgcttgaacccagaggttcactgcagaggttgcagtgagctgagattgggccattgtgctccagcctgggcagcaagagcgaaacttcattcc

SEQ ID NO: 645474 - DNA, 170 bp, Homo sapiens
acccccgtttttttttaaccctgccccccccttagtccccaaattaggggaggggggggtttatttttaaagtcccggcccttgggtggggcccccccccaaaaattcccccggggggggggggggttttttaaaggggtaaattaataataacccttgtttaaatttta

SEQ ID NO: 645475 - DNA, 953 bp, Homo sapiens
ctcctactcctcatagtacccattctaatcgcaaggggattcctaatgcttaccgaacgaagaattcgtaggctactactacagactacggcaaaggaccccaagcgtgtgtaggcccctagcgggctaagtactgacccttcagctgtacgccatgataactctatcatcaaaagagcccctctatagacccgccacagtttgacatcgacgcgctgctacgaatacagcgcgctcccgcaacctgtgagtcgtctcacctatgcgcctccttcatagctatgagaccccccacctgcaactcggagtaatacactgactccccgtgggtcatcgctcaagcctaggagctccggtatagggttcttagtctcacgctgcgtagccagctatcgcgttaacgtcaatcgctgctgtagtcaggtttagacgtcagttacgtcaatcactaagtccactgatctgggacgtcgtgaaacaacacgtagacccaagaaattccgtcatcatgaattcagcctacctcttcgattggtagttatgctgtaattactaatagagtggacatcggtcttgaaacccgtctctcaaccctttattcacaaagaggagagcaaacacctcatgcattactccctggcatctatgtaccctggggcaacgaatatggagtggaattctcacaacagctagcgagagaccgaccggaatcccgcttgccgaccttgccggcagggcgagtccgagaatcagtcttcaggcttcggaaattcgactctacggctgtagggcccgtgacggtccttatggctggcatagccggaattgagcaaaacgttcctataagagaattgccttacacctgtacaaattcttcctaggggaaaacatatgaggcattctcgcctgaatcgaacaaaggttttgggcaaccaggaccaaaatataacccc

SEQ ID NO: 645476 - DNA, 100 bp, Homo sapiens
  misc_feature (44)..(44): n is a, c, g, or t
  misc_feature (87)..(87): n is a, c, g, or t
atgctttgtatgttagttctcacataatgcaaattgtggctctnctgatggacaagacctcataactgtgattaatatcaataaaanggggatgttgtgg

SEQ ID NO: 645477 - DNA, 718 bp, Homo sapiens
caaaagctcactagctggaacgatgatttcgtctcagttggtactcctaaataagaagacaggaaaacaccagtaatggtgaaggtcttgataaaaggagaggagcttcacacattagtggtgtgatcctgtcttctctttagtatgatccctcatagcctcactaactggcaaggatgattgtagtctcaggtgttgtactccgtacaatatacaacagttaaactagcgacagcctcgttaaagaaccgacataccgaagaaatggagcgggtctgcttcgatgaggtcctcccgctctgaggaggcccaacagattaaagcatgaccgcagaagtttgctgtgcgacaagagtggttcaccttgtgagcgtgaggatcgcgatataaaggcctcagagcgtggtgatccgcacgctagtggaccatatgttctttcgcactgcggcaaaatatacgggctaggcctagggcgagatcttggtggtgacatggatgcctcatgctcttctgggggcgtgatgcctaggtgtgtccaaactgttgcctccccgacgatgttatagacgcctacttgcggattccactttaaaagtgttctgaagcgctgtcctcctcgctgttctaccctaagtattggtaatgcctggacgggtctaaggacgattgggcttactcgggactgccattctatgaaaggctgttttttgacgaccct

SEQ ID NO: 645478 - DNA, 410 bp, Homo sapiens
  misc_feature (58)..(58): n is a, c, g, or t
ctaattgcttcagttattgaatggataatatcgtggcagttatagcagaagtaaaganagtcgaacaagagccccaccgccttaaacaaacaaacaaaaaagggacagcgtaaacaatgcaggccgggtgcggtggctcacgcctgtaatcccagcattttgggaggccaaggcgggcggatcacgaggtcaggagatcgagaccatcctggctaacacggtgaaaccccgtctctactaaacaaaatacaaaagttagccaggcgtcgtggcgggcacgtatagtccctgctactcgggaggctgaggcaggagaatggcatgaacccaggaggcggagcttgcagtgagcggaggtcgcgccactgcactccagcctgggcgacagagcgagactccgtctcaaaaac

SEQ ID NO: 645479 - DNA, 397 bp, Homo sapiens
atggtagtgatggttgcacaacactgtgaatgcacttaatgccgctgacttggcactaactctcaaaaatggagaaatattatttctatttttccacaataaaaaaaatgaaaataggccgagcgcagtcgtcacgcctgtaatcccagcactttcggaggttgacacgggtggatcacctgaggtcaggagtttgagaccagcctggccaacatggtaaaaccccatttctactaaaaatacaaaaattagccaggtgtggtggcatatgcctgtaatcccagctattccagaggctgaggtgggagaatagctggaacctgggaggcagaggttgcagtgagctgagattgtgccactgcactccaggctgggcgacagagcgagactccatctc

SEQ ID NO: 645480 - DNA, 418 bp, Homo sapiens
atatgagaaagccagttgtatttatttctgcgtatttgtattttgagcaatttattttttattggtatagaatgacccactgtgctctagagccacgggttagttccctgccccgtctccatctccctgtctgcactgtctctcccagaggtgtcggctggtgcttctttgcagtgcccggtgctgtgtcatgcccgtttggctgacccagccccggctgtgtctgccccatcccagtgtgactgtcgctcttggaagttcctccgtgtctccttggtttccttaggtgacttgtctttgccccactccctgcagtccgcagcacctgtggtctccttccctctcctcccgcttctcctcagacgtcatctgttcttactagagttgtcccccttgcccccaggttccagggttccta

SEQ ID NO: 645481 - DNA, 1259 bp, Homo sapiens
catgaatgttgatccctcgctatcagatatgacatacctgagtggcgctcagatgagagagacaaagtcaaatatacagtgcacacaaagaccacactgcccacgtgtcagaggccagagttttctgttacaaggcaacatgaagactttgtagtggctacatgacactcattattgacaacacacagacgtatgctagggctatatatattccaccgtgcatcctacgcaagcccagacatacgactggtacctcgagcagaagatgcagaaagcatgggagaaggtgacagcggctctaatgacccagacgacgacactcacgccaagactgacaccaagaaactggaagcttgaggtatctcgctgggctaaacaaaaagatctagtgtacataccacaatgacagtctaaacattacagacggcattatgtcttactcaacccttggttactcagataaaagaatcgcacacaattcaccagtaaaccctaggacatactgatcaaggactactacaaggatgcagaagggcgacccacacacccctaacagacagaacagatccagcgcggcgcatccactcacaaaacaaacaagtggaaaggcaacaaagtggcactgcagtcaaacgcacccattgaacaacccagggacagttcaccccaccgggataaacatgcaacacccaaaggcagacccacacaaacgaacgaacaacgtcccctgacgtcaaccctgcaatcccacaaggaggcactccccaggaatgaccaaggagggaagaaaacaacgtggaccaacacgcaacccgacacctccataacaacgagaaaggccggcataacctcaccgttcgccaaagggcagcccggctaaaacaaacccgggacaatagaaaaagaccaaagggagaccacaagaggtaccccaatacacacagccgacggaacgaaataaggaacaccaaggaagagaaacgaaaaacaggaccccgaacaccacaaaacaaacgaagaggacggaaagagagggacacgcgggaagaacaggtgaccaccaaatgaccaggtaagggatcaaagccgagctgacaaagcacaacggagcagacgcccaacagagtacggaacagcccaaccagacaaactgctggggcatgcaccaccaggaagagcgaaagacagcacagacaagaaaagaaaaaacatacagcagcgaagcagaggaaacaatcaacgaacggaggcacaacaaa

SEQ ID NO: 645482 - DNA, 300 bp, Homo sapiens
  misc_feature (258)..(258): n is a, c, g, or t
cagcacatcagcagactgtaggttctagattctggttatttctgcgtccagagaacatgataaactgtctctggagtccgaccggaatccgtggctgccatgtgaacctgagcatatcctcagactctgccaagccccgggttcctcacctataacgtgggcccgaagtttacgtacctgtcacgttgttaccagcatttctcacgattgtgtcttctgacctgtcggacacgcaggccagtttcgggttatacgcanacgtatgtttctttgttgaatcgcattatttccaggcagcac

SEQ ID NO: 645483 - DNA, 578 bp, Homo sapiens
tatccccggttctgggtaagagccaggccctatataagtgactaagggggctcatatttgtgctttcttaggggagacccgatacctccgttctgccaagaagtttaaaagagagagatagcatgggcgttgcagtctctttgagaggggctacacaggagcagatcattaacacattgaaggagagtggacggttttagggataaggtacagaggtcatgagcaagggcctgtccaaaaagatgggggctgtctctgaaaccttgaggtagtacgcaccaggtgagctgatgtgaaaggtgggtgtcggggttttcccatgtaaaggcaaagaggttttgggaatcagggtgtaaaggaattgtggaaaaaagcatcctttaggtatagaacaggaaaatgggtggtattggagggaattgcagaaagtaaagtatatgggttaggaactactggacatactgggagtacagcttggttaatgagcctgaggtcctggactaagtgataagtccatctggctttaaacaggtagaactggtgtgttaaaggagagttcctgggtagtgaggtgagta

SEQ ID NO: 645484 - DNA, 695 bp, Homo sapiens
  misc_feature (350)..(350): n is a, c, g, or t
cgtccgttttgagtacatgtagagaacaatatatacaccaccccgttgggggtagtgccaccctcgtcgtcgtctactacacgctctggtggtgtagtaatataaggaggagatgtgattacgatgggcgtccccccatctataatacaatagtactattgtgctttatagaccaaacaattatagtggggtatcctctactcttgctttgtagtatattgtacacatgtggtgaagaataaactaatatagggctactattatataatagaagactatctctctactattatttagagaccaccccatctctatatttaatattttctataaacaacttctttcagagntagaaatatatataactctatgtgtattaacacaccaatcctgatctatctaaactccgtagcgccccttgaaaacaaatatatctcccctcttattttgtcgactctcctttgtgtttgtctaatagtatatataaacgtacacgcgcctcttgatgtccctcagaatatctcgacatatatccgctctcatctctttctctgtttaagagaacatatgaagcatatcccccctattctcccacgatcatcactctgtctgtgcacacagagacatcaccaccttgttcggagatagacccgttccaatttttaccctcaccccgctcaatcaatgtcacaaaa

SEQ ID NO: 645485 - DNA, 1245 bp, Homo sapiens
ggagaactagtctcgagttttttttatggtttttttttcaaaataaaaacatttcagctcaaatttaattaagttaattactatttttattctttttggtagcatcggagatctggatatgtcactcatagcgggcctcaaactccgggcctcacagcgattctctggcctcagttggcaaacggtcggggattacagactatcaccaatgccaggccacaacccacatttgaaaaagaaaatctaaggggccttagaagatgttggcaagtcagctgaccaaggtggtcacctccttaaggagggcctcgtgaggcccgatgaaaaggggcttatataaacaggctcatgaccagctcgtgccaggtgatgaccatgtgtcaagtcgtcactgcgtgtccccaattcccggacccagggtggctctgaataagcttcagctaataaaagaacaaagacggggggcacaaggggtccccaaatcttggtggcaaatccagtgagaaacacccttggcacatcatctggtgctcagctggatctggcaggtgaggccacactcaaacctggcaccaccccaggcaacgcagtaggcacaggacaccgggggcctacagggtaacatcaacggggaggcctaccgcactgaacacaaaaaaaatggggcctgggcacaagggacaagacctgtcctactaactcacttgctagcaacacctagatctacacacagacgcctgggtccacctctgaatccgtcggaagagccacgacaagggcttggaacacttctcacaatgaagagagacgcccgcacacaaaggggtacacaggaaatgaccaatgattggggggcccgaacaaccccggaaaagtgcccccgagagaggagacaggacaatcgcgacgatcggagcaactggatcgacaagaccggggcaaccagaagccccccaaacagacgcaaaccaggggaaaccccacgagaaaagccccacaggttcgaggaaccccggcgggggaaagctgaggcccacaaggagggtaagtcaacacggatagaggaacaagaccgccgtgcgtaaaaagggaggaacagggaggcgataaaaaggggcgcccatgtaaacaccgaaagagaacaaacgcccccagagggtgaacagctaacggcaggcgggtcatgggcaccgtaatgccaagaacaactattgcaaaagaggcttggccaccgcatatgaggag

SEQ ID NO: 645486 - DNA, 212 bp, Homo sapiens
tcggagatggggtctcactatgttgcccaggctggtcttgaactcctgggctcatgctgcatcctgcctcagcctcccaaagtgctaggattgcagatgtgagctaccatgcctaggctgctttaattcattattctttattttcatgtttttaaataatattattatcttgattcttcttgccttttcagccctacatattgcctgctgac

SEQ ID NO: 645487 - DNA, 534 bp, Homo sapiens
gctcccaaggggagtaggacaagacaacttggctccagaatgatggatcttctctaactgtcatagagcacatgtccactccagaatcaacaattgccgtgataatcctcaacagtgtggaatctaatctcagcatcgtctatcatccagctttcaactcgagctcgacattcaaaagggcaatcttgggattgtggtactttatgggttgcatttcaaacccagacgtaagagaaagtctacattgaatgaaacaccagaataccagctgagaatcctcgagggctccaacctgtaacttcttgattccaatcattctacgcagcagcaaatcatcgagcatcatcactgcatacaccaccatcttagcaaagaaagctttctgctgggagatcagcttggagctcagagcggtcatggcacacttttccagcagattcctctgctccaactttatctgccttcttcacggtcacagcaatctctttgatcttgttaactgccagctgggtggctgtgcggacaagctcgaat

SEQ ID NO: 645488 - DNA, 671 bp, Homo sapiens
tcacaattttcttcaagagttttaaactattttatttattaatattttaaattaacacccgtgaatctcccagaaatttccagaatagcgtgctccacactctccctctcccgcggggcacaggaggagagagggaggcaccttcaggggcaacacagagggggggtgggggtgctcgtgcgcggggaagcctcttcgcgaactctccccacaagccgcgccatacgtggcgggggaggctccacaggagagggaaggggtggcgggttgggatccacctcttcagagaggtgaaacccccacaaccacgacccccccgcggcgaagcgggagaggcaatatgaccacatattcaacaagcgcgcgaggcgtgagcgccacccacgccacaacgagccacacaacccggtacaaggaccaccaccacccgggccgaagaccccctcgggggcaccacatacacgtacgaaacgagcgcaagagccccgacacaactgtagcgaccccagccaacacacccccaacctgccccgaagcgaaaacatcaaccccacgcaccccgccgaccccctctgctacaaccaccgtcaccccccagcgacccctcacgccctgcacacacccctcccctctccaaagccaccctaccacgactacccaaacaacaagga

SEQ ID NO: 645489 - DNA, 87 bp, Homo sapiens
  misc_feature (13)..(13): n is a, c, g, or t
tctagaggatccncttcattccaggccttcatgctgtgtatagcttctgcgctacagcctaggcaacgtagctgagaaccatctcag

SEQ ID NO: 645490 - DNA, 194 bp, Homo sapiens
ctcctacgggaacttagcaccaaccttacatcccccgccccatctttccacgcctgcctgttgtgttcaggaggggacactctctcccgcattacgggctgcctgacaccacagcttgtaatagcaggcgctgtctccactgctagagaaacgtacccctggcctgaaggtatcagaggtggcaagacctacaa

SEQ ID NO: 645491 - DNA, 111 bp, Homo sapiens
tgaaagggggtggggaaaaaaaaaaagtgtattcacttaaagatactatatcacgtttggtatatcattaaatctttaacaagaatatgaaataaattcattggttcacag

SEQ ID NO: 645492 - DNA, 184 bp, Homo sapiens
attcgcgtccgcgtcgacaactttggcatcaaaaaccaaataccacatgttctcatttataagtggaagctaagctataggtatgtaaaggcataaagagtgctataatggacattggagactcagaagttgggaaagtgagaggggagtgagggatgaaaaactccctatggaatacaatata

SEQ ID NO: 645493 - DNA, 182 bp, Homo sapiens
tcgaactacctgggctcaaggtctcaccgtcccaaagcactgcgcattacagatgtgagccaccatgccccatcttattagaaggctatgagataggacagtggtgtggtgatatctgagctctagaaagatcattcacaaggcagtgtccaagatggcctagactacagacaaggaacata

SEQ ID NO: 645494 - DNA, 362 bp, Homo sapiens
tgcgagctactctatgagtatccccgtcggcggcagagagaacagtgtcaagcagacttgtggccaccagcgccaagattaggatggcagcaggcactgttcacagagatgtggtctgggcccactggtagttgacggacaaattgctggctgccatggacatgcccttgtgagtaaacagaggacacagaaaagggtatgaacagacctcttttgatagtacggtccatggacatggcctctgtggcacttgggttctgtggacagggcctccattggttgccagtgcagtgttctgtgccttccgtggctgtgggttgagtggtctgtgcctccggtggcttctggtgcagtggtctgtg

SEQ ID NO: 645495 - DNA, 140 bp, Homo sapiens
cccgatggcgcgccagccaagtcctctctatctcttatgctttctatcctctgatctctgcttatcacctctcttgcgttattcaggatctccttccctcctttctcgtccaaatcatgaaatggtttgggcctatagtc

SEQ ID NO: 645496 - DNA, 719 bp, Homo sapiens
gatagtactcacgtggtggctgacggtggtaaaggggtcactgtcgtctgacaaaatgttaatcctaccaggaacgttagtctttcatacgaacatgtaagatgtgactggtgagaattgcttgacatcgctgtagtcgagtagagactatgcctcggagaaggccccgagggcgaaggtaccgaaagcacagtaatcactggtgtcgatattgtcatgaaccatcacctgcaggaaacaagtttcacaaaagaagcctacaagaagtacatcaaagattacatgaaatcaatcaaagggaaacttgaagaacagagaccagaaagagtaaaaccttttatgacaggggctgcagaacaaatcaagcacatccttgctaatttcaaaaactaccagttctttattggtgaaaacatgaatccagatggcatggttgctctattggactaccgtgaggatggtgtgaccccatatatgattttctttaaggatggtttagaaatggaaaaatgttaacaaatgtggcaattattttggatctatcacctgtcatcataactggcttctgcttgtcatccacacaacaccaggacttaagacaaatgggactgatgtcatcttgagctcttcatttattttgactgtgatttatttggagtggaggcattgtttttaagaaaaacatgtcatgtaggttgtctaaaaataaaatgcattta

SEQ ID NO: 645497 - DNA, 781 bp, Homo sapiens
  misc_feature (11)..(12): n is a, c, g, or t
  misc_feature (17)..(17): n is a, c, g, or t
  misc_feature (26)..(26): n is a, c, g, or t
  misc_feature (29)..(30): n is a, c, g, or t
  misc_feature (43)..(43): n is a, c, g, or t
  misc_feature (52)..(53): n is a, c, g, or t
  misc_feature (71)..(74): n is a, c, g, or t
  misc_feature (76)..(76): n is a, c, g, or t
  misc_feature (78)..(78): n is a, c, g, or t
  misc_feature (82)..(82): n is a, c, g, or t
  misc_feature (84)..(84): n is a, c, g, or t
  misc_feature (101)..(101): n is a, c, g, or t
  misc_feature (132)..(132): n is a, c, g, or t
  misc_feature (134)..(134): n is a, c, g, or t
  misc_feature (136)..(137): n is a, c, g, or t
  misc_feature (142)..(142): n is a, c, g, or t
  misc_feature (144)..(144): n is a, c, g, or t
  misc_feature (146)..(146): n is a, c, g, or t
  misc_feature (153)..(153): n is a, c, g, or t
  misc_feature (156)..(156): n is a, c, g, or t
  misc_feature (167)..(167): n is a, c, g, or t
  misc_feature (194)..(194): n is a, c, g, or t
  misc_feature (203)..(203): n is a, c, g, or t
  misc_feature (246)..(246): n is a, c, g, or t
  misc_feature (257)..(257): n is a, c, g, or t
  misc_feature (268)..(268): n is a, c, g, or t
  misc_feature (305)..(305): n is a, c, g, or t
  misc_feature (361)..(361): n is a, c, g, or t
  misc_feature (435)..(435): n is a, c, g, or t
cccccaataannccagncaataatgnagnngctcagatgacancagtcccanntgtctaagtcctggtttnnnngnangacnancagaaccagttatgatnacaggtgatagatccaaataattgccacatntntnnacatntngnccatttntcnaccatccttanagaaaatcatatatggggtcacaccantcctcacgntagtccaatagagcaaccatgccatctggattcatgttttcancacataaaganctggtagtttntttgaaattaacaaggatgtgcttgatttgttctgcnagcccctgtcataaaaggttttactctttctggtctctgttcttccaagtttcccntattgattgatttcatgtaatctttgatgtacttcttgtaggcttcttttgtgaaacttgtttcctagcaggtngatggttcatgacacatatcgacaccagtgattactgtgcttttcggtaccttcgccctcggggccttcaacaggaggcattttccacccatgagcgagtcatcaatgttaccttctgtcctactgaccatcttcccctccacctccaggcacaacccgtccgcgatctcccggatcttgtagatgtcggagaacatctcatcgtggctgatgaggtcccggtagataatcatgatggcgactgaagggagacgacgacggcgctagcttagcacgagcctgaaactcggagcgagcgcggtgcaccggagcggcgctcggggggagggggagcgggcggaaaagc

SEQ ID NO: 645498 - DNA, 449 bp, Homo sapiens
tctagagatcccaggttcagcatgtatatgtttgggccccctctccaaaggttcttgtgggacagtgtctaattccagggggcggggggggtgtggagtagtagtggggattaaaaagggccttgggaggggcgggaaggaaatgcctgagaagagggcaagtaggactggaatgggctcaaataggatggctcagggctagggctggcaatacggtagtagtagtgggggcccaggaccaaccctcgctcttgggcgtagtctggcatcttttggggtgtgtggaagaagaggatcgggttggcctcagtgaaatggatttgctcgtaggcttcctcgatgcacccagggatctcatccctgatagggtcgagcaggatgtcattgaaaagggggagctctcggcggggatggacccttggccaggacatttggtgtagttgcctcaa

SEQ ID NO: 645499 - DNA, 841 bp, Homo sapiens
agcggcgtttttccgccgcgtcccccctccccccgagcgccgctccggctgcaccgcgctcgctccgagtttcaggctcgtgctaagctagcgccgtcgtcgtctcccttcagtcgccatcatgattatctaccgggacctcatcagccacgatgagatgttctccgacatctacaagatccgggagatcgcggacgggttgtgcctggaggtggaggggaagatgagtcggtcgggcctgcgcgtgggggagatccgggccgagcgggactcgaggtattcctccgcatcccaccgccatgaggttgtgcaaatcctccccgaacgatcatcctggcggaggagacgctcattatccgggcattgaggattaacatagaaaactggaggcggagctgatcctggaaataggcccgcacgactcgagagacccaatacactcctcccggggtatgtaccgaggacatgactgcttccaggcattaggcagcctggagatccattcacgagatagaacctggtacaccacattacacaagcggaggcatcaacaatgccacgaaacctgggcaacacacagtagtcatggaacgcccagatacgagctaccgggccaacacagaacaacatcatacagcaaggtatacgagcacggaagagaggaaaatcaccgcggtacacaaacgtttaatgccaccaaaaactggtagcaatcaaaatagttgtagaggcaagaaacatacgaaatacttctttatccgtgaactactgggagtgaaaaggtgattaggatggcataagtgtcataatgaaggatacttggttttattaaatgcaatgg

SEQ ID NO: 645500 - DNA, 346 bp, Homo sapiens
agcggcgtttttccgccgcgtcccccctccccccgagcgccgctccggctgcaccgcgctcgctccgagtttcaggctcgtgctaagctagcgagcgagtcatcaatgttaccttctgtcctactgaccatcttcccctccacctccaggcacaacccgtccgcgatctcccggatcttgtagatgtcggagaacatctcatcgtggctgatgaggtcccggtagataatcatgatggcgactgaagggagacgacgacggcgctagcttagcacgagcctgaaactcggagcgagcgcggtgcaccggagcggcgctcggggggagggggagcgggcggaaaagc

SEQ ID NO: 645501 - DNA, 323 bp, Homo sapiens
tttaaccccccccctttttttttttgggggagggcccttctttttccctgcccccccggggggggggtaaggcctgttttttggttcaattttcaggggaaaattttttttgtttttgccccaaggagtttttattgtttgtttttttggaagtggggccttggggccccccccttcccctttttttttcccccccctttgagggttggggggtttttttttccccggggggggggggggggggcccggggtttccttttttcttttttttggccggttttgttcagggggcccccctttttaagaaacataaagagaagtaa

SEQ ID NO: 645502 - DNA, 843 bp, Homo sapiens
agcggcgtttttccgccgcgtcccccctccccccgagcgccgctccggctgcaccgcgctcgctccgagtttcaggctcgtgctaagctagcgccgtcgtcgtctcccttcagtcgccatcatgattatctaccgggacctcatcagccacgatgagatgttctccgacatctacaagatccgggagatcgcggacgggttgtgcctggaggtggaggggaagatggtcagtaggacagaaggtaacattgatgactcgctcattggtggaaatgcctccgctgaaggccccgagggcgaaggtaccgaaagcacagtaatcactggtgtcgatattgtcatgaaccatcacctgcaggaaacaagtttcacaaaagaagcctacaagaagtacatcaaagattacatgaaatcaatcaaagggaaacttgaagaacagagaccagaaagagtaaaaccttttatgacaggggctgcagaacaaatcaagcacatccttgctaatttcaaaaactaccagttctttattggtgaaaacatgaatccagatggcatggttgctctattggactaccgtgaggatggtgtgaccccatatatgattttctttaaggatggtttagaaatggaaaaatgttaacaaatgtggcaattattttggatctatcacctgtcatcataactggcttctgcttgtcatccacacaacaccaggacttaagacaaatgggactgatgtcatcttgagctcttcatttattttgactgtgatttatttggagtggaggcattgtttttaagaaaaacatgtcatgtaggttgtctaaaaataaaatgcattta

SEQ ID NO: 645503 - DNA, 119 bp, Homo sapiens
acagaggtcagcttcaggttgtcctccgcattccaggttcagcacatgcaggcaggtctgcggctcaggcagtccaatcacaagtgcgattggacttcagatgggacgcaacatcattc

SEQ ID NO: 645504 - DNA, 369 bp, Homo sapiens
gtcgacgccagaaggaggagccggagagacaagctaacgtgcagaggatgtgccagctgtccagactggatactctctggagtagcaaaaaccaaagggtttcttatagctcttatcaactacaaagaaggctagaaggtagctgggtttaagtcaacaagcttctcaattaagcacgtatcatggcgcgaagcagatcaccgcacctcggggactcagcatccccaaggatatgtggtatagtcctcctaagagccagcacatgaaccggctcagggggcacacgcctttaatcccaacactcgggaaaccgaggcaggcagatctctggaattcgaggccagcctgatctacagagtgaggtcgacg

SEQ ID NO: 645505 - DNA, 931 bp, Homo sapiens
  misc_feature (25)..(25): n is a, c, g, or t
  misc_feature (33)..(33): n is a, c, g, or t
  misc_feature (36)..(36): n is a, c, g, or t
  misc_feature (66)..(66): n is a, c, g, or t
  misc_feature (81)..(81): n is a, c, g, or t
  misc_feature (83)..(83): n is a, c, g, or t
  misc_feature (91)..(92): n is a, c, g, or t
  misc_feature (110)..(110): n is a, c, g, or t
  misc_feature (118)..(118): n is a, c, g, or t
  misc_feature (123)..(123): n is a, c, g, or t
  misc_feature (141)..(141): n is a, c, g, or t
  misc_feature (149)..(149): n is a, c, g, or t
  misc_feature (155)..(156): n is a, c, g, or t
  misc_feature (163)..(164): n is a, c, g, or t
  misc_feature (171)..(171): n is a, c, g, or t
  misc_feature (174)..(177): n is a, c, g, or t
  misc_feature (180)..(180): n is a, c, g, or t
  misc_feature (219)..(219): n is a, c, g, or t
  misc_feature (227)..(228): n is a, c, g, or t
  misc_feature (233)..(233): n is a, c, g, or t
  misc_feature (251)..(251): n is a, c, g, or t
  misc_feature (257)..(257): n is a, c, g, or t
  misc_feature (262)..(262): n is a, c, g, or t
  misc_feature (268)..(268): n is a, c, g, or t
  misc_feature (274)..(274): n is a, c, g, or t
  misc_feature (296)..(296): n is a, c, g, or t
  misc_feature (312)..(312): n is a, c, g, or t
  misc_feature (314)..(314): n is a, c, g, or t
  misc_feature (316)..(316): n is a, c, g, or t
  misc_feature (319)..(319): n is a, c, g, or t
  misc_feature (321)..(322): n is a, c, g, or t
  misc_feature (329)..(329): n is a, c, g, or t
  misc_feature (332)..(332): n is a, c, g, or t
  misc_feature (336)..(336): n is a, c, g, or t
  misc_feature (360)..(360): n is a, c, g, or t
  misc_feature (399)..(399): n is a, c, g, or t
  misc_feature (414)..(414): n is a, c, g, or t
  misc_feature (427)..(427): n is a, c, g, or t
  misc_feature (450)..(450): n is a, c, g, or t
  misc_feature (469)..(469): n is a, c, g, or t
  misc_feature (477)..(477): n is a, c, g, or t
  misc_feature (511)..(511): n is a, c, g, or t
  misc_feature (547)..(547): n is a, c, g, or t
  misc_feature (562)..(562): n is a, c, g, or t
  misc_feature (572)..(572): n is a, c, g, or t
  misc_feature (585)..(585): n is a, c, g, or t
  misc_feature (604)..(604): n is a, c, g, or t
  misc_feature (816)..(816): n is a, c, g, or t
  misc_feature (929)..(929): n is a, c, g, or t
tatgggtatatggtatttttttgtntagatatngangttgaagtttatatattttatatgtaaggntaatttagttactangntgatttannaatttatatttataagtnttagattntttanttattataaatttttgtnaagtagtnttattnntttgttnntttaggnttnnnntanaatatattgttattttttatattttttttttattttttnttacgatnnttgcnagttattttttttttttntaggtnttgtntttttngtttantaatagcacaaattatgagganattattaagtggtatntngnttngnngttgatnttnttanatcaagtgctggtacatttatctnttaaggataaatttaatgaggtacttgatattatgaacngggcggtgttcttcnacgttggtaagtnaggattttattttggatgttctngtttaagttttagattttncacatgtnaatgatatagaattagagttttctggttcctgtnggcagcctaaatcttaggttacacttttgcacatantaacagattcttacnctgctgaatngggtatatggttngctggtattcattgttcangtttattatgactgagagggggattttttctgagtggagactgacttaagctggatttagatgatgttagtctaaccccaggccccgccctcttaaccactgtgctgtgtggccttttaaggctcattcatgcctgagcatgctgcttaggtgacgcatcttacagtgtggagtttggcacgcggtctgacacttggtgattgctcagcctntaatcagccccattttacctgttaaacagtaagatctactttataggctaaaagggagagtgagttcatgcttgtgtatagccttcaataggtggtgtctgtgttgtcaaaanag

SEQ ID NO: 645506 - DNA, 1268 bp, Homo sapiens
agcggcgtttttccgccgcgtcccccctccccccgagcgccgctccggctgcaccgcgctcgctccgagtttcaggctcgtgctaagctagcgccgtcgtcgtctcccttcagtcgccatcatgattatctaccgggacctcatcagccacgatgagatgttctccgacatctacaagatccgggagatcgcggacgggttgtgcctggaggtggaggggaagatggtcagtaggacagaaggtaacattgatgactcgctcattggtggaaatgcctccgctgaaggccccgagggcgaaggtaccgaaagcacagtaatcactggtgtcgatattgtcatgaaccatcacctgcaggaaacaagtttcacaaaagaagcctacaagaagtacatcaaagattacatgaaatcaatcaaagggaaacttgaagaacagagaccagaaagagtaaaaccttttatgacaggggctgcagaacaaatcaagcacatccttgctaatttcaaaaactaccagttctttattggtgaaaacatgaatccagatggcatggttgctctattggactaccgtgaggatggtgtgaccccatatatgattttctttaaggatggtttagaaatggaaaaatgttaacaaatgtggcaattattttggatctatcacctgtcatcataactggcttctgcttgtcatccacacaacaccaggacttaagacaaatgggactgatgtcatcttgagctcttcatttattttgactgtgatttatttggagtggaggcattgtttttaagaaaaacatgtcatgtaggttgtctaaaaataaaatgcatttaaactcatttgagagaatgcctttaagtttaatgcataatttaaagctaaattgatcctgtagctgtccctgggcagaagctagagcctgattgtgggctactactcatccaattaaccttctaccaggggacgactacttctgggactggagtataacacaagaattcaaggggttcttggattttgagctctgcactaaacgggaaaggaacatgcttcatagcagctgccacattcttgaatgtgtgaggccttacccttttatcacctacaaggagtccgttacttggcagaagatacccagagatcaagggctccttcgtggcaaaacactccaaagccaacgaaaaaaaaaacttttggggcgcccaagattcaaaattaggggggcccataacatttatccacaaactctccaggtgcc

SEQ ID NO: 645507 - DNA, 130 bp, Homo sapiens
ttacggatagctcgcggactcctcttggtatcgctctacttcatctataggcagatgcttgcttacgacagtgtagatttcgcggtagacacctgtgttattccatcaggttctctaccgcttcttcacg

SEQ ID NO: 645508 - DNA, 1019 bp, Homo sapiens
agcggcgtttttccgccgcgtcccccctccccccgagcgccgctccggctgcaccgcgctcgctccgagtttcaggctcgtgctaagctagcgccgtcgtcgtctcccttcagtcgccatcatgattatctaccgggacctcatcagccacgatgagatgttctccgacatctacaagatccgggagatcgcggacgggttgtgcctggaggtggaggggaagatggtcagtaggacagaaggtaacattgatgactcgctcattggtggaaatgcctccgctgaaggccccgagggcgaaggtaccgaaagcacagtaatcactggtgtcgatattgtcatgaaccatcacctgcaggaaacaagtttcacaaaagaagcctacaagaagtacatcaaagattacatgaaatcaatcaaagggaaacttgaagaacagagaccagaaagagtaaaaccttttatgacaggggctgcagaacaaatcaagcacatccttgctaatttcaaaaactaccagttctttattggtgaaaacatgaatccagatggcatggttgctctattggactaccgtgaggatggtgtgaccccatatatgattttctttaaggatggtttagaaatggaaaaatgttaacaaatgtggcaattattttggatctatcacctgtcatcataactggcttctgcttgtcatccacacaacaccaggacttaagacaaatgggactgatgtcatcttgagctcttcatttattttgactgtgatttatttggagtggaggcagggttcattttgaaggacacctcactgtgccttttgatatatgctatcacgattgcagtggtagaccacttttgtgtatacctgtagagctgtactgagccctctctttggggctctttctttctagggtagacgaggcccggaaacgagtctgttgtcatcgtgctcctcatatgtataatggtcccacaataccgctcaataccattttatacactagcatgtggtg

SEQ ID NO: 645509 - DNA, 1194 bp, Homo sapiens
agcggcgtttttccgccgcgtcccccctccccccgagcgccgctccggctgcaccgcgctcgctccgagtttcaggctcgtgctaagctagcgccgtcgtcgtctcccttcagtcgccatcatgattatctaccgggacctcatcagccatggtcagtaggacagaaggtaacattgatgactcgctcattggtggaaatgcctccgctgaaggccccgagggcgaaggtaccgaaagcacagtaatcactggtgtcgatattgtcatgaaccatcacctgcaggaaacaagtttcacaaaagaagcctacaagaagtacatcaaagattacatgaaatcaatcaaagggaaacttgaagaacagagaccagaaagagtaaaaccttttatgacaggggctgcagaacaaatcaagcacatccttgctaatttcaaaaactaccagttctttattggtgaaaacatgaatccagatggcatggttgctctattggactaccgtgaggatggtgtgaccccatatatgattttctttaaggatggtttagaaatggaaaaatgttaacaaatgtggcaattattttggatctatcacctgtcatcataactggcttctgcttgtcatccacacaacaccaggacttaagacaaatgggactgatgtcatcttgagctcttcatttattttgactgtgatttatttggagtggaggcattgtttttaagaaaaacatgtcatgtaggttgtctaaaaataaaatgcatttaaactcatttgagagaatgcctttaagtttaatgcataatttaaagctaaattgatcctgtagctgtccctgggcagaagctagagcctgattgtgggctactactcatccaattaaccttctaccaggggacgactacttctgggactggagtataacacaagaattcaaggggttcttggattttgagctctgcactaaacgggaaaggaacatgcttcatagcagctgccacattcttgaatgtgtgaggccttacccttttatcacctacaaggagtccgttacttggcagaagatacccagagatcaagggctccttcgtggcaaaacactccaaagccaacgaaaaaaaaaacttttggggcgcccaagattcaaaattaggggggcccataacatttatccacaaactctccaggtgcc

SEQ ID NO: 645510 - DNA, 1140 bp, Homo sapiens
ctctggtgccggctcattgggtggctcgttgggtggcacattgagaggctcttcgggtggctcctggcagcggcgcgtggcacgtggaggggaagatggtcagtaggacagaaggtaacattgatgactcgctcattggtggaaatgcctccgctgaaggccccgagggcgaaggtaccgaaagcacagtaatcactggtgtcgatattgtcatgaaccatcacctgcaggaaacaagtttcacaaaagaagcctacaagaagtacatcaaagattacatgaaatcaatcaaagggaaacttgaagaacagagaccagaaagagtaaaaccttttatgacaggggctgcagaacaaatcaagcacatccttgctaatttcaaaaactaccagttctttattggtgaaaacatgaatccagatggcatggttgctctattggactaccgtgaggatggtgtgaccccatatatgattttctttaaggatggtttagaaatggaaaaatgttaacaaatgtggcaattattttggatctatcacctgtcatcataactggcttctgcttgtcatccacacaacaccaggacttaagacaaatgggactgatgtcatcttgagctcttcatttattttgactgtgatttatttggagtggaggcattgtttttaagaaaaacatgtcatgtaggttgtctaaaaataaaatgcatttaaactcatttgagagaatgcctttaagtttaatgcataatttaaagctaaattgatcctgtagctgtccctgggcagaagctagagcctgattgtgggctactactcatccaattaaccttctaccaggggacgactacttctgggactggagtataacacaagaattcaaggggttcttggattttgagctctgcactaaacgggaaaggaacatgcttcatagcagctgccacattcttgaatgtgtgaggccttacccttttatcacctacaaggagtccgttacttggcagaagatacccagagatcaagggctccttcgtggcaaaacactccaaagccaacgaaaaaaaaaacttttggggcgcccaagattcaaaattaggggggcccataacatttatccacaaactctccaggtgcc

SEQ ID NO: 645511 - DNA, 1222 bp, Homo sapiens
ctctattttgtggtcgcttgcttcgtcccttttctctctcttttgcttttggtttctgtcatttggtttttcgttttatgtttgctttttctgtgtctcttcgtcttgtttcttcctttcttgttttctcctctttctgctcttgttctttcttttttttttctttgttttctcttcgtttcctctcttgtctctttttttctttttctttttgtgtttttccttttgttgtcctttttgtttttcttgtttctggttgtgttttgttttgtccttttgttgctttttgttttcctttgtttattctacttcattctctccttttttctcttttctttttcttgtttttttttcttttattcgcctggtgttggttttttttgtggccttgttttttgttgttcatgttccttgtgcttggtttgctcttttctattttttcctgtttatgttttgctttttttgtctgttgtttcttttgttgtttgtttctttttcatttctttcgtcttcttctttcccctgcttttcttcgtttgtggtgtgttttttcgctttttattattttgatttgttttttcttcggtgtgtttttgtttctggtttctttttgttcttgtgtctgttttcttgtcatgttttttgttgttttttcgtggtgttcattgtctctgtctagtgttttcctgtttccatgtgtgttgttttcttctgtttgtccctttctcccgtgtttctctttttctctctctatgttttgtttttgctgtctttttgtttcttttgtgtatttttgtgttttctgctccttctcttttctatggttgtttctctgttgtttgttttttatggtcatgtttgtctttggccttttgatttgcctttgtatgtgttttctctatatttgtttgtctctctcctgctgcctcccggcatttccaggtatatcttattggagcctcccccacttggccccggggttcacagtggtattttaataacttgcctcttcttcctcgtgaaacgggctcgggaaaggctgtgtgaggggagagaaagggagagggtgggcctgctgtggacacatggcataactcttttccacgccctaggagaggaggggctcctaaacacgtgtaaacttattgtgtccccgcgtaatttaatttgttgtaaataatttgagtatttttatattgaccaattaaatggagaaaatgga

SEQ ID NO: 645512 - DNA, 150 bp, Homo sapiens
aggatccccctgcaagaatggcattcaggactaggaagccgactaggaacatgattctcagggcgtgatcatcaaaggtgaattagctcttctatcatacgggaagttgcgtcttgtatacctacttgcgctgatatgccattcttgctg

SEQ ID NO: 645513 - DNA, 664 bp, Homo sapiens
agcggcgtttttccgccgcgtcccccctccccccgagcgccgctccggctgcaccgcgctcgctccgagtttcaggctcgtgctaagctagcgccgtcgtcgtctcccttcagtcgccatcatgattatctaccgggacctcatcagccacgatgagatgttctccgacatctacaagatccgggagatcgcggacgggttgtgcctggaggtggaggggaagatggtcagtaggacagaaggtaacattgatgactcgctcattggtggaaatgcctccgctgaaggccccgagggcgaaggtaccgaaagcacagtaatcactggtgtcgatattgtcatgaaccatcacctgcaggaaacaagtttcacaaaagaagcctacaagaagtacatcaaagattacatgaaatcaatcaaagggaaacttgaagaacagagaccagaaagagtaaaaccttttatgacaggggctgcagaacaaatcaagcacatccttgctaatttcaaaaactaccagttctttattggtgaaaacatgaatccagatgactcttgacatcttatggacctgatgatttcataatcccttacctgcacactgtcatgcccccatgctcaggggacacccttctgcaccagcatgttgcaacccctgtctaac

SEQ ID NO: 645514 - DNA, 198 bp, Homo sapiens
  misc_feature (23)..(23): n is a, c, g, or t
  misc_feature (26)..(26): n is a, c, g, or t
tggcaagtggctcctgactgtantcncagtgagcgagatcacaccactgcggtagcacacacctgtagtcctagctactcagaagactgaggcaagagaatcacttaaacccaggaggtgttcatggtgagctgtgatcaaccttctgctctccagcctgggtgacagagcgagattccgtctcaaaaaaaaaaaaaa

SEQ ID NO: 645515 - DNA, 176 bp, Homo sapiens
agctcccatcgctgggtcaatagtacttgccgcagtactcttaacactaggcggctatggtataatacgcctacacactcactctcaaccccctgacaaaacacatagcctaccccttccttacactattcctcatcacccaactcaaaatattaaacacaaactaccacctaccg

SEQ ID NO: 645516 - DNA, 216 bp, Homo sapiens
  misc_feature (137)..(137): n is a, c, g, or t
  misc_feature (141)..(141): n is a, c, g, or t
ttgactctccccagggctgcacggggtttcggggttcaagtgtcgccgagcggggaaaagatcacgcataccggccaggtaacggccgcagcccgccatgcctggaacccaagacatgacggtagcagggagcgcanaagngtgtatgatgaaaaagactacaggagggttcgttttgtagatcgtcagaaagaggtgaatgagaactttgccaaa

SEQ ID NO: 645517 - DNA, 286 bp, Homo sapiens
  misc_feature (43)..(43): n is a, c, g, or t
  misc_feature (48)..(48): n is a, c, g, or t
  misc_feature (84)..(84): n is a, c, g, or t
  misc_feature (114)..(114): n is a, c, g, or t
  misc_feature (195)..(195): n is a, c, g, or t
  misc_feature (219)..(219): n is a, c, g, or t
  misc_feature (242)..(242): n is a, c, g, or t
  misc_feature (275)..(275): n is a, c, g, or t
attcggcacagggcgtagtggggcataagggaatagagcaggncaganataatgttttaaagaggttaatttgggtggggtatngtcgcttacgcttgtaaccccaacactttncgaggccaagccaggcagagtacctgagttctggaactcaagaccagcctcggcaacatggctaaactctgtctttaccanaaatacaaaaattagccaggtatngtggcacgcacctgtaatcccanctattcaggaggctgaagcaggacgatcacctnagcccaggatg

SEQ ID NO: 645518 - DNA, 231 bp, Homo sapiens
cggtcctctctcagtcaggataatagcacagaccgaatgtcgtgaggatgggagagctgctgtatacccgcacatggggattactgtgtctgcttggagaactccctgcttgtacgttctaggaggtgcacgggccagcatagtctcactgaccctgaagagaaagcgttgccctggttattctttcccccccatttgtaatgttccctgatcaggaagtgcagcttgggt

SEQ ID NO: 645519 - DNA, 306 bp, Homo sapiens
aggatctccggaattgtgtggtgttatgggatctattttagctctgataccaaaatgatgcgggacagaaggggattgtagggtttgaggtgggaatttgatggattggagaagaacgggagaattagggtttgagatgagatttgggattccacctaggagtatctcatacccactctccatgaattcatgaggaaagatttaatatatgaccacggatcacaatccaggctttggcttcaccacctattgattcaatcttttagatcaaaatcaacacaaagtttcacataacaccacacaatt

SEQ ID NO: 645520 - DNA, 692 bp, Homo sapiens
ggcgctggcgcggctcctagaaggcatccgtctatttgcttaccagccggctggccgcggtggagcctggctcggttcctcaggcgcccatcaccgccgctcccggcaacccggagcgcgcaccgcaggccgtcggccgagcttcgcgcttcccagccatctactcttccaccgtgctccttagtagaagggacgatgagtgagtcgagctcgatgtccagccagcccttggcctccaagctaggacaaggcacggcactgagcaacgcgtgggccggtggcatggcctgggcaagcgagcctccgaaggagcccagcgaagtgccaacatcctaatatacctcggggccgaccaagggggaagcaacaaacatcgggtgctgccaatacccggaaaaccaccacaactccaggaaggaaacccagagggtgcagtacccaaaaaaactgggacgaaaggaggcgaagaggagggcatctcgcaggagtccctcggaggacggagccagtgacccttgtcgtgccgatctgctccctcacttggagggagcagccttccattctggggactaggacagctttagttccggtcccaagcggccccaggaccctgagtgcaagagccaacaatcaacatttcgcattaatgcaaacacccatgaaatggcaggcttcaacgtaaaaacaagggt

SEQ ID NO: 645521 - DNA, 125 bp, Homo sapiens
ggctagtgaagttgaacatctaatataataactgatttctgtctatggacctgtttatttttactagactgtgtttacatttgattgtagtatatagtaggatatttatcctattgctgaatact

SEQ ID NO: 645522 - DNA, 148 bp, Homo sapiens
tggtgtggattaggagcgcgaggcacatgacctaagtgtgtgctcttcatcacctcgtttaaagaccctatcttcaggccagtcccagaggctcatgcctgtaatcccaggcactatagggaggccaaggcgaggagaatagcttgaa

SEQ ID NO: 645523 - DNA, 174 bp, Homo sapiens
tctagcaggatcccctgcatatccgggagttgatcagcgcccggcttctgatatttcaacaatccgacacactctggtcttcggacgtttcgtctcaaatctcctaggctccggtccccggcatatcgatgagctcctgtccccatctggagacaccacgggcttccttgagct

SEQ ID NO: 645524 - DNA, 541 bp, Homo sapiens
  misc_feature (235)..(235): n is a, c, g, or t
ggagccgcagggccgtaggcagccatggcgcccagccggaatggcatggtcttgaagccccacttccacaaggactggcagcggcgcgtggccacgtggttcaaccagccggcccgtaagatccgcagacgtaaggcccggcaaagccaaggcgcgccgcatcagccccagcgccccgcgtacgggtcccatcctggcccatcgatgcgcttgccccacgagttcggtaccacancgaagggtgcggcgccaggccggcggggcttcaagccccatggacggaggcctcaagggggtgggcccggggcatttccacaaaggaaagggtggcccgggaaccattcctggcatttcttgtgagataccgagagaggcgggaacacagtccacggtagtcccgtgcaggccaaacgtgcagccggctgcaaggagtaccagtccaagactcatcctcttccccaggaagccctcggaccccaagaagggagacagttctgctgaagaactgaaactggccaccagctgaccggaccggtcatgc

SEQ ID NO: 645525 - DNA, 517 bp, Homo sapiens
actaggtcatgcatctgtgagaatctagtgctgccgtgatctgtacatgaggtggggttcagtgtggtaatgctcactcgcctgctgttcacctgtatgatgtagtggcccagttcgtaataggccgtggtcttggtactggtccatggcccagagggtgcggacccctgtactagaccaaataggcctaacatttacggaatatttctctcaactgctgcaggaatacccattctttaccactagcacaatgagacatcatccagaatacaccatattttaggccccagacaagtcgtacaagttcagaagaatagaaatcatattgagtatcttatgattatcatgggatagaactagagatcaataaccggaggaaccttggcacatacacacacacatgggaattaaaacactcttcctgaatgtccagtgggtcaattaagacattacgaaggacatttaaaaaatttattggaggcacatgaaaatgtgaatgtggcatatcaaaatctat

SEQ ID NO: 645526 - DNA, 391 bp, Homo sapiens
gacaactacgcagagttcggctactgctgacgcgcaggcagtaagcctacgggttttagatgggatagcagacaggtggattgcagagctcctgaaagacccagccgggtgtcaaggagagccctcctagtttggcctctaactggctgtgtgaccccaggcaggtcacttgtcctctctgggaagcagctgaataatgaacactgggattttcccaggctggcttctcactgcagagcagaggaaaagcattctgggggcctgctatggagggtcatttatccagtttacaacttccacggccggccctcaatggcttcctttctctcccacaagagcgctgggccaagccagctctgcaccagttggacgccttccaagaaaaactcag

SEQ ID NO: 645527 - DNA, 122 bp, Homo sapiens
tcccacggatgagagattgcacaattccaaacaaagacatctatttggttgcctatctgatcattaggatgtcttgtaaaagttaatgtagaattttagtcaggattccacaaaatgagcac

SEQ ID NO: 645528 - DNA, 197 bp, Homo sapiens
agcggggaacaatcacttgaccaagaggtggaggttgcagtgagccacgatcgcaccactgcactccagccgggacaacagagcgagacggtgtctcaaaagaaaaaaaaagggtctgtagcaaatttttttcaacctaaactgggactcattggtctgaagggataagtgatggttcccggtggggtaccgagctc

SEQ ID NO: 645529 - DNA, 1423 bp, Homo sapiens
gcccttttatttatttcttttttaccaacgacggtttttatttaaaatatactgggaatagggtgaactattacttcgtacagcatttcccttactcacttttataaaactgtttatactagtggtactttgggtattctaacactagctacagatagttctcagctaagcaccagtgctacaaattggcgcattctatacaccacgctataacgggtggtacaaatctcaggtgaccatttatacttatatattctataacacagtggtgtggtgcacaccaatatcaccactataattctcactcgaaattctctgtacactaattcttttataatttcttgtgagccagaatttatacgcaggatggaggggccttacttattacccacactttatacagtgcaacacatagagtggtatcacataacgttctctgtgaatacacccaactatacacatctcgagacacccagctgtggtacattcccatctccaaaaatttctccactctacctccccatacacagagtgcacatcttccccgatatagcgcacatcttagcagcacagctcaccgctccccttcattttacgaaccccactctcccctataagtttccccgtggattaactctacaataatttggggcgcattggggctcacccaggtggcattgggccatatctatggggggactattttatccatttaatacacagtggggcaaactccagtgtgtgggcttgggccactctcccttaccaacatttataggccacgtgctttgccctactagggcgcttcacaacttcagccattctatatttcccaactacagctgtattactcaacggcgcccctccatttggccaatcacccacgtgggccgtggaaaactaattccccacgtaaaatatgtggcgcaccgcacactttggcacccatctaacctccccaactcgcacacgacgccctggcacttaagaacacactcgggcgatcgggacacaaacccacatcacagcgaccaaactgttacagctagagaggctacccacatggaacaacaccgcggcaccataccaggcatacaaggagcgagaagcccccctaacttccgcaaactgcccatagggcgcgggacactacaccacaaacacgcacctcactccacaccaacacccaggagcctaccggcccacccctccgttaagacaggggagccacactcccttcaccaacaggccgcactacaacaacccatagagcccaccacccacagccaaaaaaccgcggccaccacatcacaactacaatagaagaaaatcaaaccacaacacactcacccacggctcccccacaacccgcgaggcagccccaaccaaacagcgccaccaacccgacaaacacacacacgca

SEQ ID NO: 645530 - DNA, 479 bp, Homo sapiens
cccctcctcgagtttaatgtggtcatttcttagactctttccattcttgtacacaggttcttgccttgtcaccatcgaagcagtcaccgagatgaataagcttttgatcttcattttctctgtctatattctcatggtaggctaataggcttttaaatgtgatgttataagcctaagacagcttgacttgcaccagcaagtttttagccctcctcggcaaaccaggtctctttatggacagccgtccagcacttctctacgaaacctgggaaatcatccataacagctttcagttgtctcttttgatgccttgggctctgtatgtcacaagctcatcaagtccagtttgtttcttactctgtctctccctcagatcaagtgtgcatatatcggcatgtaaggtatatgtttcagcgttatactcatgtgtagcgtatgtataaaggacctccagatctgaagcgcatgctcgtgtgcct

SEQ ID NO: 645531 - DNA, 277 bp, Homo sapiens
ggggggggggggggggattttttttttatttgggggggttttttccccccccccttttttggccccccctgtggtggtggggggggggcccccccccaaggggggccgggccccccaggggctttgtttttggggggccccccgcccaaccccccccccggggggttttttggggggcccccccccccccgggggggccctttttttgggtggccccgggggttttttaaaaattttttttttttttttttgaaattaacccccccccgggggggga

SEQ ID NO: 645532 - DNA, 160 bp, Homo sapiens
ggagaccaagatggcaggtggaggccaggcttaccacaacggaatagacctcccgctggggccggtcaggcctggctcagctgccacaggcatatggtggagaggggggtcccttgtccacattgatatgttaacaaactacctctcgcttattacactc

SEQ ID NO: 645533 - DNA, 545 bp, Homo sapiens
gctgtgcggacatcctcaatcttactccttgaccactttccagtgaacaatttttatcttttatttttttttgagaaacgggagttccgctcttgttggcccaggctggagcgcaagggcgtagatcttggctcaccgaaacctctgcctcccaggttcaagcaattctcctgcctcagcctcccgagttagctgggatttacgggcttgcaccaccgcgcccggctaattggtattttagtaaagatggggttctccatgttgaggatggtccgcacagcggcatgtgctgtaggccagcggagctaggaaggagcacaggcttctcccagcccagattgttccccacttaactgctttgccctcttcatcttttttttcccccaatagcttcaggacattcagtacatggtgcttttaagaggttgatgatcccattgcctgagctgccttcacctctctttcttgggaattggccatctttgagctttgtacgtctctgtaacatctctgcatctccttttcacgctggcctacagcacatg

SEQ ID NO: 645534 - DNA, 338 bp, Homo sapiens
actacatacttccgatatataattttttatcttctctttgtcttataccaaacatttctatagcattacatattggaaaacatacttgttagtagctacatgatatagttagggtgttaaatttaaattttccgtaatctcatttttctgtggcctattttgcttatgtttttaaattataaaaatgcactagcaaatatttttgtgcataagtctgtgattttctggatatttccttccagaagactttttttttttttttttttttttttgaaaaaaaatcttttttttttcccccgggtggggggaaagggaaaatttttttttttttttttttt

SEQ ID NO: 645535 - DNA, 263 bp, Homo sapiens
tccaagcgattctcctgcctttctcctgcctcagcctcccaagtagttgagattacaggtacccgccaccatgcccggctaatttttttgtatttttagtagagacggggtttcaccatgttgggcagtctggtcgcgaactcctgatctcaaatgatcggcccgcctcagcctcctaaagtgctggaattacaggtgtgagccaccgtgcctggccaccaggcttaactttaggaattacttcactttccccagccggaatt

SEQ ID NO: 645536 - DNA, 131 bp, Homo sapiens
gatctacgatctcattaagcggcagtgatcatgtgttttgagtgggagaatggaagctaaatggattggctgtgggtggatggatggaggaggcagaatactggaaagaaccaatgggaagaggaagaaga

SEQ ID NO: 645537 - DNA, 588 bp, Homo sapiens
cacggtggctcatgcctgtaatcccagcactttgggaggccaaggcaggcagatcacgaggtcaggacatcgagaccatcctggttaacacgggtgaaaccccgtctctactaaaaaaaaacgtgaaactaagaacaatgtgtgtaataagtcgagacgaaaactcaagtaacatgggactcaaagtctgactggaaaaagtcaaagagcaattactgaattctgacacacagtagctacttgggaacggcaacgctttagcccagggacacggcaacggccccacaagggaaacttaagcgcagggggcaacacccttattgaggaaagcgacgtgttcacaggtgtgacacattagccgcgtgtgggaactgggacaggaggggcagctacaaagttatatggggggtgccccttccagcactcacctcccaagaaggtgtgtcaggcgcccaagccccgagaaaagcagccgtgtcgatagtgggaaagaggacagccttgagctgtagtaagaaaacctcgaggagaccggggtttcgtgtttagcgaaggggttctttgtcagaaaagaagagaaaaaaagcc

SEQ ID NO: 645538 - DNA, 355 bp, Homo sapiens
  misc_feature (128)..(128): n is a, c, g, or t
  misc_feature (201)..(201): n is a, c, g, or t
  misc_feature (297)..(297): n is a, c, g, or t
aggacacgtgcagacagggacggggcgaatcccaggtggagacaatgcgatcacgcctggcactggcgtataccagagcagatggcgtgaatgtatgtcaccggagcactgtggggcgagggcgaaanaacaagtggtgcccaggcatgcgcccggtagaaaggggatcaagtggcctttccctgagtgccaagggaacanaaagaagacctgggaacctggacggggcttgtgcctcagccaagccacatgttgaaatgcctgccagaggaccacagaggtttctgcaacagtcancccacccccaaccctccaccacccagctagccctgacgcaacctcccctgcgtcgacg

SEQ ID NO: 645539 - DNA, 438 bp, Homo sapiens
  misc_feature (36)..(36): n is a, c, g, or t
  misc_feature (45)..(45): n is a, c, g, or t
  misc_feature (49)..(49): n is a, c, g, or t
  misc_feature (82)..(82): n is a, c, g, or t
  misc_feature (90)..(90): n is a, c, g, or t
ggtgatctagcaggatctcttacccgcgtcatcagnccctggggngttncctcgacatgatacgggcttgggctggggttangaaggcantgccctgagcttcagcgcatacgttggcgcaagcgattcgcgcaaggataaaaatgaaagcatgcatgccggctccaaacgcctcaaaggcatgggcgagatcaagtcacgtccgcaattgggggtgagtgccgcctacaacctcggcggtgtgatcatcggcgccaccctggaacatgcgcttgaagaagataaacacaaggaaaccggcaaggcttttacccacctggagttgagcctgggtaccaatctctatgaaggccgctacggctccgtcgatgccgccatcaacagccacttcggtgaccgcaactacctgcaaacctggtacggcgtgactgccgacca

SEQ ID NO: 645540 - DNA, 134 bp, Homo sapiens
gagactagtctctatatatctaagtacagattacaccgcaatgtatgaaagccattgcattatataaactcgtagtgcccagaaaaccaaaaacaataaattagttcctcccactcctacgtgcatctgttcat

SEQ ID NO: 645541 - DNA, 446 bp, Homo sapiens
gagcacgctaccgttagagtaaccagacactctgcaaggccctgcggtaataggcccccgagctggcttcccttctggagcaccatggtagtctggctattgcccgttgcccagtgcaccagcctctcccatctggagagcttttgtgctagctcctcccctctctgtgatgttcctttcagcccctcacaagagtgactccttgctggccttcaggtttcagctcacagaacattttgtcatatcttttctcttgtgacagaggtagctcgaggtgccctgctctgcgtcctccgtctgttcatttccttcacatcccacagcacaatccatgatatggcctcgttgatctactgcctgctgtgttactgcctgccttccccactctccaaggcccagctccatcctggtcaacattctaccctcagaatctatcaaaggtcttt

SEQ ID NO: 645542 - DNA, 292 bp, Homo sapiens
  misc_feature (284)..(284): n is a, c, g, or t
tggccgttttcaaagttatacaactactgcaggcgtatccaatcttgtggtttccctgggccacattagaagaagaatagtctggggccacacgttaaatacacttgacactagagatagctgatgagctaaaaaaaaaaaaaaaaaaattgcaaaacatatctcgcagtgttttataaaagttttacaactttcgcatttgtgccccatttcaaagccgctcctgggcagcattgcagtttcatgggcccaggggttttgatcgagtctacgggataccgagnctcgaatt

SEQ ID NO: 645543 - DNA, 346 bp, Homo sapiens
tttctaaggggggggggggcctggaaaaaatttacccccaaatttttcctaaaaatttgggcggggaaaaaagggaaaaatgggtttttttaaacccccccaaaaagggtctggggggtttttggggtttcctcttaacgggggtaaaaaaaaattttttctatggccgaaatggggtggggggggaaatttttagccccaaaaatttttttctaccccttcctaaaaaaggtttaaaaagggggtttttaccggatttcctttggttttttaaaggggttttggggggggggtaaaaaccaaaaccaaaaccccctttcccataaataaaaaacttgggattcca

SEQ ID NO: 645544 - DNA, 692 bp, Homo sapiens
gtcgctgggctgtttggaaccccttgctggaagctgattctggaagggtgaccctgcctctgtagggtgggatccagcccaacccctcgcactgtctggtctacaaggtaccctcagccagcatgagctctgaagaggtgaagcaggtggagtcgggtacactccggttccagttctcgctgggctcagaagaacacctggatgcacccacggagcctgtcagtgtgccccaaagtggagcggcggccttccaggaaaccacccactgtccccattactgagccctgctcagcagcctagtacctcagagttctctgctgcccctgcatcaactcacctgtcgggaccagggttgtcaatttcccagctggctggactcccctggggtccccgactcagcactgcttggccaggcctacttcacagctagcccatggctctcaggcctccccggcccaggcacaggagttcccgttggaggccggtatctcccacctggaagccgacctgagccagacctccctggatcctggaaacatccattgccgaacagttacaggagctgccgtacacgcctttgcatgcccctattgttgtgggaacccagaacaggagctctgcagggcagcctcgagagcctccaaggatgctcctgcagtcctccggcttcccgagattctggatgcaataaa

SEQ ID NO: 645545 - DNA, 126 bp, Homo sapiens
acggacgtgaactgaacacctccaatgagagccatgttataattgattaacaaagatcatggaaggattcttgaacttttcgtttaaaatcaaacagagcttgtgttagaccatataaatatgtat

SEQ ID NO: 645546 - DNA, 1037 bp, Homo sapiens
  misc_feature (814)..(814): n is a, c, g, or t
agagggtgtatccgcagggccattgttactatgagaaaggccatatcttggggaaacgacgtatacagaggtgggtataaaagcacgtataccccgggtttgccaaagttgcggtccctacaagtttacgatcaagtgcctttggagacagtcacaaacgggatcggcgaccaaagttggtccttatggtatatcatgaagggttgccatcatggaacagggtttgctaccgcgtagcaaatgtgtaacaaaggccacggaagatgattccaaatggtcaaaagttacggtcctggcccgtgtgacacgcctgcgttctatatgccgcgtggataacgcacatagtgccaaatgtaggcgcgggtgcacatggtgtattcagggcgcaaaaggtcgccgaggtatgtgctcgctaggaacaggtgtaggcgacagaggcagaccgtatgtggttccgggaaaaccgtgcgcgtaacagcgctgctgcgcgctgatggtcacgaagtgtgccgcgtacgcgcgctataggagtgacagtggtatagccaactctgagagcaggtttccttcggttgatacttctgatgaggcaagaggatttgcgggttaagcaggcaagaatgcacgccacgtctgtagctagctatgatagtggatgcatatttggtaggataagaattccccatggatgtactcgcaaacgctgacataaggatggacaagaagcctcaaagtaggcccttcgttagccgtctagccgagaggtgagtacggagcagtctaggcttgccagcaaaggtactgttcgaccganacagtactcactaggctaatgggaatgtccaagacatcagaagtgtgagggccaaaccttgctatgcagagttaaaacttttgacaagggaacgaaatctcataactgatccatcagtcatgtagctagctgtagagcttgcaacttaatagcagcagctgccgcaatgcacatgtgaagtaacaaacgtggtgttgtggtatatttcttccccttcagtttt

SEQ ID NO: 645547 - DNA, 330 bp, Homo sapiens
tggctgtgggcgtgcctgtctactgtgtcttgtctcctctggttagcttgggcttgagaacttctgtgttctcttcccattgggtgtaccccgggtgggtggcctgggagatcctgcgtatgtgtgctcagctgtcggcatgtatgtgtgcgtcgtggcggtctccctccttgtgctgtactgggtggccctggtggctactgcagacggcccaacatccagtctttccccaggacagagctaacaagggcccctttgccttctcatcctcaggagttccaggcacatgagtcaccgtccatccacatccagtgtggcctggagctgcta

SEQ ID NO: 645548 - DNA, 229 bp, Homo sapiens
gtgactctgaggatcttcaaacaccgcaatctccacctcctgggtctagggattctttgcctcggtttctgagcagctggaattacaggcgtgtgtcaccaagtccagctaagttttgtgatttagtagagatggggttttgccatgttggccaggccagtcttgaactcttgacctcaagtgatctgcccgccttgcgctcccaaagtgctggaattatgggcatgag

SEQ ID NO: 645549 - DNA, 113 bp, Homo sapiens
ccggaagatggacctctgagggctatatgtgggctcagttacacttcaacataactgaagatactgcttcgataggaccatctaaattcctgacttcttatttattctgtatg

SEQ ID NO: 645550 - DNA, 277 bp, Homo sapiens
tgcggtctcttcagtttcgtccgagccagaaacttctctgggaacaaaatcgtctcagtggtgtacagtaagtctcggcaaatatcgcccagtcgggccgcccctgtcctttgctggggataagcggatggcattctccaggatccaggcgatagatgtcacagtgctcatagtcaaaggttccattccataagtgcttggccagctgaaatgctatctttcgtggggctactgtgacttctttcccatgccatacgtaaacttcactaccagaatc

SEQ ID NO: 645551 - DNA, 384 bp, Homo sapiens
  misc_feature (89)..(89): n is a, c, g, or t
  misc_feature (91)..(91): n is a, c, g, or t
gagccccacagcataaactattcagatggattgaaaacagctgggagacctaacagaaaagactcaaaaggtcactgcttgccaagacngnatgctccaagacctatcaaaggagatagcgagtatgtaactggttaactgcagacatatccctaccagccaggccataggaagcgacatcatcccatacttcatggcataccagtggtcttccctagacaagcaaacactttgtatgccttgtggcagcaggaagtctgtgttctacaaatcatgtcacatatcacatataaggcatacatataaggcatacggcacctgtcttaatgggcttgtctggtccattcagggtaaggaaggggaactctcagaagaggcagaaga

SEQ ID NO: 645552 - DNA, 260 bp, Homo sapiens
tcgagctcggcccgtataatggaaaaaatgcagtggatacagtactaattacatcaatcataaagccagtctccaggagtgcggcaacagatctgtactctatcttaaaaagttgtaataagtaggatacaggaaagttctcaggtactttataaattggagcagagtaaatccaaacgtgaaccacagactgagttaaccaaacagaacccttactgtaactttacagcagtataaagaatttctagtgcccatttcaa

SEQ ID NO: 645553 - DNA, 697 bp, Homo sapiens
agccggcggtccttgcgctccccaacatgcggcgccgtggggcgcggggggctgcctgtctgtggcacatgtccctggtgctcttctgtttctcagtcttcgctgcgaccctcgtctggtgccacactggggcgggctacgatgctgctcatccatgaacgttcctcagcctgtacaggctgaccagatcgacatgcacctgcaaattcgtgtgtgcagcttgttctgcctgaggatgtgtgggccagtacgtgtgacttgcccaatgggcttcgcggtgagcgagctgctgcaaggtgcgcctcgtgcctgctgcagatccagctcactaccctgggaaatcttacaccttcaaggcactgtgtatatctgctgtgatatgcaggaaatggttcagaccagccatcaagtatttatggggatattattagcgtgggcacagagattgttgcacggggcccggattcaagtgaattcctgtcattgtaacagaacaatacccgtaaaggtcttgggagcacggttcaatgacattgatttaacatggtgtaaaacgtgtgtacttccacaagatccaagtttcaattggtataaccagacgtagaagcggcataagcagagattcccggagtcaggagtgttgtatcatttggagtagaactcatgtgtgcgttcaaaaactggcctggagctagtt

SEQ ID NO: 645554 - DNA, 1504 bp, Homo sapiens
  misc_feature (108)..(108): n is a, c, g, or t
  misc_feature (317)..(317): n is a, c, g, or t
  misc_feature (890)..(890): n is a, c, g, or t
ggtagtcctgctccagctgtgtgatcatatttttcgccctggtacgcaagatacgtgggtgggattcagcgcctctggtaatcacaagagtgctgtcccgttgttctnaatgactatagaggaactctcacccccccacgagtggggtggtttctatatcatcaggcagagtagaacgtcctcctctttcttgtgccccaccacacggagagtgttccttctggtgggggagcaagcgcctgtctgtccgccacagaagaaggtgtttctccaccacagacgcaccatcgtgggtccgcacagtgggaaatttcacnccacggggtctaatgttgcgcggcgcgaaatatgatattttccttcgcgacccaagtgcgggcgccccagagtccgcccgccaaatgtgagggggtttcctgccccccccaaagggccgccgcgtgggatgaaccggcgaggaagagtgttcctctctggccgagagaaagcgccgtccccaccatggcgttcccacaagaaggggtctcacaaccccgcaggaatgtgggggccgtccgcctcggtggagccgccgaaggagtcctgtcgttgtgccacagaggcggcgtgtgccaaaacaccgtggggtgcccccaagagggccccccaaatgggttttgggggcccgcttacacactagggtggtttcttcccactccgctttctcgcggggggggaggacccctctgacaacgaagttaccccgctttcacttgccgcccttggagcccctcgggtttttttgggggggccttcgttggcaccctcggggggccacagagttccccaggagacacttggggtgggcccgcccctttggcccccgaattctttgagggcgcgctttttgnccgcccacggtgatccacacgcgcacagcgtcccttcactagaaatttcgagaaagagaggaacccttgggcacaagacacaaaggcttaaaagtgtttgccccgcgcacaggaatctcttcacagagaaacccccctcttgggccacacgtataaacctctgtggtgggcacgggcacaagcccctttccggtgcaccctctgtttggcgtaacaccacagagcgccctccccccttcgtggtgcacagctccacaggcacagctctcgaaggccccccgacccaccacttgcaaggggtcccctgcgtaagttatgccgcccccacccgcccgtggagagttctcgtatcccgcgttcccttatgaacacttcttaccaagaaagcccaagcgtcccctggagagccccgttggcagacttctagactttgcacgattcgctgtaattgggccccagatcacttgttttttcttcgccctccactttgcccccacagatgttctagaggatcactagtgagacctccgtgtcatattcccgcgggtggccccaggctagatcccccgtggttttgtgctccaaaataaaaagacctcagtgaccccatgtta

SEQ ID NO: 645555 - DNA, 324 bp, Homo sapiens
gtgatttttttactagatacatggtgatagcaacgctacctggcaaagtcctcagccacttttggatagcggcttaggtattcgggactgctaccaaccagatcgagatcggcgtgataaatcaccaattcattttttgcgacatcaataccaacagtcggcttggagacgggaactggcattgccatagtgacttcctccgggctaaggttttgagcacttgaagggctcacccagaggcgcaggcttgttcctatcgtcggtcatagccagatgcattctttatcggcgcttgggtgaaaggaggaggggcgaaatctcgta

SEQ ID NO: 645556 - DNA, 156 bp, Homo sapiens
gttataggaacacaagctgttggtggtctctacgcacggacgcgcctaacactttgctttagtgtaagatgaccactcacctctataaggtagggcggaagaatgttcggttagttcctctcctctggccgatatattttttcttctcctcgcacg

SEQ ID NO: 645557 - DNA, 185 bp, Homo sapiens
taatgtgactcggcctagagggtctaaatttagggatctgactgtggtggtgagagaggtgggttattgaaatagaaatctcatcacatagattattcagatctccatgaagtcgtggtcggggatatgcctggggctctagccatctatcagctacagagagccagctaccatcctcagacagg

SEQ ID NO: 645558 - DNA, 1176 bp, Homo sapiens
cgcgtgtccctcgtgggccgccgttcagtagggcgttgccgtctagtgtttggcggtgaacttttcaccggtgctgtcctggccctgttgcgccttagcccgggtgtccaacgccctggttcccctccgtttccccggttgttcgcccccggtccgccggcctggcttggtcccccgaggcttttgagccgcggggccggctccacaccccttggggcgcggatataatcgaccggggtgttttgtccctcgcccactccccggtcgccccacagattggaagaagttctccccgcggcagcgagtgtcctgaggaccgaacttaaggtatgccccttccagggagatggaagtgaaggaagagtttgcaagcgaaacgggttccagttaaatcgattgcgcaaggtcccgacgtgagtattaacctgccccggctggattcatggaagtcatcagccattgaccagacgggagagaatttccctctgatctatgacccccagggtcgctttgctgtgacatcgtatgtaccacctgaggagggccccagggacccaagttgtggcccaagatgaggaaaggattctcttgtgggggcacccaaagggagattccctcccactttctgggtgaactccactgatggcgccgccacccacttccgcgctattcccccgattccctctcactctccaaggtgtaaatgagatacgccaccttcacgagattgagatttatgaagagctgtgcacacgagattatcctgagatttcacatcacacagtgtcgacacaccctgggtaaaccctggtgtattgtgggaactggagaggtgtctatacacctatggagagaaattggggtgatcaccccaccacgagagagggcacccctggagtcttttgaacgtggttcacacgtgagaaagaatgcccaatggccacacgctttgccacactcgaactttccacaccacatgttttgttattggcagggccaccaaccactggatttctcttccccgcaggaaagggtatccccctcacccacttgctgaagagagagacccaaagactggcggcccaaccacgagcacgctgggtgaaaatgggtccctgggtgacatgtcagatctttgtacgtaatttaaaatattgtggccggatttatagccca

SEQ ID NO: 645559 - DNA, 938 bp, Homo sapiens
gagcagcggggtcctgcagcggtggtcggctgtgggtgtggagtttcccagcgcccctcggtccgaccctttgagcgttctgctcccgggccagctacctcgctctcggggccatgagcaaaaccaccaccttcaagggagtcgaccccaaacagcaggaatagctcccggagtttgcggcctccaggtgtggcatccactttttcaattaggtttgatgaaccaaaagaacaaactgtgagtgaaggaacaaaagtggcctctaaatatcttttgggaccacctgaagaacactcaaggcttctgtgtggccaaatgtcaaggccgggtgccaaggtctcagtgggtgcagtgacagacttggagttcactctgactgcagatgaacggacctcctctgaaggcaagctcgggagatttcttagatctgaaaggcagcactggtgctactttcatgaacagttgtggacacaagatttgccagggagccttgggcagattggacaagagaagcccgtgccttgttgcggcttgtgcacagtcgggttgccccggccccatgttgcctcaagaagaatccccgtggggggagttcaaggcctcgatctggagttaacatctagcattgcattgaccgctggcgtcttgtgttgttcctccatggcttggtgacttggccacattgagccttagattgaactctcctggggtctggccataaacaagacgctttattgactggcggtgttttttctttgggagaaagggtccttgcctacatggggttggggcaggagagtggttcacataacattgggcgagacttggcactatttgtttcacaaaaattgtcaactttgaccttggcgggtcacatttgtcgcgtggagcacacaaggtggcccacatcgcgtggtgacctttaatttatagttttg

SEQ ID NO: 645560 - DNA, 243 bp, Homo sapiens
  misc_feature (24)..(24): n is a, c, g, or t
  misc_feature (30)..(30): n is a, c, g, or t
  misc_feature (58)..(58): n is a, c, g, or t
gggatggcgtctcactctgtagtnccagcnactcagggggatggggccagaggatcgnttgagcctaggtgtttgacaccagcctggacaacattgtgagactctgtctcaaaaataataaataacaaaacaaaataaaatatacaatgcattattatttaatacagtcattattctatgcaataaatcactaaagcttatttttcctgtctaactgaaactttgtactctttggatgaactt

SEQ ID NO: 645561 - DNA, 728 bp, Homo sapiens
gagcgggcggcgtagctgagcctgcctgctgatagggtccatcttccagtgaaccgggcgatgaggaagtagagctctgcgcaggagagaggcgacgggtgtaggacacacaagctgagcaggctcggagcgcgcgtggggcgcgcgcgtgtgaacgcaggagcggtacatcgtcccggatgtctctcgcggggccctgtacaggagcccgcgacatatagaccgactcgtcaagcgtccggagagggccctatatccgtctcgacagagtcagcaacgtgttgacatggcgttcaacatatcaagaggtcccgccgcgaaacgggagttacgaatcatacagagctcggaaacggagagggagagcagaatccgagaagataaccggtcttgtcccgctccagacacgtggccacacctaacataagagagtgggtgcaacgcaagcattgataggtcagccagcacaggaacgcgtcaagcacatttaccagcaagagatgcaccaaatcacaaagcgtacaggcacgagccaaaaaccgtgggcacggaccgacgattcggggcaacagacacattgaccgggaacgacggaataggcaccgccgacacacgcaatagcatcgcgttacattcacacgtgcacgcaggccggaacctttgaccacggagcccttcgaagggggcgcagtcactatgccaggcgcacgggtcggagaattctcagc

SEQ ID NO: 645562 - DNA, 379 bp, Homo sapiens
  misc_feature (310)..(310): n is a, c, g, or t
  misc_feature (316)..(316): n is a, c, g, or t
ctaaatttacctcttttaggctgttttaactttggtaagatgccaaaagaggttggatcaaagtttaaatgactgtgctgcccctttcacatcaaaggaactactgacaaccgaaggccgcgcctgcctttcccatctgtctatctatctggctggcagggaaggaaagaacttgcatgtcggtgaaggaagaagtggggtggaagaagtggggtgggacgacagtgaaatctagagtaaaaccaagctggcccaaggtgtcctgcaggctgtaatgcagtttaatcagagtgccatttttttttttgcntaaacntcctctaattattggaatgcacaatttttttaatatgcaaataaaaagtttaaaaacttaaaa

SEQ ID NO: 645563 - DNA, 807 bp, Homo sapiens
acatcctcggccgcgctgccccgaatactcggcgcgggtgcccgggccccgtcgcgctggttgggctttctcgtggaaggcgaccccccgtgcctgctcggccgagccgcaggactgcttgtgaagcgcgacgtgcccttagtgatcctgctgagctctgagtgacatgcacctgatttctaactgcacaatgactttttgaatagatgacccctacaagacactactagacattctatacaatcgttcaatgtgaacgtgtttctcctgctgagaaagccatcttctgatcgaccctgatgatccatcctggtgcaacacaaatgcttggcatgtctgtgcacagtgttatattggatgcctgtacaatcttatgggatgcctgcctgtgaccactgactatcatctgacctaggaacaagacatgaccacgcaccatcctagcttggtccttgaacttcaccgcaccacatggccatacctgctaaggtgccatcatcattgtattatacagccgcaacctggcagttctcgtacctgattgagaacattggccctgtgacttgtggctgagtacgcccacactcgctacttcagggtgcggcatgctgaccaacgctgcgcctcctctttgtgccccacggtccgcctgccgtgacctcatcatcttcctgcacacgctcaacaacatctttgagccacactgtggccgtgagagacgcagccagatgaacatccccaccgtgggcatcgtggacaccattgaacccctgctatacctaccctgtaccggcatgacaaccctca

SEQ ID NO: 645564 - DNA, 157 bp, Homo sapiens
  misc_feature (91)..(91): n is a, c, g, or t
gttatgacttagggtaggaaaggatctcccccctaaaccaagtatgtattcaggcgtttagtatgagtacttctttaaaaaacatttactnttctagcaggtaatataggcaacgaatctgatagacattttacaagtttccaacactccacatcct

SEQ ID NO: 645565 - DNA, 150 bp, Homo sapiens
cttctcctgtagctacagagtggcacaccagcagcatcacatactgagttctaacaacctgtgttggcgcaactgattcctcctttaacccctgttcaacacaatcttcagccatggcattaataacccacttctgcggactttgaatac

SEQ ID NO: 645566 - DNA, 189 bp, Homo sapiens
agacgtcatcttgcatagacgtcattcttgcatctcaattcccatcctaaaaagcactcatacttgatgcatcccagcagcaacttaaaccccagggaggtcagtggaggctgtgcagcttaagtctgtgatccgtgagactcgcggatgcaagacatggactgtctatgccaagacagtggacggggt

SEQ ID NO: 645567 - DNA, 193 bp, Homo sapiens
gtgaatatttcactgcgtcgatacaacccgcggtcgcggtcgcgtattcgagttgatcgccggacatctggacggcttgcgcatcgacagcctgatcgtggaaaagcccaagaccggcccggcattgcgcgaggacaggcgcttctatccggagatgctgggctacctgctcaaattcgtcctacccaaggag

SEQ ID NO: 645568 - DNA, 842 bp, Homo sapiens
gccacttccatttcactcaacttggctgctcagccttctctttgcaaatacgcggagattgacccacgcgcataggatccgtatcaccataaggccgcccatttacaacgatttactagccgctgctgcctcttccgcaccaaggatgtatggacccttgcccttccacttcccagaatgtttcttcttcgccatgacgttttctcctttgggaagatttattaccccaggcctctgtacattcttttcagatcacagaaatcggtgtactgctaatacgtctgcacctaattgttatgcacctgcctaatctgtcacacttttgttaagccttcacttaaatctgtcatagaactagtgatttgcaagattcgcttactagctcaaacgaggtgcaaacaattcctactataagatcttgccgtctacaatgaaagtactagcactagaacaacctttgctagaggatttttcgtgtggcatgcagataccataccttggcgaaatttctctgagcttttaccacttctctatcacgattatagtaccatctgtacacacacgtgatcatttcgtacagatccaaacactatagagctcacaatacgtttctcacagaactctatttctgaactcttggaattcttctcgtttgttctttcatgtttaaaaatgagtgtttttcaatgcatttttatcatgtaagccctgttttttagccaagaatgtagaatatatggtctgtaatatttaaaagcttataacatcttattgttggtaatagtgactttatatttggtctgatagttatttttcaaagttttttcatttatgacacacta

SEQ ID NO: 645569 - DNA, 195 bp, Homo sapiens
  misc_feature (50)..(50): n is a, c, g, or t
ggcccccccgggggggggggccccccccccaaatttggggtttttggggnccccccccaccccccctttgggggggggggggggggcaaaccccccccgggccattttttgggtttccctttttccccggggggccccttttaggggggttttttgggggcccccattttttttaaagggtttccctttttttca

SEQ ID NO: 645570 - DNA, 343 bp, Homo sapiens
  misc_feature (338)..(338): n is a, c, g, or t
  misc_feature (340)..(340): n is a, c, g, or t
tcaaaccgtttttcctctgctgttccactatgacaatcaacagagaagatttctgtgaccaaatatgtggaggcttccgctatatatcaagcagcagacactagctgggtgtcctttaattcaattccattctgatgctatctacctggagatagtggctgatcctgggggttgagggctcagtcctgaaggactgccccctccttcccaccagtcgcaagtccaggcttccaggacttctgatggactagcttcaagttggggttcccctgaccctctctttgggttcaattaatttgcaggagcagctcacagctcagggcacttatatttctggntnggt

SEQ ID NO: 645571 - DNA, 406 bp, Homo sapiens
ggggttaattttccccttgggaaactgggaaatttggggggccgggaaaaatactttttcccccggatttggtttcgccccaagaggggtacccttttttgattcatgttaggctttgaaggggctaaagaaaattttccagggggacaaaggcctgggaccccttgggggaatttaaaatttccattacccctttttttaaaaggggagatggttggaaagaaaaatttccgggggttaaatttggaatggggattggttcttttttttatggaaacccacacataaaaacctccccctttttttggggggataagaaaaattgggcccccctttaatgggccattgtttgcccccttttgtttgtttttcccctttacttgtccaattcccatccccgtttaga

SEQ ID NO: 645572 - DNA, 134 bp, Homo sapiens
gggtccgaaggggccgacagttgggagatggtgtggtcctggaatggaaaaagcatgaagtgaatatgtcttaagcgagccagtcatctgcaagttatgtccgcgggtaactatgtttacagcacagccgggag

SEQ ID NO: 645573 - DNA, 384 bp, Homo sapiens
gggttcaccccattctcctgcctcaagcctccggagtagctgggattacaggcgcccgtcaccaacgcttggctaatttttttgtatttttagtagagacgggatttcaccgtgttagccaggatggtctctatctcctgacctcgtgatctgctccctcggcctccaaaagtgctgggattacaggcgtgagccaccgcgcctagcccattatcagatattttgaagtagctattttgaggtggccattttagtatcagaactttttttctttttctcttttcttttcttttttcttttcttttttttttttttgagacagtcttgctctgttgcccaggctgcagtgtagtggtgtgatcttggcttactgcaacctccgcc

SEQ ID NO: 645574 - DNA, 395 bp, Homo sapiens
cgagttactgaatagcttgacacaagcgtgtgcacacacctagttattatagtatctttagtagagatggggtacatcatgtagccaggctgctcccgaattcctgacctcaagtgatccacccacctcggtctcccaaagtgctgggattacaggcataagccaacacgcccagcacttattcatttatttattgagacagggtctgactctgtcacccaggctggagtgcagtttcagtatcacagctctctgcagccttacactccttggctcaagtgatcctcctgtctcagcctcccacgtagcgggaagcatgggcataagacaccatgcccagatagtcattggatttttgcagaagcagggtctccctaagtagcccgccatatcaa

SEQ ID NO: 645575 - DNA, 470 bp, Homo sapiens
gaggggcccagactcctttttatcaggaacccacctccacattcatgacatcaatgcattcacaagggcggagtcctcacagcctaatcacttctgaatggtcccacctcttaataccatcacggtggcaattaagtttcaacattagttttggagggaatattcaaaccatagcaatatgatagttatgtaaaaaacaattatgatcagagataaatagtgaagtatttatggagaaaatgaccgatgacatgtacacacatacacatatatgtgtgtacatgtatatttatataatgtttaatttaaaataccatagccaaaaatactgtagtaaaaaaaaaactatagcaaaaaaatagcaaaatgttaataactgctgacacagggtagtggttacatggcagttcattatactctttttcctactttaaacatacatgaagtatgtttgaacgtgtctatggcaa

SEQ ID NO: 645576 - DNA, 397 bp, Homo sapiens
aaacctacctgtttactgttctctggatgacagacctcgtggcctcaatccgccctaagtgcagcctgagatggtcaggagcacactaacaggaggctactgcttcacacatagggccccactccagactcagcaggagccaggcactggacaaccagaggggcaggagacactaaaaaggcaccctctgatagctgagtgcccccaggatatccaccccttttgctagtgtctagtaggatagtatggctaggggccttgtgagaaacgagctagaagacgatgggtattagtatttgccccccaagaggtataatgggcaggccagcaaggccagggccactgacggagggaaattttacaaggtaaacatgtatagagaactcccttcaaatag

SEQ ID NO: 645577 - DNA, 331 bp, Homo sapiens
taccacatttgctatgaagcagcaacaccagcagagtgtgattaagaaaaatgtggaacgcgcaaagagaacacatgtggaagagggtggatgctctttatatgtccaagctgtgggcagtgcttttcataaccaccactgtgtggttggagaaaggcctagatgtaatggttgggtcatcattttgaattgtatgcattattatatcaaggaggtagatatcttgcatgaatgctctcttctgcggttatagtgttctctgcgcactcttggtgagaaattgaagtgcatgtgtgaatttatgcacagaggaatatttcttcgtatcttc

SEQ ID NO: 645578 - DNA, 298 bp, Homo sapiens
  misc_feature (138)..(138): n is a, c, g, or t
gggagccttaacctaataaaatgaccctatcatttggaacaagtttaggggcaggccgggtggctcatgctgcgatcccagcacttggggaggctgaggtgggaggatcacggggtcaggagatcgagaccatcctgnctaacacggtgaaaccccgttttttctattcaaaatacaaaaaaattagccgggcgttggtggcggacagctagagtcccagctacttgggaggccgaggcaggagaatggtgtgaatccggaaggcggagtttgcagtaagccaatatcgtgccacttc

SEQ ID NO: 645579 - DNA, 307 bp, Homo sapiens
taaggatccgatatgcgttcaggtacctctctggtcatccctaatgctgccacacttgtaacgctctatgcctgtgagacagcgtacatctgtttctgcaggccgagcatacggtgtgggcaggtttgtgaaatgcaggtcttagagttcaccagttcacttccttttaaaaatgttcactttagagacaggctcttgctctgtcacagaggctggtgtccaggggttgcatcatagctcactgcagcctccaactcctgggctcaagcgatcctcccaactcagcctccatagtagctgggactgc

SEQ ID NO: 645580 - DNA, 144 bp, Homo sapiens
gggcagggttcagaaaggggaaaggaacacgcgggtagataatttctagcaggcaggaagtcctagtagcggtgtacaccatagagcacctaccagctagtactagtagccatatagaatacataaatttagataaaggtaggt

SEQ ID NO: 645581 - DNA, 114 bp, Homo sapiens
tattcacagcgtactttacagtgtctggaacttaaggccaatttgtgctgaatcgaggaaaaacaccaggtctgggggccaattggtgctgacttctcaaagctggatcaaaag

SEQ ID NO: 645582 - DNA, 304 bp, Homo sapiens
  misc_feature (260)..(260): n is a, c, g, or t
  misc_feature (286)..(286): n is a, c, g, or t
tgtttcacgtagacggtctcagttccttcctccatgtcgctggggactctgatgtcttactctcctagctcctttaagtggaatggaaaaaactgaagtgtattcaaattgtgaggggatgcccaggtgatgctcaacaaccacagcttctcttgagggcagaccctgccaaaatagaaaagtgggcactagagtattcaggtagataatagctctttgatatggtctatttatgggggtcctagaaacactgatgggtnggagccaaggtcttcagggaaggttntccagtccatcctattgg

SEQ ID NO: 645583 - DNA, 728 bp, Homo sapiens
gctggagtgcagtagcgcaatctgggctcactgcaagtccgcctcccgggttcacaccattctcctgcctcagcctcccaagtagctgggactacaggcgcccgccaccatgcctggctaatgttttgtaatttttttttttttgtagagacggggtttcactgtgttagccagtatggtctcgatctcctgaccttgtgacccacccgcctcagcctctcaaagtattggggattacaggcgtgagccactgcgtctggcttttcttttggtttttgagacagtctcactctgtcacccaggctggagtgcagtggcacaatcgcggctcactgcaacctccgcctccggggtcctagtgattggcctgcctcagcccctgagtagctgggattacaggtgtgcaccagccacaccgggctagttaggggtttaagtacaagacagggtttgcaccatctaggccaggctggtctcgaactcctgacctcaagtgatccacccgcctgggggctcccaaagtgcgggggataacaggcgttgagcccacggtgccgggccccatattggttctgaggtggacgaatttggatcgtaagagctcctcaggaataatacaccacacgtagctgtccagtgacagatgtgggcctatattggtccaatgaaggcacatcccgtcggggccgaaccagcctgggaagaggccgtttcccgcccggtgtgtg

SEQ ID NO: 645584 - DNA, 402 bp, Homo sapiens
agggtggtggtgtggtgcagggtctgggagtgctgccttctccttgtactctttgtctctccctcagcaagttgtcaggcatttccctggtgctcagccttatgcttgaagtgggaagggtattcccaccctcaggagggacacgcttcacacacctgaagtagatcatcagaagcagactgagcagaaaagaaagggtgcaataattcaaaggggcctaacaagttcaatgggagggctttccaaagacctgctttttcaagtgtgtcctctttctgtgaatgtgggatttttttttttctttccctctctcttccatgcacttgttgtgcaatctggacttgattactgtgcttagggccagtacatgggttagaagaatataattatcagagcttgtta

SEQ ID NO: 645585 - DNA, 125 bp, Homo sapiens
aaaattcacgggctgaatgtcccctttgatgcagtggtagtggctaaatccactgttgagggagtcatatcgctccaaagagaaactggaatgagagctgcagaaagactaattcatttcaccat

SEQ ID NO: 645586 - DNA, 257 bp, Homo sapiens
  misc_feature (34)..(34): n is a, c, g, or t
tcgggtgactctgaggatcgccgggagcccttancctggtgatgtgcggagctcctatgaatagagcatacagttggaggagcgtgggggagagaggaaactgcggtgagctagcatgtctttcttctgacgttatggacttgaatacacctgttcagtctggcatggcagagatagtttagcgctttcaatgggcaaggacagccagctgcctgtcaatgttcacgaggcagaccaggccatctcgagaacttgtg

SEQ ID NO: 645587 - DNA, 674 bp, Homo sapiens
  misc_feature (185)..(185): n is a, c, g, or t
  misc_feature (387)..(387): n is a, c, g, or t
  misc_feature (601)..(601): n is a, c, g, or t
cttttacagggtgcatgtataaaaaaaaaactcctgagtcggtcagaacaacttgttacttatcattattgtataaaaaggaaattagcctttttctttttttggtatatctgtgaaaaatattgctaatagtgcatttaaggagattgtgagacaattcgctgtatggagagagtcagtctttntttctgccaaattattaatggtcctgagtctatgcacctctagcgtggctttttagtacttttgtggttccaaaccagtttattctatggtgctataataagctctcatataatctttgcttcttaaaaactgagtatcattaatatatatgtgctgcaagacttaaaactgtgtccatgataataccatatgaagacatgnatctctaaaaggcaactcaaagatgatggacacgtacttacaagtggtgaccataatttttaggtgaagtcgagcactctaattagagaactggaggaaccacatattacactcatcttcccctaccctgcccttgcccaaaagaaaccatgacaaacctaccttttaaaatatattttaagaaagagaatgaactggggaatttattggcagncaggaatgtgtgcattaacatgctgaggttatgaataaaagtgacttttatatctgaactgcggcccccttaa

SEQ ID NO: 645588 - DNA, 193 bp, Homo sapiens
gtagaaacccccccggagacaactttgaacctccgtgacaaggaatttttcggcgaaggggatgaaaactacatccaggacaggtttaatcttactggactcaatgagcaggtccttaactatcgacaggctctagacatgatcttggacctggagcctgatgaagaactggaagacaaccccaaccagagtg

SEQ ID NO: 645589 - DNA, 781 bp, Homo sapiens
gcccagctaattttgtattttcagtggagacaaggtcaccatgttggtcaggatggtctcgatctcctgaccttgtgatccgcccgcctcggctcccgagggtgctgggattacaggcatgagccactgtgccccgccctttttttttttttgctgtgttacacgggtggaaggtgtcattttgggtcaaattcgacctagatggttggccaaagtgtttctcaaacagcccttgtccaggagaagattcaactcagtgcgtgtccttccctcgtgactggctgagctagtctggtccgtgtcgtttagatctaagaatattttccatatgttcagaaagagggtaagtgtttatataccgtgtggggtgttgaaacaaggtgcggcgagtggcaattcggggtggtttggggcagtgagccgtggccaataagtggtggcacttttaattgtctcgtgggtttcctcaatcctcaagaagatccccttgtgtaggactgaaccagttgtaaacccacccttcttttgccccaataagaagaattaccccacgggggcatattaggttatttcccacattgtcacccgggctgtggcaacctgggttgccggtgtgggtgcttgggtccaaacttcacttttagcaactatttttgtgggaacccaccggtggttccgccgtggtttaaagagaagagaacatactcacgtattagcccccgcaccggcacccacatcagcacattaggcgtgccaagaagtgtaaaccgccccacctggg

SEQ ID NO: 645590 - DNA, 864 bp, Homo sapiens
tattttggatgagacatttttcttactctctataataaatcgtttcttatctatggcattctatagatcaatctcttgtcatgatatatagaggttaagctaaagagtatttcctcttagaagacaggttctataaacgtgaatatctgttgcacactggtcatgctaggaaaaacatttgatgcggcaatgaagatgctctgtaatatacatgtctcaggttatcacaggaaaacacaggagtacgcatgtaccaccaaactttctaaagtcaacaacatggcacacacttcacaggctactgcatctcatgaactcaaggcataacgagaccacgcgcacgcaatctaccccaagaacatgctgatacctcaacagcgactcaccatcccactcgccttccctgcctcgcaacctgaacgatactcaactgctacccatctctatgaccccaccatcatgaacaaaccaatccaccttcagcccccactgccactcctccgctctcaaactcaggacaactccacccacggaccccaccgctgaccccataaccctctcccccaccaaaccagggcccaccaccacccaacccgcagcagacaccgccccgcccccaacacgcacacacccaccccaccctgcccaaccaccgcacccttaaaccccactacccctcaaagctcggcacacccccacacccccaccgcgcaatcgacacacccgaaccccccaccatccctccaccaagcctggaacactagcccgacccaacccaccgaccaccccctcaatctacccaccgacacccacaccctccccccctaccacacacaaaaacaccccaccccgccgcacccccgc

SEQ ID NO: 645591 - DNA, 100 bp, Homo sapiens
ctgctgattaggctgaattgtcttctctagccatgccacactagaatgtctccctccaatgagcctgtgaggttggggctgctttactcggccagtggta

SEQ ID NO: 645592 - DNA, 987 bp, Homo sapiens
ccacgcgtcgacagattcgtcgttatcagaagtcgaccgagctgtctcatccggaagctggccttccagaggttggtgagggagcatcgcagcagagatttgcaaaatgcgactctgagcgttatcacgagccgcatgccatcggtgcgctgcttaggaggttagctgaagcgtactccgtggtgggtcgtgttctgagagtattacccaacccctgttgtgccactcgcgacagcatataggagatgtctaccgattcactgccgccaacacgaacaatcccacggttgcgcgtcgccggcagtacgggggagcagagagcattatcgtgaaaggcagtgttgggatggccgtttattgtactcataattctgtctcatactttggcgttgtaattggtgacctttgtattggtgacgcaaaattgtttagtaatactgttgctttttggtactctaacgctcattccgagtcttgtcagctcgaggatgcatatgcgaataagtgactgtttcaactacgagcctccaggtgatgtgagcagcgtgttgctcaggagtgacgtaggttgcctaatatgcaggaagggatgggtgatacttctggcttctcactgactgtcggtgtttctgtatgttaaatgatcttgtggggtagctattaaggtactagcagtggatatagagtgtgtacacgggtccttttttgcaatgaaatacatggttatgacttgaatccaaagtgtatacacaaattggggcgtgttaacgtgctgaccagtacgtcgcctgttgagtagacatggtgggctttttacaacggggtgaatgaatccatgtcttaaccagcaggtgtactttacaggtttccgttgtaaaaagacaatacgtagacccttggggtgtttaaaaaaccctaatgtccattaatgaagcccttcattttgggcatcccatttcaattaactggttacgttcggaaaaaaaa

SEQ ID NO: 645593 - DNA, 222 bp, Homo sapiens
tgtgatggtcttaacgtatgacacattagtacgcctgttaaatattgcactttactaccaccttagtctacttcatcttcatctccttccccttcttctcctcctccacatttctcctagcaaagaagtatcatcttttcttaacaatattatgacgcaacacatgtatatattttcctattacttgtactactagatgagcattgatgcattttttccaca

SEQ ID NO: 645594 - DNA, 171 bp, Homo sapiens
gggggggggaaaaaaaaaattgcccctttttaaaagcgggtaaaaaacctgggttagggggggggttccccctccaaattttttttttaccccctgggtcatgggcctttggggtgggaagttttttttcccctaagtgccccccaaaaattttttttttttcccctggta

SEQ ID NO: 645595 - DNA, 179 bp, Homo sapiens
catgggtgtcctaccagcatgtgattgataggcgactgccaaaaacactaagactaagaaggataccgaggccgtgcctgtgcacagctggacagtttactgtgattgatgaatgatgtctaggcattaaggcttccccctaaccgtaaggttttgaatgacaagcaaatccaatttgc

SEQ ID NO: 645596 - DNA, 130 bp, Homo sapiens
actattcgcgaagcttagtgctaacctgggactgcctgacttcctttagcctggacccttgctactaccttgaactgtgggatctaacctctctttttctgtttaactctttgctactgccattgaccct

SEQ ID NO: 645597 - DNA, 1185 bp, Homo sapiens
  misc_feature (632)..(632): n is a, c, g, or t
taggtctaggtacgaggctgggttttcgcgccgcctgactgtcgccagcagctcctcgtgcggcccaccgcagccgccgctccctgaggcgcgggaggcccgcgccccgcggctcgctgtgcgtgggagggcgcgatgcgaacgcgggcgaggagcggccgagccgctgaagaggagctgggcgccggccgcccggccgctgctcggcccgcggatcgcctccgcccggtcttcgccggccccggcccctggcgagatgccgtgtggggaggattggctcagccacccgctgggaatcgtgcagggattcttcgcccaaaatggagttaatcctgacttgggagaagaacgtaattgagtattttaaggaaaagctgaaggaaaataatgctcctaagtgggtaccatcactgaacgaagttccccttcattatttgaaacctaatagtttggtgaaatttcgttgcatgattcaggatatgtttgaccctgagttttacatgggagtttatgaaacggttaaccaaaacacaaaagcacatgttcttcatttgggcaacactatagagatgttagcagagttgtgggccctcaacaaagaacttgatttaaactctccacgaaataccacntttggaaaaggacagactttctattgtgtccggttgcctggggaatctacgttgggtaaaaagaagcctatgtaatgcaaaccaagctcgagtcagtccctcaaattctaattcctagtcgccacagaggggcgttttgaacgatctattgcgcattgtgcctaaagccaattagccgaaagaccccatttcggttcccgacaacaggggctgttgcgggggtcccaggcgttgggagccccgctttaacgtgaggtcttctgggcgccggtagcactctaagagtggttatccatagagaggaggaattccactgcgggggagaaagagagcgcccgaagctttataggtgtatcaaattggaggtgtaaaaaaaaaagaagcaattttgtaatattagtaatagagggaggtaagagggaacattataaacataaaaaagccgttatagataaggtgaagtatcacaagagagaagcatccttttttttactgtagtagagaaacaactgcgtgaagaaagtgatgatttaagataggagggtgctaatat

SEQ ID NO: 645598 - DNA, 590 bp, Homo sapiens
agcgggtgtttacagtatatgctcgactgtaatggcattgcagtaggccaaaacaagtccaagctcttaaaatgattggtgcttaatttcaaagcagaaatttaagccaaaacaaacgaaaggaaagcggggaggggaaaacagacctcccactggtgccgtgctgcgtcttcaatgctgactggactgtgttttacctatgcagtgtcagctcctcatgtctggttgtttacctgttcctgttcgtgcttgtaatgctcactttatgtttctctgtataacttgtgattacagggctgttgtcaacagtatacacaaagaattgtgcctctcccaagtccagtgtgactttatcttctgggtggttgctagtgtttcaacagtcactatataatgtggggtgaaatgggagctaggggggtggacaggggaagaaacgacaacacaaaaaagaaaacccaatcctctcactcaccccaaagctcaagttaaatcgcccactccaattttcctccaccagtgtgcttgggcatctctcaatgcaactggccttcagcttcttctgctgcactattgtcactcacatgaac

SEQ ID NO: 645599 - DNA, 812 bp, Homo sapiens
ataatattatacgtagcatttaccatctcacttctaggaatacatagtatatcagctcacaccgctcatgtcctccctactatgcctagaactgaataagtactatcgcgtgtgcattatacgctactctcataaccctcaacgatccactccctcttagccaatattgtgcctattgccatacatagtctttgccgctgcgaagcacgggtggtgctagccctactagtctcaatctccaacacatatggcctatactacgtacataacctataacctacttccaatgctaaaacttaatcgtccctaagccaattatattactaccacttgacatgacttttccatagaaaacaacataatttgaatcaacacgaaacgatccacagtctaattattagcatcatccctctactattttttaaccaagatcaacgaacatacctatttgaggctgttccccaaccttttccgtcgcgacccccctaataacctcccgtcctaatattaactacctttactccgtacccctcacaatcatgacaagccgatgccgattttatccagctggaaccattattcacgagaaaatgacttctacctcgtcgtattactaatctcgcctacgaaatctcctttaattatttacgattcacagcgccaccggaaacggaatgcatattctgtattatctgtgcttcgaaaaagccactgacttattccgccaccttgggctatcatcaacccggatgagaggcaacccgggccgaaagccttggaaagcctggcaccgttccttccttattcctaag

SEQ ID NO: 645600 - DNA, 104 bp, Homo sapiens
tgtcgtgtgtgccattccttgcagagcgtgggttccttgcagaggcagaggaagctccctgaggagcacgccaggttctatgcggtcgagatctgtatcgcagg

SEQ ID NO: 645601 - DNA, 336 bp, Homo sapiens
agagaatccaaccacttcctcatgcgacgagaccatcatgtcagtaggtggaggtcagctggtacttcttttacagagcagggtggcacaaaacgaccacccaggtaatggtagcgaccggtaaactgggttgcagatttgtggggggcttagtgagggagatgagcaatgtctggctggatccctccatcatctcccttctccacgtcccatcctgaggtaatgtcgatgctggcaatggcgcacagtgagtcccttcaggacactcaggatgctgtggaacggttcacgaacgtcgcccttgatgctgacgccaaagacgaagcactccctggt

SEQ ID NO: 645602 - DNA, 111 bp, Homo sapiens
  misc_feature (11)..(11): n is a, c, g, or t
gagctagaagngtgatcctgttagaaggctagatttgcattgcaggcatcagccaagagactacccctttgaatgccccatatatgtgcacgcagaagcatctcttatcgc

SEQ ID NO: 645603 - DNA, 139 bp, Homo sapiens
  misc_feature (36)..(36): n is a, c, g, or t
  misc_feature (112)..(112): n is a, c, g, or t
gtctacgatcgagctcggtaccgaattcgaaagtgngcacagccttggactgccagccactactcatgttcaaaactcaggtgtcagcttcccctgaggggctaggtctgcntccttggtacagaagcttgtcgagatt

SEQ ID NO: 645604 - DNA, 995 bp, Homo sapiens
  misc_feature (44)..(44): n is a, c, g, or t
  misc_feature (98)..(98): n is a, c, g, or t
  misc_feature (243)..(243): n is a, c, g, or t
  misc_feature (482)..(482): n is a, c, g, or t
  misc_feature (485)..(485): n is a, c, g, or t
  misc_feature (488)..(488): n is a, c, g, or t
  misc_feature (490)..(491): n is a, c, g, or t
  misc_feature (494)..(494): n is a, c, g, or t
  misc_feature (501)..(501): n is a, c, g, or t
  misc_feature (506)..(506): n is a, c, g, or t
  misc_feature (508)..(508): n is a, c, g, or t
  misc_feature (515)..(515): n is a, c, g, or t
  misc_feature (518)..(518): n is a, c, g, or t
  misc_feature (520)..(520): n is a, c, g, or t
  misc_feature (584)..(584): n is a, c, g, or t
  misc_feature (587)..(587): n is a, c, g, or t
  misc_feature (599)..(599): n is a, c, g, or t
  misc_feature (604)..(604): n is a, c, g, or t
  misc_feature (615)..(615): n is a, c, g, or t
  misc_feature (618)..(618): n is a, c, g, or t
  misc_feature (621)..(621): n is a, c, g, or t
  misc_feature (636)..(636): n is a, c, g, or t
  misc_feature (638)..(638): n is a, c, g, or t
  misc_feature (642)..(643): n is a, c, g, or t
  misc_feature (645)..(645): n is a, c, g, or t
  misc_feature (653)..(654): n is a, c, g, or t
  misc_feature (656)..(666): n is a, c, g, or t
  misc_feature (690)..(690): n is a, c, g, or t
  misc_feature (733)..(733): n is a, c, g, or t
  misc_feature (762)..(762): n is a, c, g, or t
  misc_feature (778)..(778): n is a, c, g, or t
  misc_feature (782)..(782): n is a, c, g, or t
  misc_feature (815)..(815): n is a, c, g, or t
  misc_feature (819)..(819): n is a, c, g, or t
  misc_feature (821)..(821): n is a, c, g, or t
  misc_feature (823)..(823): n is a, c, g, or t
  misc_feature (830)..(830): n is a, c, g, or t
  misc_feature (855)..(855): n is a, c, g, or t
tcacgggccccctgttttgcatctttggcgattccctgtcaggncctctgccctactaggctgtaaactcagggagagcacagtctggctgtgctgcnaaacctctcctctgctgcagtttattccaaaacaggagccccctggctgtcagtgcacaataataaacacacatttcttcaacgttccattcctaggtgattttcacatttttagttcctcagcatattttattgctgtgtgttnacacaatctggtataaaaaactttctctggattcagaggaagtttgaggaatcaggagaggaccaggccttctcctgtgcctgggtgaaggtacagacctcgctgtgtctccgatgaggtcagaagtgtctctatttcataccacaaaggaacccaagtgggagtagggaacagatggatggcgcgaagacccctgtgaccccccagagaaaggaagaaacttaagaaccaccaaagcnaanacnannaanatcaaanaaaanangtttacnaananaaaagcctgtgttttcagaaactctgaattcagaaaaagaaacggaatgtgcgtaagaaacagnccnccgcccggaaanacccncccccaacccntanccngaggcccagagaagnanacanncngaaacaanncnnnnnnnnnnnccagggaataagggaaccctttanaacctgtccagtgctgtcatctgggatttttctctgaagtacnagaatttcaggtgatttaagctgcttgancacacttatttgtgcnaaantgattttcatttaatgttaatgttttcctgctnaatntnanataactncagaatgtaaagagcttcaaagtanaattacaaggtgtttaacctggggagttaaatgtgtacacttgaattaataggagcacccggttgttgctagtataaagtaatttgtgtggcagtttgtactgtgctgagtttttaaaataaaccccatattttaaagta

SEQ ID NO: 645605 - DNA, 505 bp, Homo sapiens
  misc_feature (6)..(6): n is a, c, g, or t
  misc_feature (10)..(10): n is a, c, g, or t
  misc_feature (21)..(21): n is a, c, g, or t
  misc_feature (34)..(34): n is a, c, g, or t
  misc_feature (52)..(52): n is a, c, g, or t
  misc_feature (66)..(66): n is a, c, g, or t
  misc_feature (76)..(76): n is a, c, g, or t
  misc_feature (84)..(84): n is a, c, g, or t
  misc_feature (87)..(87): n is a, c, g, or t
  misc_feature (136)..(136): n is a, c, g, or t
  misc_feature (411)..(411): n is a, c, g, or t
  misc_feature (489)..(489): n is a, c, g, or t
gacatnaatngcatgaccgantttcaggttcatngcatctggggggcccgancgcgcatggacttnaaaagtatgntgataggntcnacgaccgtgtccgcgcgttaactttcagaccgagcgcctgcggtcaaangtcgcggacttgtggacgatcacgcgcagctcttgcgcctgttcggcgtcagttttggcatcagcatagcaaccggtgtggatctcgataaacggtgcgccaacctctgccgcagctttgatctgctcttcatcggcgtcaataaacagagaaacctgaatcccggcatctgccagacgtttgcaggcatcgcgcattttgtcacgctgccctgcgacatccaggccgccttcggttgttacttcctgacgcttttccggtaccaggcagcaaanatgtggcttcgtctcaacggcgatcgccagcatctcttcggtcaccgtccatctccagatttcatgcgggtatccagncgtctgacgcaggatg

SEQ ID NO: 645606 - DNA, 788 bp, Homo sapiens
  misc_feature (570)..(570): n is a, c, g, or t
gaaggtcgtgaaaaaaaaggtcttggtgaggtgccgccagttgtgcatctgtcctcattactgcatgcgccctttacgcagtagcttccagtagcggtatgttgggtcagagcatccggagagttcacaatatctctgatgggtgtgatatgagagatattgatgaggagggccctgggaagagattttgccatttatcagtggaaaacaagtggtcgttattagctatgatgtgtgtgtactgtaggatctgcattagctacgagtccttccttgtatgtaaggagagctcagagtgtgttaaatacaataaggatgtttcagttgctttcatttagaagattatgaagagcgattttacagaggtgcagactcatgtgaacgtggatcaagagctagaattcatatgtccaatattagatatgtttgtcaatatacttgatgaagtcgaaaaagataagtaggtgattaaaataatatgaaggcgagctggtaagggagagataaacgtatggtgatcaaagagcgggagagcgatgacgcagggtagaattgccgtcgtttacaagncgtagttaaagggatattacttgagaacgcagacgagggtgtggattgattacctctggtgaggtggggcaggatgaggcaactgggggttttgatagaaagttcgaaggtggaacttggggacagaagggggtggatggcgaagggaaccaatggaggacgatattggaaataagacgcgcgggtggtttaaaaaagtattatcgaagtgaggaaaa

SEQ ID NO: 645607 - DNA, 877 bp, Homo sapiens
  misc_feature (48)..(48): n is a, c, g, or t
  misc_feature (101)..(101): n is a, c, g, or t
  misc_feature (111)..(111): n is a, c, g, or t
  misc_feature (144)..(144): n is a, c, g, or t
  misc_feature (149)..(149): n is a, c, g, or t
  misc_feature (153)..(153): n is a, c, g, or t
  misc_feature (167)..(167): n is a, c, g, or t
  misc_feature (169)..(169): n is a, c, g, or t
  misc_feature (229)..(229): n is a, c, g, or t
  misc_feature (273)..(273): n is a, c, g, or t
  misc_feature (288)..(288): n is a, c, g, or t
  misc_feature (292)..(292): n is a, c, g, or t
  misc_feature (406)..(406): n is a, c, g, or t
  misc_feature (423)..(423): n is a, c, g, or t
  misc_feature (461)..(461): n is a, c, g, or t
  misc_feature (750)..(750): n is a, c, g, or t
  misc_feature (771)..(771): n is a, c, g, or t
  misc_feature (779)..(779): n is a, c, g, or t
  misc_feature (784)..(784): n is a, c, g, or t
  misc_feature (789)..(789): n is a, c, g, or t
  misc_feature (858)..(858): n is a, c, g, or t
tgtaatttttcaaaaaaagtaaaagctggtttatcctaaactattttncttgtggtagtagagattagtgggtcagaaaaaactcctgaccacttggtttnattttgaggngcgtaattaggaggaaatctgtaaaaatagcanaggtntccngctgttccactggntnacccacatgattaggagagtggaagaaaaaataaaaattctattaaagaatcatgctganaaaaagataagagaggttgtgaaattggaaaatagatagatggngggggggtgggggantggngttttccaaaggggtcccaacaccatctctcctctgatttttgtgaaaaatgtggaaagctacttgcttggaggtaatgggggaaatgatgggggaatttttattctgttaggnactttgctttttatttntgtgtttttgttttgctccctggagatggatggataanggagggggccacagttagctggggcagcaggtactccctacgggactagtttaaagggggaaggacgctctgtgctggcagcggtggctcacatggcctgtctgcactgtaaccacaggctgggatgtagccaggacttggtctccttggaagaaaggtctgatgtttggccaatccagtttttagaccctgcctgaaacttgtatcttacgtgaacttaaagaataaaatgcatttctaccccgatctcgcccccaggactggcacgacaggcccacggcagattagntcttttcccagtactgatcgntgcgtggnattcngccancacttctgattcgatttcacagtgatcctgtcctctgagtattttaaagaagccattgtcaccccagtnagtgttccaggagttggca

SEQ ID NO: 645608 - DNA, 956 bp, Homo sapiens
agcttcttcgatcccgccggaggaggagagcccatctataacaacacctatactgattaacgttcaccctgatcgtaatatctgatcctaccgaggcttctgacaatgctctcccgaatatggtaagttggtactactcctgtgtaatatcacagacatctatattggctcgctaagagtattgggtctggagctattcgcatcctcaaatctgacttgccgaagggttcatagtgttgtgagcaccatcgctatcatatcacacgggacagggaatagacggatacacccacacgtagcatatgtcaacgcgtcccggtaccagtattctatctcttatcccaaccggatgtcgatattattataagctgatctccgcacaaaatcttcggaacggtaagggcatgtgttgtcatgtgtcttgctggcggtgcctcagagcccctaggtatttcatcattatatgtattctaccgttagcgttgcgcccctggcccttgtaacattgtgttgataagactgatacgttcacttcagcataatgaatgcctctgtgatcttaacatctgacaagagttacttacccgtagatatgtgtcacttatctatctattgtccttagtccaatacgggcgcgtggtattttctgccatacagtatggcagggcgtccatccagcttgatttgccgccgtatgctcaaggttaggacccgttagatcaaggcctacggcccaaattttatttcccttagtgcatatttctggggcggaaatcgtaacttttcatcccaccacgaatttgctcggctgagtcggatgcccgggggtgcctgcggctaccccgaatggttacccagatgaaaagtcctgtagctggtggggcagttaccgtcccatacacgcggggctcacacatcaagatggaagcttctttgtaggcgcgacgctaatatat

SEQ ID NO: 645609 - DNA, 1012 bp, Homo sapiens
ttgaaatccagcctgggctacagagcgagactctacctcaaaaaaaaaaaaaaaaaaaaaaaaaaaaagggaaaaaaaaaatccacccgtggttatttattttcaaattctgggagtggccctaattttttaaattccattaaggggtggagaagggaattgggattaagaacgcaactttttctggcaggggattagaaccaattggggggtgggcgaaccttgcaccggaggggtccctttgccttacccttagggccacttgcacaccttcttatcgccttgtgcagtggggagaagccccattcgagggtacaaaaaaacggctggattcccttcgggagggagggagggtgggaaccaaggtgtggcaaccaaggcggtttatctatcaaagagacgttgggtgcgaaaaccttctttcgagagggcccaacaataccttttagtgtctcaaacaatcccctttggctttggacgcacgcacttggggcgagtgtctcttggttggacgccccacaaagggcggcagggggcacaacctatttaggggagagcgcccaagaaaggagaggtgtggttggtcgcttgggaaaaaagagactatctcgctgtggagaggggtggtttctggtcgagacaccatttattcttgcgcaagaaacgcttttttccaaaaagactttcgctttgcaattttccagaaccccaaaaaattcagggctgtgtaacaggtcagaaccgcaggggccaatctcgcacaaaagaaagggagaacccaagaacccaagggggggtgctacacgatgggggggcgctatacgagacccagtgtgaagcggcgctgcgctaatacagcagggggcgcttgggggccttctctttttggggccacattttgggacctctgtgggggccccccttctcataaaactcgagagatgggtctttggtacaaccatttccatttagggcgaggggatgaaatttcccacaaaataatttgaaacag

SEQ ID NO: 645610 - DNA, 169 bp, Homo sapiens
  misc_feature (42)..(42): n is a, c, g, or t
tcatcacatatgtgctgaaggacaagcagacagagaaacaantgtgaacaactgagcagtagcctttgaacacccttcttctcttgccacggtctattcggcagatactactggacacttactatgtatcatgcaaataatttctgctggagggatgagggtttgatga

SEQ ID NO: 645611 - DNA, 175 bp, Homo sapiens
atctagttaacatatatgcattcagtgtaataaataatcctctactcactgctttcatttcatctcacaaattttaatgttgcataattcatatatatcattataggctacaaatatttttatatatctctagcagatttctatctattgctaccatgcagtatatagtacgact

SEQ ID NO: 645612 - DNA, 242 bp, Homo sapiens
gtccgcttcttggcaaaagtagcttttgaactgatataaaaaaaaatgctgagtaacagaaaagtattaatgtgcttgacaaacaagatcatagtatttcagtcatggtgtcaagcacattaatacttttctgttactcaataaaaagcagctatctgtgaaccaggtaactgtgtgttttggaagatctgtttattaacagtaaataaataagccctgtacagaacacaggcactaggttg

SEQ ID NO: 645613 - DNA, 276 bp, Homo sapiens
tgatctacaggatccttaagctttggtcaggaactgggtttggcctgtaagccatatttgacaacctctgcattagaaggtgcaatgtaggctaggtgcactggctcatgcctgtaatcctagcactttgggaggccaaggcgggtggatcacgaggtcaggagatcaagaccatcctggccaacatggtgaaaccccatctctactaaaaatacaaaaattagctgggtgtggtggtgtgcacctgtagtcccagctacttgggaggctgaggca

SEQ ID NO: 645614 - DNA, 355 bp, Homo sapiens
ttgggttacaacctcagcttgagagatctgctctggcatttatacttcctaaaatagagaatttgagtgaatgaggtggccaccatccaaatgaagtgcctcaactgggaagagattcatgccaacctgctagggcatggtgtttagcctttcttatatttagtcaattcatgggctcatcatttggggtgaggtcatcaggatggtgccactcaattcacttggcaagagccacagcaactgatgtaggaagaagcctgttggagtttcttttactaaagggcacctgggggccaaggatacatggagtcttcatgaattaatgaatgaagcccctcaactggctcagtataaa

SEQ ID NO: 645615 - DNA, 2675 bp, Homo sapiens
  misc_feature (6)..(6): n is a, c, g, or t
  misc_feature (13)..(13): n is a, c, g, or t
  misc_feature (15)..(15): n is a, c, g, or t
  misc_feature (18)..(18): n is a, c, g, or t
  misc_feature (21)..(21): n is a, c, g, or t
  misc_feature (24)..(25): n is a, c, g, or t
ggctgntacgacngnganttnggnntcggggcgctggcgggcggggcggggtctgtagttagcggcgagagtgacaggaggacaggggttgtttcggcagtgacgcctggggagtgacgcaattgcacccctgtgcagtgatgtcacggcaggcttatggaagaagaaccagtgtcagatttcgcagttcaggaatgactttagacaatatcagtcgggcagctgtggatcgaataatccgggtggatcatgcaggcgaatatggagcaaaccgcatctatgccgggcagatggctgtcctgggtcggaccagcgtcgggccagtcattcagaaaatgtgggatcaagaaaaggaccatttgaaaaagttcaatgagttgatggttatgttcagggtccggccaacagttctgatgcccttgtggaacgtgctggggtttgcactgggggcggggaccgccttgctcgggaaggaaggtgccatggcctgcaccgtggcggtggaagagagcatagcacatcactacaacaaccagatcaggacgctgatggaggaggaccctgaaaaatacgaggaacttcttcagctgataaagaaatttcgggatgaagagcttgagcaccatgacataggcctcgaccatgatgcagaattggctccagcctatgccgtcctgaagagcattatccaggccggatgcagagtggcgatatatttatcagaaagattataaagtgtgtccagttttgcctgtctataaaagatgatagtaatttaccaagtgacatttgcagagaaacaggtgtacagttatcgttgtacttttgtacaatgtgaattttgttaataaattataaggtttgtttttttttttaaactctgcagtgttgatttttctctgggttgttttttctgccatgagaccaacaggtcaccagccttgttcaagttacagcaaacgaagctgggccttgtttggtctcatacttaattttcttttatatacatgtttttcttttacatgcatatatatatattttattttattttatgttttttggagacagggcctcgctcttttgtccaggccgggtcacaactcactgcagcctggacctcctagcctcaagcaatccacccacctcagccttccaagtagctgggactacaggtgtgcaccaccacagctggctaattctatttttttatagaggcgaagtctcactatgtcgccaggctggtctctaactcctgggctcagtgatcctcccgtttcgacttcccaaagtgctgggattacaggtgtgagccacttcaccaggcccattttctcctaaaacttcaaggacaaatcattaataatgtaacaggaatctttaggagaaaaaacaatttggtttactgataacaaaagataattggaaacatgagagtatttgagattggccaagcagaactatgaagtccatcaagtaagtcaaagatcatcgtttctgttttgaattgtgggtgataatgggtgggagagtgctacagtctgtatgtctgtgtctccctagaattcatacgatgaaatcttcactctcaagttgatagaaggtggggcccttgggaagtgtgaggtcatgagagtggagccctcatgaatgggatcagtgccttatgaaaggccctagagagatacctcatcctctccacagtgtgagacttcaaggggaagtatgagacttctctgaggaagcagacccttcacaagcaaaatcagccagcactttgatcacggacttcccagcctctaggactgtgagcaataaatgtttgatgtttataagccacccagactgtggtattttgttatagcagcctgaacagactaagacgggggtgttgcttccatcaaaggatgtactaagttgtggattatttgtgaaattgaattacaaccttttccttaaggtcttttaccacctcccccccaaaaaaatcccccaaaactgattcagattttcatactttaatgaaatattttataatttgcaaatttttaagtaatttatgaaaaacctagatcagtggatctcctctctggctgcccattagaatgtcctgtggagattaaacttttttttttcagtttatggaccaagagttttgatttatttagggtggagttcaggatcagaatggtttcagaagctcccaggtgattccggagtgagttggagctgcaagcccctgagctagattataagatgcttctgggaaagaaccacattttaggaatttgcttcccacccagtgccctgcatttaatcagcacctgatgacttggcaggacttgccccaccagggtctggctttgaagggtagtggacaccaggatcctttggattaatcctctgccacctctctcttttcctcaaccgagagtgaatttatgtaattgagtgaaagtctacgaatcataattgtaataaattaaggctgggcatttgtttgaaattagataggataaagccaaaggtttgaacaagttgtggatggtttgtaaaaattaatcttacaaaataaatgctgtgtgtgaacacgttgattaaattcaaaagggtattatttggtttttctgtaaattgaaccttgaaataaaagcacaacaaggttttcttaaaaaaaa

SEQ ID NO: 645616 - DNA, 3999 bp, Homo sapiens
  misc_feature (864)..(864): n is a, c, g, or t
  misc_feature (873)..(873): n is a, c, g, or t
  misc_feature (907)..(907): n is a, c, g, or t
  misc_feature (967)..(967): n is a, c, g, or t
  misc_feature (992)..(992): n is a, c, g, or t
  misc_feature (994)..(994): n is a, c, g, or t
  misc_feature (997)..(997): n is a, c, g, or t
  misc_feature (1001)..(1001): n is a, c, g, or t
  misc_feature (1013)..(1013): n is a, c, g, or t
  misc_feature (1017)..(1017): n is a, c, g, or t
  misc_feature (1036)..(1036): n is a, c, g, or t
  misc_feature (1043)..(1043): n is a, c, g, or t
  misc_feature (1046)..(1046): n is a, c, g, or t
  misc_feature (1052)..(1052): n is a, c, g, or t
  misc_feature (1054)..(1054): n is a, c, g, or t
  misc_feature (1061)..(1061): n is a, c, g, or t
  misc_feature (1070)..(1070): n is a, c, g, or t
  misc_feature (1072)..(1072): n is a, c, g, or t
  misc_feature (1076)..(1076): n is a, c, g, or t
  misc_feature (1078)..(1078): n is a, c, g, or t
  misc_feature (1087)..(1087): n is a, c, g, or t
  misc_feature (1092)..(1092): n is a, c, g, or t
ctggactcatttacttttacagttatatcatagacttgctttctggcactggtttcctggaggaaactagcctcttttacggacattacaccattgatgaggtgaaatttcagaacttcacctatgatctgcccctggcgtatttgttaagcacaatcgcctccctggccctgagccttctttggatagtgaaaaggtcggtggaaggattcaaaatcaacctgattcggagtgaggagcactttcagagttactgcaacaagatatttgccggctgggacttctgcatcactaaccgcagcatggcggatctgaagcacagcagcttgcggtacgagctccgagcagatctggaggaagaaagaatgcggcagaaaatagcagaaaggacctcagaagaaacaatacgcatttactctttgagactgtttttgaactgtattgttctggctgttttaggggcatgcttttatgcaatatacgtagcaactgtcttctcgcaagagcacatgaaaaaggaaatcgacaagatggtttttggagagaacctcttcatattgtatctaccgtctattgtgatcacgctggccaattttatcaccccaatgatctttgccaagatcatccgctatgaggattattctccaggctttgagatccgtctgacaatccttaggtgtgtctttatgcggctggccaccatatgtgtcctggtgttcacgctgggctccaagatcacatcctgtgatgatgacacatgtgacctttgcggctacaaccagaaactctacccggtgagttgcggcgcggtggcgttcggctgtatgggtccttctggaatacagtgctggtcaagagaacagnggttgaagncatgggtttgaactgcatttgcttcgtttcttgntctaggatgagacagagtctggccccatggagtctaaccccaggcacttctgagggcttngaaaccaaggtctgtgctgaggctnanagnttgnatcagctgatgncctnactggagccacaggatctngagttgnggnaattanangtgtctngggagcctngntttntntgcctgctngggtntttcagtttccctcactctctttgatttcagtgctgggagacccaagttgggcaggaaatgtacaagctgatgatcttcgacttcatcatcatcttggctgtgacactcttcgtggattttcctagaaagctcctggtgacctactgttcctcttgcaagctgattcagtgctgggggcagcaggagtttgccattcctgataacgtcctggggatagtttacgggcaaaccatctgctggatcggagcctttttctcaccccttctccctgcaattgcaaccctgaaattcattatcatcttctatgtgaaagagtggagtctgctttacacctgcagaccctcccccaggccgttcagagcatccaattctaatttcttcttcctgttggtgttgttgatcgggctgtgtttggcaataatacctctgacaatcagcatatcacgcatcccttcctcgaaagcctgtgggccgttcaccaacttcaacaccacctgggaggtcatccccaagacggtgagcaccttccccagctcgctgcagtccttcatccatggtgtcacatccgaagcctttgcagttcctttcttcatgattatttgcctcatcatgttttacttcattgccttagctggagcacacaaacgggtggtcatccagctccgagagcagctatccctggaaagtcgtgacaagtgctacctaatccagaaactaacagaagcccaaagggacatgaggaactaactagactgagcgtgaagatggtgctgcctgttgcttctaagctgacctagtgattctgctgagcctacagagtctacctgggttttgagtggacatttaaaaatatatttttcttgagtttaggcttttccatatgtgcagctgtgtttacctaacccagcccttaattagggcttcagtgacttagaaaagcaggggaaacccaaggctttgcctgcagaccggccactctgtgacaactctaccaaaaaccaacaagccattcaagcttttacaagaatgaaagagcggagacggtagtttagtatttgagccacgagtttatgtgcacaagtgttttgggttgtggactgaagctcagcctgttaatcagaccagcccatgagtgtataacaaacagaattggaggctggtttcttaaacacacacgtccacattttttagggttgttttcctgtgcttacaatttttaatgcatgtgcctttatttcacaaaacatgtggctgggcgcagcggctcacgcctgttatcccaacactttgggaggccgaggcaggcggagcacctaagttggggagttcaagaccagcctgaccaacgtggagaaactccgtctccactaaaatacaaaattagctgggtgtggtggcacatgcctgtaatatcagctactcaggaggctgaggcaggagaattgcttgaacccaggaggtggagtttgcagtgagctgagatcacaccattgcactccagcctgggcaaaaagagcaaaactctccctaaaaaaaaaatgtagaatatctcttaagatttccgttatggtaaaaaccatatgcaataaatacctcattgtaagcttacccaaaattgatagatgtcaaccttttaacagaagaacagaagtttaagttattgtttaatgtaatcagttttcattttaatatctttgaaatctttttcaaaggactgtagttttgtaatggacttttcaagccttccttccattgtttttcttccgttcactggctccacacgtttcctggggagtagcctcttacttgaaggtttttaatatgttttgataactttaataacttcaggtgatgtctgtataatttttaaagtgcagctctctctaacaaatgtgccttacaactcctgattaaacggcgtcttgaaggttttaaaatgtgatcgtgtatactggaattcaaagaggcttcttgtcagcagtcaagtgatgatggaaaactgtaatagtttgtaaagttcctctttgctttttcgtctgctgtgcgtcatcagtccgagccaagggcactattggccagttccgttcaacgaagtggttgctttttttagttccggcaatgagttgcgccggggcggcggcggctccccgcctttggcggctgcgcccgggggcccggcggtccctctcagcttatggaagaagaaccagtgtcagatttcgcagttcaggaatgactttagacaatatcagtcgggcagctgtggatcgaataatccgggtggatcatgcaggcgaatatggagcaaaccgcatctatgccgggcagatggctgtcctgggtcggaccagcgtcgggccagtcattcagaaaatgtgggatcaagaaaaggaccatttgaaaaagttcaatgagttgatggttatgttcagggtccggccaacagttctgatgcccttgtggaacgtgctggggtttgcactgggggcggggaccgccttgctcgggaaggaaggtgccatggcctgcaccgtggcggtggaagagagcatagcacatcactacaacaaccagatcaggacgctgatggaggaggaccctgaaaaatacgaggaacttcttcagctgataaagaaatttcgggatgaagagcttgagcaccatgacataggcctcgaccatgatgcagaattggctccagcctatgccgtcctgaagagcattatccaggccggatgcagagtggcgatatatttatcagaaagattataaagtgtgtccagttttgcctgtctataaaagatgatagtaatttaccaagtgacatttgcagagaaacaggtgtacagttatcgttgtacttttgtacaatgtgaattttgttaataaattataaggtttgtttt

SEQ ID NO: 645617 - DNA, 197 bp, Homo sapiens
tgagcgtccccgtgtatggcttcaatcggcaggacggtgacggtgtgggagctcatcagctctgagtgcttcactgcggagcagtggcaggagctgttgtgtcagttccgcacgggaaggtcaccgtggagaaggtcatcaagattctcattaccatcgtggaggaggtggagaccctgctggcaggaggaggctgt

SEQ ID NO: 645618 - DNA, 4076 bp, Homo sapiens
  misc_feature (864)..(864): n is a, c, g, or t
  misc_feature (873)..(873): n is a, c, g, or t
  misc_feature (907)..(907): n is a, c, g, or t
  misc_feature (967)..(967): n is a, c, g, or t
  misc_feature (992)..(992): n is a, c, g, or t
  misc_feature (994)..(994): n is a, c, g, or t
  misc_feature (997)..(997): n is a, c, g, or t
  misc_feature (1001)..(1001): n is a, c, g, or t
  misc_feature (1013)..(1013): n is a, c, g, or t
  misc_feature (1017)..(1017): n is a, c, g, or t
  misc_feature (1036)..(1036): n is a, c, g, or t
  misc_feature (1043)..(1043): n is a, c, g, or t
  misc_feature (1046)..(1046): n is a, c, g, or t
  misc_feature (1052)..(1052): n is a, c, g, or t
  misc_feature (1054)..(1054): n is a, c, g, or t
  misc_feature (1061)..(1061): n is a, c, g, or t
  misc_feature (1070)..(1070): n is a, c, g, or t
  misc_feature (1072)..(1072): n is a, c, g, or t
  misc_feature (1076)..(1076): n is a, c, g, or t
  misc_feature (1078)..(1078): n is a, c, g, or t
  misc_feature (1087)..(1087): n is a, c, g, or t
  misc_feature (1092)..(1092): n is a, c, g, or t
ctggactcatttacttttacagttatatcatagacttgctttctggcactggtttcctggaggaaactagcctcttttacggacattacaccattgatgaggtgaaatttcagaacttcacctatgatctgcccctggcgtatttgttaagcacaatcgcctccctggccctgagccttctttggatagtgaaaaggtcggtggaaggattcaaaatcaacctgattcggagtgaggagcactttcagagttactgcaacaagatatttgccggctgggacttctgcatcactaaccgcagcatggcggatctgaagcacagcagcttgcggtacgagctccgagcagatctggaggaagaaagaatgcggcagaaaatagcagaaaggacctcagaagaaacaatacgcatttactctttgagactgtttttgaactgtattgttctggctgttttaggggcatgcttttatgcaatatacgtagcaactgtcttctcgcaagagcacatgaaaaaggaaatcgacaagatggtttttggagagaacctcttcatattgtatctaccgtctattgtgatcacgctggccaattttatcaccccaatgatctttgccaagatcatccgctatgaggattattctccaggctttgagatccgtctgacaatccttaggtgtgtctttatgcggctggccaccatatgtgtcctggtgttcacgctgggctccaagatcacatcctgtgatgatgacacatgtgacctttgcggctacaaccagaaactctacccggtgagttgcggcgcggtggcgttcggctgtatgggtccttctggaatacagtgctggtcaagagaacagnggttgaagncatgggtttgaactgcatttgcttcgtttcttgntctaggatgagacagagtctggccccatggagtctaaccccaggcacttctgagggcttngaaaccaaggtctgtgctgaggctnanagnttgnatcagctgatgncctnactggagccacaggatctngagttgnggnaattanangtgtctngggagcctngntttntntgcctgctngggtntttcagtttccctcactctctttgatttcagtgctgggagacccaagttgggcaggaaatgtacaagctgatgatcttcgacttcatcatcatcttggctgtgacactcttcgtggattttcctagaaagctcctggtgacctactgttcctcttgcaagctgattcagtgctgggggcagcaggagtttgccattcctgataacgtcctggggatagtttacgggcaaaccatctgctggatcggagcctttttctcaccccttctccctgcaattgcaaccctgaaattcattatcatcttctatgtgaaagagtggagtctgctttacacctgcagaccctcccccaggccgttcagagcatccaattctaatttcttcttcctgttggtgttgttgatcgggctgtgtttggcaataatacctctgacaatcagcatatcacgcatcccttcctcgaaagcctgtgggccgttcaccaacttcaacaccacctgggaggtcatccccaagacggtgagcaccttccccagctcgctgcagtccttcatccatggtgtcacatccgaagcctttgcagttcctttcttcatgattatttgcctcatcatgttttacttcattgccttagctggagcacacaaacgggtggtcatccagctccgagagcagctatccctggaaagtcgtgacaagtgctacctaatccagaaactaacagaagcccaaagggacatgaggaactaactagactgagcgtgaagatggtgctgcctgttgcttctaagctgacctagtgattctgctgagcctacagagtctacctgggttttgagtggacatttaaaaatatatttttcttgagtttaggcttttccatatgtgcagctgtgtttacctaacccagcccttaattagggcttcagtgacttagaaaagcaggggaaacccaaggctttgcctgcagaccggccactctgtgacaactctaccaaaaaccaacaagccattcaagcttttacaagaatgaaagagcggagacggtagtttagtatttgagccacgagtttatgtgcacaagtgttttgggttgtggactgaagctcagcctgttaatcagaccagcccatgagtgtataacaaacagaattggaggctggtttcttaaacacacacgtccacattttttagggttgttttcctgtgcttacaatttttaatgcatgtgcctttatttcacaaaacatgtggctgggcgcagcggctcacgcctgttatcccaacactttgggaggccgaggcaggcggagcacctaagttggggagttcaagaccagcctgaccaacgtggagaaactccgtctccactaaaatacaaaattagctgggtgtggtggcacatgcctgtaatatcagctactcaggaggctgaggcaggagaattgcttgaacccaggaggtggagtttgcagtgagctgagatcacaccattgcactccagcctgggcaaaaagagcaaaactctccctaaaaaaaaaatgtagaatatctcttaagatttccgttatggtaaaaaccatatgcaataaatacctcattgtaagcttacccaaaattgatagatgtcaaccttttaacagaagaacagaagtttaagttattgtttaatgtaatcagttttcattttaatatctttgaaatctttttcaaaggactgtagttttgtaatggacttttcaagccttccttccattgtttttcttccgttcactggctccacacgtttcctggggagtagcctcttacttgaaggtttttaatatgttttgataactttaataacttcaggtgatgtctgtataatttttaaagtgcagctctctctaacaaatgtgccttacaactcctgattaaacggcgtcttgaaggttttaaaatgtgatcgtgtatactggaattcaaagaggcttcttgtcagcagtcaagtgatgatggaaaactgtaatagtttgtaaagttcctctttgctttttcgtctgctgtgcgtcatcagtccgagccaagggcactattggccagttccgttcaacgaagtggttgctttttttagttccggcaatgagttgcgccggggcggcggcggctccccgcctttggcggctgcgcccgggggcccggcggtccctctcagcttatggaagaagaaccagtgtcagatttcgcagttcaggaatgactttagacaatatcagtcgggcagctgtggatcgaataatccgggtggatcatgcaggcgaatatggagcaaaccgcatctatgccgggcagatggctgtcctgggtcggaccagcgtcgggccagtcattcagaaaatgtgggatcaagaaaaggaccatttgaaaaagttcaatgagttgatggttatgttcagggtccggccaacagttctgatgcccttgtggaacgtgctggggtttgcactgggggcggggaccgccttgctcgggaaggaaggtgccatggcctgcaccgtggcggtggaagagagcatagcacatcactacaacaaccagatcaggacgctgatggaggaggaccctgaaaaatacgaggaacttcttcagctgataaagaaatttcgggatgaagagcttgagcaccatgacataggcctcgaccatgatgcagaattggctccagcctatgccgtcctgaagagcattatccaggccggatgcagagtggcgatatatttatcagaaagattataaagtgtgtccagttttgcctgtctataaaagatgatagtaatttaccaagtgacatttgcagagaaacaggtgtacagttatcgttgtacttttgtacaatgtgaattttgttaataaattataaggtttgttttaaaattttttccttttttttttattttttattatatatttaaatttttattttttatttgtttatagttttttttaa

SEQ ID NO: 645619 - DNA, 158 bp, Homo sapiens
gttgacttgcattcagaacataaatgcacaaaatcatgtacatgtatcccatcagataagattcataggaatgccacaggggatactcctcctatcatcctgtaaaggtcaaaaatcaaaaccaaattatggggcatgattcagtcacaactaacata

SEQ ID NO: 645620 - DNA, 4061 bp, Homo sapiens
  misc_feature (864)..(864): n is a, c, g, or t
  misc_feature (873)..(873): n is a, c, g, or t
  misc_feature (907)..(907): n is a, c, g, or t
  misc_feature (967)..(967): n is a, c, g, or t
  misc_feature (992)..(992): n is a, c, g, or t
  misc_feature (994)..(994): n is a, c, g, or t
  misc_feature (997)..(997): n is a, c, g, or t
  misc_feature (1001)..(1001): n is a, c, g, or t
  misc_feature (1013)..(1013): n is a, c, g, or t
  misc_feature (1017)..(1017): n is a, c, g, or t
  misc_feature (1036)..(1036): n is a, c, g, or t
  misc_feature (1043)..(1043): n is a, c, g, or t
  misc_feature (1046)..(1046): n is a, c, g, or t
  misc_feature (1052)..(1052): n is a, c, g, or t
  misc_feature (1054)..(1054): n is a, c, g, or t
  misc_feature (1061)..(1061): n is a, c, g, or t
  misc_feature (1070)..(1070): n is a, c, g, or t
  misc_feature (1072)..(1072): n is a, c, g, or t
  misc_feature (1076)..(1076): n is a, c, g, or t
  misc_feature (1078)..(1078): n is a, c, g, or t
  misc_feature (1087)..(1087): n is a, c, g, or t
  misc_feature (1092)..(1092): n is a, c, g, or t
ctggactcatttacttttacagttatatcatagacttgctttctggcactggtttcctggaggaaactagcctcttttacggacattacaccattgatgaggtgaaatttcagaacttcacctatgatctgcccctggcgtatttgttaagcacaatcgcctccctggccctgagccttctttggatagtgaaaaggtcggtggaaggattcaaaatcaacctgattcggagtgaggagcactttcagagttactgcaacaagatatttgccggctgggacttctgcatcactaaccgcagcatggcggatctgaagcacagcagcttgcggtacgagctccgagcagatctggaggaagaaagaatgcggcagaaaatagcagaaaggacctcagaagaaacaatacgcatttactctttgagactgtttttgaactgtattgttctggctgttttaggggcatgcttttatgcaatatacgtagcaactgtcttctcgcaagagcacatgaaaaaggaaatcgacaagatggtttttggagagaacctcttcatattgtatctaccgtctattgtgatcacgctggccaattttatcaccccaatgatctttgccaagatcatccgctatgaggattattctccaggctttgagatccgtctgacaatccttaggtgtgtctttatgcggctggccaccatatgtgtcctggtgttcacgctgggctccaagatcacatcctgtgatgatgacacatgtgacctttgcggctacaaccagaaactctacccggtgagttgcggcgcggtggcgttcggctgtatgggtccttctggaatacagtgctggtcaagagaacagnggttgaagncatgggtttgaactgcatttgcttcgtttcttgntctaggatgagacagagtctggccccatggagtctaaccccaggcacttctgagggcttngaaaccaaggtctgtgctgaggctnanagnttgnatcagctgatgncctnactggagccacaggatctngagttgnggnaattanangtgtctngggagcctngntttntntgcctgctngggtntttcagtttccctcactctctttgatttcagtgctgggagacccaagttgggcaggaaatgtacaagctgatgatcttcgacttcatcatcatcttggctgtgacactcttcgtggattttcctagaaagctcctggtgacctactgttcctcttgcaagctgattcagtgctgggggcagcaggagtttgccattcctgataacgtcctggggatagtttacgggcaaaccatctgctggatcggagcctttttctcaccccttctccctgcaattgcaaccctgaaattcattatcatcttctatgtgaaagagtggagtctgctttacacctgcagaccctcccccaggccgttcagagcatccaattctaatttcttcttcctgttggtgttgttgatcgggctgtgtttggcaataatacctctgacaatcagcatatcacgcatcccttcctcgaaagcctgtgggccgttcaccaacttcaacaccacctgggaggtcatccccaagacggtgagcaccttccccagctcgctgcagtccttcatccatggtgtcacatccgaagcctttgcagttcctttcttcatgattatttgcctcatcatgttttacttcattgccttagctggagcacacaaacgggtggtcatccagctccgagagcagctatccctggaaagtcgtgacaagtgctacctaatccagaaactaacagaagcccaaagggacatgaggaactaactagactgagcgtgaagatggtgctgcctgttgcttctaagctgacctagtgattctgctgagcctacagagtctacctgggttttgagtggacatttaaaaatatatttttcttgagtttaggcttttccatatgtgcagctgtgtttacctaacccagcccttaattagggcttcagtgacttagaaaagcaggggaaacccaaggctttgcctgcagaccggccactctgtgacaactctaccaaaaaccaacaagccattcaagcttttacaagaatgaaagagcggagacggtagtttagtatttgagccacgagtttatgtgcacaagtgttttgggttgtggactgaagctcagcctgttaatcagaccagcccatgagtgtataacaaacagaattggaggctggtttcttaaacacacacgtccacattttttagggttgttttcctgtgcttacaatttttaatgcatgtgcctttatttcacaaaacatgtggctgggcgcagcggctcacgcctgttatcccaacactttgggaggccgaggcaggcggagcacctaagttggggagttcaagaccagcctgaccaacgtggagaaactccgtctccactaaaatacaaaattagctgggtgtggtggcacatgcctgtaatatcagctactcaggaggctgaggcaggagaattgcttgaacccaggaggtggagtttgcagtgagctgagatcacaccattgcactccagcctgggcaaaaagagcaaaactctccctaaaaaaaaaatgtagaatatctcttaagatttccgttatggtaaaaaccatatgcaataaatacctcattgtaagcttacccaaaattgatagatgtcaaccttttaacagaagaacagaagtttaagttattgtttaatgtaatcagttttcattttaatatctttgaaatctttttcaaaggactgtagttttgtaatggacttttcaagccttccttccattgtttttcttccgttcactggctccacacgtttcctggggagtagcctcttacttgaaggtttttaatatgttttgataactttaataacttcaggtgatgtctgtataatttttaaagtgcagctctctctaacaaatgtgccttacaactcctgattaaacggcgtcttgaaggttttaaaatgtgatcgtgtatactggaattcaaagaggcttcttgtcagcagtcaagtgatgatggaaaactgtaatagtttgtaaagttcctctttgctttttcgtctgctgtgcgtcatcagtccgagccaagggcactattggccagttccgttcaacgaagtggttgctttttttagttccggcaatgagttgcgccggggcggcggcggctccccgcctttggcggctgcgcccgggggcccggcggtccctctcagcttatggaagaagaaccagtgtcagatttcgcagttcaggaatgactttagacaatatcagtcgggcagctgtggatcgaataatccgggtggatcatgcaggcgaatatggagcaaaccgcatctatgccgggcagatggctgtcctgggtcggaccagcgtcgggccagtcattcagaaaatgtgggatcaagaaaaggaccatttgaaaaagttcaatgagttgatggttatgttcagggtccggccaacagttctgatgcccttgtggaacgtgctggggtttgcactgggtacgtgtctctctagaagagcttatgcaagcttggggatctaggatgattaaatccttcaggggcggggaccgccttgctcgggaaggaaggtgccatggcctgcaccgtggcggtggaagagagcatagcacatcactacaacaaccagatcaggacgctgatggaggaggaccctgaaaaatacgaggaacttcttcagctgataaagaaatttcgggatgaagagcttgagcaccatgacataggcctcgaccatgatgcagaattggctccagcctatgccgtcctgaagagcattatccaggccggatgcagagtggcgatatatttatcagaaagattataaagtgtgtccagttttgcctgtctataaaagatgatagtaatttaccaagtgacatttgcagagaaacaggtgtacagttatcgttgtacttttgtacaatgtgaattttgttaataaattataaggtttgtttt

SEQ ID NO: 645621 - DNA, 3205 bp, Homo sapiens
  misc_feature (864)..(864): n is a, c, g, or t
  misc_feature (873)..(873): n is a, c, g, or t
  misc_feature (907)..(907): n is a, c, g, or t
  misc_feature (967)..(967): n is a, c, g, or t
  misc_feature (992)..(992): n is a, c, g, or t
  misc_feature (994)..(994): n is a, c, g, or t
  misc_feature (997)..(997): n is a, c, g, or t
  misc_feature (1001)..(1001): n is a, c, g, or t
  misc_feature (1013)..(1013): n is a, c, g, or t
  misc_feature (1017)..(1017): n is a, c, g, or t
  misc_feature (1036)..(1036): n is a, c, g, or t
  misc_feature (1043)..(1043): n is a, c, g, or t
  misc_feature (1046)..(1046): n is a, c, g, or t
  misc_feature (1052)..(1052): n is a, c, g, or t
  misc_feature (1054)..(1054): n is a, c, g, or t
  misc_feature (1061)..(1061): n is a, c, g, or t
  misc_feature (1070)..(1070): n is a, c, g, or t
  misc_feature (1072)..(1072): n is a, c, g, or t
  misc_feature (1076)..(1076): n is a, c, g, or t
  misc_feature (1078)..(1078): n is a, c, g, or t
  misc_feature (1087)..(1087): n is a, c, g, or t
  misc_feature (1092)..(1092): n is a, c, g, or t
ctggactcatttacttttacagttatatcatagacttgctttctggcactggtttcctggaggaaactagcctcttttacggacattacaccattgatgaggtgaaatttcagaacttcacctatgatctgcccctggcgtatttgttaagcacaatcgcctccctggccctgagccttctttggatagtgaaaaggtcggtggaaggattcaaaatcaacctgattcggagtgaggagcactttcagagttactgcaacaagatatttgccggctgggacttctgcatcactaaccgcagcatggcggatctgaagcacagcagcttgcggtacgagctccgagcagatctggaggaagaaagaatgcggcagaaaatagcagaaaggacctcagaagaaacaatacgcatttactctttgagactgtttttgaactgtattgttctggctgttttaggggcatgcttttatgcaatatacgtagcaactgtcttctcgcaagagcacatgaaaaaggaaatcgacaagatggtttttggagagaacctcttcatattgtatctaccgtctattgtgatcacgctggccaattttatcaccccaatgatctttgccaagatcatccgctatgaggattattctccaggctttgagatccgtctgacaatccttaggtgtgtctttatgcggctggccaccatatgtgtcctggtgttcacgctgggctccaagatcacatcctgtgatgatgacacatgtgacctttgcggctacaaccagaaactctacccggtgagttgcggcgcggtggcgttcggctgtatgggtccttctggaatacagtgctggtcaagagaacagnggttgaagncatgggtttgaactgcatttgcttcgtttcttgntctaggatgagacagagtctggccccatggagtctaaccccaggcacttctgagggcttngaaaccaaggtctgtgctgaggctnanagnttgnatcagctgatgncctnactggagccacaggatctngagttgnggnaattanangtgtctngggagcctngntttntntgcctgctngggtntttcagtttccctcactctctttgatttcagtgctgggagacccaagttgggcaggaaatgtacaagctgatgatcttcgacttcatcatcatcttggctgtgacactcttcgtggattttcctagaaagctcctggtgacctactgttcctcttgcaagctgattcagtgctgggggcagcaggagtttgccattcctgataacgtcctggggatagtttacgggcaaaccatctgctggatcggagcctttttctcaccccttctccctgcaattgcaaccctgaaattcattatcatcttctatgtgaaagagtggagtctgctttacacctgcagaccctcccccaggccgttcagagcatccaattctaatttcttcttcctgttggtgttgttgatcgggctgtgtttggcaataatacctctgacaatcagcatatcacgcatcccttcctcgaaagcctgtgggccgttcaccaacttcaacaccacctgggaggtcatccccaagacggtgagcaccttccccagctcgctgcagtccttcatccatggtgtcacatccgaagcctttgcagttcctttcttcatgattatttgcctcatcatgttttacttcattgccttagctggagcacacaaacgggtggtcatccagctccgagagcagctatccctggaaagtcgtgacaagtgctacctaatccagaaactaacagaagcccaaagggacatgaggaactaactagactgagcgtgaagatggtgctgcctgttgcttctaagctgacctagtgattctgctgagcctacagagtctacctgggttttgagtggacatttaaaaatatatttttcttgagtttaggcttttccatatgtgcagctgtgtttacctaacccagcccttaattagggcttcagtgacttagaaaagcaggggaaacccaaggctttgcctgcagaccggccactctgtgacaactctaccaaaaaccaacaagccattcaagcttttacaagaatgaaagagcggagacggtagtttagtatttgagccacgagtttatgtgcacaagtgttttgggttgtggactgaagctcagcctgttaatcagaccagcccatgagtgtataacaaacagaattggaggctggtttcttaaacacacacgtccacattttttagggttgttttcctgtgcttacaatttttaatgcatgtgcctttatttcacaaaacatgtggctgggcgcagcggctcacgcctgttatcccaacactttgggaggccgaggcaggcggagcacctaagttggggagttcaagaccagcctgaccaacgtggagaaactccgtctccactaaaatacaaaattagctgggtgtggtggcacatgcctgtaatatcagctactcaggaggctgaggcaggagaattgcttgaacccaggaggtggagtttgcagtgagctgagatcacaccattgcactccagcctgggcaaaaagagcaaaactctccctaaaaaaaaaatgtagaatatctcttaagatttccgttatggtaaaaaccatatgcaataaatacctcattgtaagcttacccaaaattgatagatgtcaaccttttaacagaagaacagaagtttaagttattgtttaatgtaatcagttttcattttaatatctttgaaatctttttcaaaggactgtagttttgtaatggacttttcaagccttccttccattgtttttcttccgttcactggctccacacgtttcctggggagtagcctcttacttgaaggtttttaatatgttttgataactttaataacttcaggtgatgtctgtataatttttaaagtgcagctctctctaacaaatgtgccttacaactcctgattaaacggcgtcttgaaggttttaaaatgtgatcgtgtatactggaattcaaagaggcttcttgtcagcagtcaagtgatgatggaaaactgtaatagtttgtaaagttcctctttgctttttccttgttaataagtaattccctcatgatccttttccccaggaacttgggtgagaaatcataaccttgtcctgatctttc

SEQ ID NO: 645622 - DNA, 317 bp, Homo sapiens
tctttctcttaagacaatagaaaatctgggccgggagtgagccactgcctgtaatcccagcactttgggaggccgaggcgggcagatcacctgaggtcaggaattcgagaccagcctggccaatatggtgaaactccgtctctactaaaaatacaaaaagtagcctagtggtagtgggcacctgtaatccaagttactcagaaggctgaggcaggagatttgcttgagcccgagaggcagaggttgcagtgagcagagattgtgccactgcactctagcgtgggcgacagagcaaggctctgtctcaaaaaaaaaaa

SEQ ID NO: 645623 - DNA, 210 bp, Homo sapiens
cagggttggagaagacgagataggagggccattgatgcgtttgtgctccaatgaggtacgtgatgagcgcgatggtctggatggtcttcaccaggcccatctcgtcggccaggatgcccgttcagggttgttgttgtacagggacaccagccactccaaacctttgatctggtactgtttgaggacaccattgaccataagcgctgactg

SEQ ID NO: 645624 - DNA, 3621 bp, Homo sapiens
  misc_feature (864)..(864): n is a, c, g, or t
  misc_feature (873)..(873): n is a, c, g, or t
  misc_feature (907)..(907): n is a, c, g, or t
  misc_feature (967)..(967): n is a, c, g, or t
  misc_feature (992)..(992): n is a, c, g, or t
  misc_feature (994)..(994): n is a, c, g, or t
  misc_feature (997)..(997): n is a, c, g, or t
  misc_feature (1001)..(1001): n is a, c, g, or t
  misc_feature (1013)..(1013): n is a, c, g, or t
  misc_feature (1017)..(1017): n is a, c, g, or t
  misc_feature (1036)..(1036): n is a, c, g, or t
  misc_feature (1043)..(1043): n is a, c, g, or t
  misc_feature (1046)..(1046): n is a, c, g, or t
  misc_feature (1052)..(1052): n is a, c, g, or t
  misc_feature (1054)..(1054): n is a, c, g, or t
  misc_feature (1061)..(1061): n is a, c, g, or t
  misc_feature (1070)..(1070): n is a, c, g, or t
  misc_feature (1072)..(1072): n is a, c, g, or t
  misc_feature (1076)..(1076): n is a, c, g, or t
  misc_feature (1078)..(1078): n is a, c, g, or t
  misc_feature (1087)..(1087): n is a, c, g, or t
  misc_feature (1092)..(1092): n is a, c, g, or t
ctggactcatttacttttacagttatatcatagacttgctttctggcactggtttcctggaggaaactagcctcttttacggacattacaccattgatgaggtgaaatttcagaacttcacctatgatctgcccctggcgtatttgttaagcacaatcgcctccctggccctgagccttctttggatagtgaaaaggtcggtggaaggattcaaaatcaacctgattcggagtgaggagcactttcagagttactgcaacaagatatttgccggctgggacttctgcatcactaaccgcagcatggcggatctgaagcacagcagcttgcggtacgagctccgagcagatctggaggaagaaagaatgcggcagaaaatagcagaaaggacctcagaagaaacaatacgcatttactctttgagactgtttttgaactgtattgttctggctgttttaggggcatgcttttatgcaatatacgtagcaactgtcttctcgcaagagcacatgaaaaaggaaatcgacaagatggtttttggagagaacctcttcatattgtatctaccgtctattgtgatcacgctggccaattttatcaccccaatgatctttgccaagatcatccgctatgaggattattctccaggctttgagatccgtctgacaatccttaggtgtgtctttatgcggctggccaccatatgtgtcctggtgttcacgctgggctccaagatcacatcctgtgatgatgacacatgtgacctttgcggctacaaccagaaactctacccggtgagttgcggcgcggtggcgttcggctgtatgggtccttctggaatacagtgctggtcaagagaacagnggttgaagncatgggtttgaactgcatttgcttcgtttcttgntctaggatgagacagagtctggccccatggagtctaaccccaggcacttctgagggcttngaaaccaaggtctgtgctgaggctnanagnttgnatcagctgatgncctnactggagccacaggatctngagttgnggnaattanangtgtctngggagcctngntttntntgcctgctngggtntttcagtttccctcactctctttgatttcagtgctgggagacccaagttgggcaggaaatgtacaagctgatgatcttcgacttcatcatcatcttggctgtgacactcttcgtggattttcctagaaagctcctggtgacctactgttcctcttgcaagctgattcagtgctgggggcagcaggagtttgccattcctgataacgtcctggggatagtttacgggcaaaccatctgctggatcggagcctttttctcaccccttctccctgcaattgcaaccctgaaattcattatcatcttctatgtgaaagagtggagtctgctttacacctgcagaccctcccccaggccgttcagagcatccaattctaatttcttcttcctgttggtgttgttgatcgggctgtgtttggcaataatacctctgacaatcagcatatcacgcatcccttcctcgaaagcctgtgggccgttcaccaacttcaacaccacctgggaggtcatccccaagacggtgagcaccttccccagctcgctgcagtccttcatccatggtgtcacatccgaagcctttgcagttcctttcttcatgattatttgcctcatcatgttttacttcattgccttagctggagcacacaaacgggtggtcatccagctccgagagcagctatccctggaaagtcgtgacaagtgctacctaatccagaaactaacagaagcccaaagggacatgaggaactaactagactgagcgtgaagatggtgctgcctgttgcttctaagctgacctagtgattctgctgagcctacagagtctacctgggttttgagtggacatttaaaaatatatttttcttgagtttaggcttttccatatgtgcagctgtgtttacctaacccagcccttaattagggcttcagtgacttagaaaagcaggggaaacccaaggctttgcctgcagaccggccactctgtgacaactctaccaaaaaccaacaagccattcaagcttttacaagaatgaaagagcggagacggtagtttagtatttgagccacgagtttatgtgcacaagtgttttgggttgtggactgaagctcagcctgttaatcagaccagcccatgagtgtataacaaacagaattggaggctggtttcttaaacacacacgtccacattttttagggttgttttcctgtgcttacaatttttaatgcatgtgcctttatttcacaaaacatgtggctgggcgcagcggctcacgcctgttatcccaacactttgggaggccgaggcaggcggagcacctaagttggggagttcaagaccagcctgaccaacgtggagaaactccgtctccactaaaatacaaaattagctgggtgtggtggcacatgcctgtaatatcagctactcaggaggctgaggcaggagaattgcttgaacccaggaggtggagtttgcagtgagctgagatcacaccattgcactccagcctgggcaaaaagagcaaaactctccctaaaaaaaaaatgtagaatatctcttaagatttccgttatggtaaaaaccatatgcaataaatacctcattgtaagcttacccaaaattgatagatgtcaaccttttaacagaagaacagaagtttaagttattgtttaatgtaatcagttttcattttaatatctttgaaatctttttcaaaggactgtagttttgtaatggacttttcaagccttccttccattgtttttcttccgttcactggctccacacgtttcctggggagtagcctcttacttgaaggtttttaatatgttttgataactttaataacttcaggtgatgtctgtataatttttaaagtgcagctctctctaacaaatgtgccttacaactcctgattaaacggcgtcttgaaggttttaaaatgtgatcgtgtatactggaattcaaagaggcttcttgtcagcagtcaagtgatgatggaaaactgtaatagtttgtaaagttcctctttgctttttcgtctgctgtgcgtcatcagtccgagccaagggcactattggccagttccgttcaacgaagtggttgctttttttagttccggcaatgagttgcgccggggcggcggcggctccccgcctttggcggctgcgcccgggggcccggcggtccctctcagcttatggaagaagaaccagtgtcagatttcgcagttcaggaatgactttagacaatatcagtcgggcagctgtggatcgaataatccgggtggatcatgcaggcgaatatggagcagcagaattggctccagcctatgccgtcctgaagagcattatccaggccggatgcagagtggcgatatatttatcagaaagattataaagtgtgtccagttttgcctgtctataaaagatgatagtaatttaccaagtgacatttgcagagaaacaggtgtacagttatcgttgtacttttgtacaatgtgaattttgttaataaattataaggtttgtttt

SEQ ID NO: 645625 - DNA, 297 bp, Homo sapiens
tctgtacatctgcaactgccaacatcacactatcctgattactaaagctttatattagtcttgaaattagactgcactgactggagtgcagtggcccgatctcggctcactgcagactccgctcctggccaacatggcaaaaccccatctctactaaaaatatgacaattagccaggtgtggtgcacacgcctgtagtcccagctacccgggaggctgaggcaggaggattgcttgaacctgggagacggaggttgcagtgagccaagatcacgccactgtactccagcctgggcaa

SEQ ID NO: 645626 - DNA, 673 bp, Homo sapiens
ggtgggcgtgtccagcaggtcaggctgcccatctctggaccactcgatctccaacccaggctctctgtgccggtcagggctgagcgggagggaccgggtgtggcgatgctggtgcggtgggctggcgtggtgagggctggggtaggcgtggcagggtgggaccgtgggttctcaatagagggtgacggtagccaccgtgtgctcaagatggaaacgagaaggcggggagcgtgcatacgtgtgcaaccgttggaactcgtccctggtccagcgtgcgctttcatcggggagcgtttatgagcagccgcgtgtgcgtcctggacggtgaacaccgacccggcgtatggccctttgggggggggggcaaacggggctagggcgtgggctcgcgagagtggagcagtggaggctcgcgctgtggggcaggggtagctgggcccttggcgttcccaaccaaggaaggccctccttggccggcccgtcgtagtccgctcgtgtgcagtctgcttcgccagggagtattggggaagccctacaattgggctgggctctggactctggaacgacggggcgggcttgggcctataacggctaggcttggggttgggggaaacgttcccgggtcgagaaccaaggcctttggcgggaagggaaccccttcttggaggaacat

SEQ ID NO: 645627 - DNA, 536 bp, Homo sapiens
  misc_feature (529)..(529): n is a, c, g, or t
tggcctgaaactcagagggaaaaaaagaaagaaaagatccagtccttattaattaaaatgaaaaaggcactgcttataaaatcagcaacaaggctgaaggtagggaaacacaaagttagctctgcactagcagggaagagctatgcaagaggaacatgtacaggagcagcaagacccaactacggcccaaggttttctaagcagtgctctagaagcattttctcctccacacctgctatatttatatgctctttttggaagccaagtggctcatcaattacacattttattttattttattttattttattttttgagacagagtctcactctgtcacctgggctggagtgcagtggcacgatctcagctcactgcaacctccgcttcccgggctcaaatgtttctccagcttcagcctcccgagtagctgggaccacaggtgaccgccaccatgcccggacaatttttttttctttctcttttttagagatgggattcgccatgttgccaggctgtctcaactctggnctcagtg

SEQ ID NO: 645628 - DNA, 110 bp, Homo sapiens
tgaactcaagcaacctggctacctcggcctagcaaagtgctgggattacaggcatgagcccccacccctgcctatgtaaaaattccataataaacccgggcggaagcgga

SEQ ID NO: 645629 - DNA, 360 bp, Homo sapiens
gcccggtttgagtgtgttggcgcgattctcgtgtcgcactgctagctccgcctcccgggcttcacgccattctcctgtcctcagtccgcccgagttgctggcacttcaggcctccatccagtcatgcccggctaattttttgtatttatcgtagagaccgggtttcaccattttgcctaaacagttcatcaactcctgtcctccaggtacttctcccatctctgcctccgattagtgttgggatcacgggacttgcgccatcgtgcctggcctttagctagaattttgccctcaatttgtttcactactctttggtctttgcttatgttggccattgtcatgcgggaaacatcgcgaaag

SEQ ID NO: 645630 - DNA, 282 bp, Homo sapiens
tgggggggggggttttctttttgccccccgggtggaaaaagaaaaaaagtggtttggccccccccctgggggggcttttttcccttttagacttaaaaggggtggaaaaggggtctggtttcaaaaccggcctttttaaatcaacttttttaagggtccccgcggattggggggggaaaaggggggtttcggccccccttgaagggttttttcgcggggttttcgggaacccgtcccggaaaaggggggggggggttttccggcgggggactttttggcccc

SEQ ID NO: 645631 - DNA, 962 bp, Homo sapiens
  misc_feature (452)..(452): n is a, c, g, or t
  misc_feature (476)..(476): n is a, c, g, or t
  misc_feature (506)..(506): n is a, c, g, or t
  misc_feature (532)..(532): n is a, c, g, or t
  misc_feature (550)..(550): n is a, c, g, or t
  misc_feature (558)..(558): n is a, c, g, or t
  misc_feature (589)..(589): n is a, c, g, or t
  misc_feature (682)..(682): n is a, c, g, or t
  misc_feature (685)..(686): n is a, c, g, or t
  misc_feature (688)..(689): n is a, c, g, or t
  misc_feature (693)..(693): n is a, c, g, or t
  misc_feature (696)..(696): n is a, c, g, or t
  misc_feature (703)..(703): n is a, c, g, or t
  misc_feature (706)..(706): n is a, c, g, or t
  misc_feature (708)..(709): n is a, c, g, or t
  misc_feature (713)..(714): n is a, c, g, or t
  misc_feature (720)..(720): n is a, c, g, or t
  misc_feature (724)..(724): n is a, c, g, or t
  misc_feature (730)..(730): n is a, c, g, or t
  misc_feature (733)..(733): n is a, c, g, or t
  misc_feature (740)..(740): n is a, c, g, or t
  misc_feature (744)..(744): n is a, c, g, or t
  misc_feature (747)..(747): n is a, c, g, or t
  misc_feature (962)..(962): n is a, c, g, or t
cccgctctctggctcgagcatcccgtcaaacccctttttctttggcccgcgcggttgcttcagtcgctcgcgctccctcccctccggggaatcatattgaggctcccccccaatggtttttttgcgcccgactcgccggtttagcaaaggcctatccctcggccacccagagcgcccccccccagaaaccaggcgtgttctacaggacccacaagtgaccccaaggcctttccccccctggtatggcaattgaggtggcacccctctccccccccataggccaggaaaagtgaaagtagaacccagctcctttaagacttgccagcaaggcttgaggctttatgtatgtagctgagtcagcaaggtacatgatgctgtctgctttcaaaaggcttttctctcctagttgactgactccttcctcagtccaaggcacagctgagacacacctntgctgagtagctctgtgatgacanagccttggtttaatgaggtgatcctcaggntgtgaggtttattagtccccaaggcnaacacaaatattagattnataatccnactttaatagtatacatttaaaagaaaaaanacaaaagccctggaagttgaggccaagcctgctgagtattgcagctgcatttgcccaaagggaatccagaacaagtccctccctgtattttgntcnnanngggntcngtctagnagntnnatcnnatcagnatgnggagcnccngcccagngctngtntggatcagcaccaacgattttaaagaaaaaaggaagagtttcttagatgagtaattgttattgaagatagtcagtgataaccaatgaccagatgctatcaatacagtatgtgtcctttttagaataaccgcattctatatcatcattcctttggggaaaattgttattcaggtataaaaacaagagatcataataaaacccgagtctggccggan

SEQ ID NO: 645632 - DNA, 893 bp, Homo sapiens
  misc_feature (452)..(452): n is a, c, g, or t
  misc_feature (476)..(476): n is a, c, g, or t
  misc_feature (506)..(506): n is a, c, g, or t
  misc_feature (532)..(532): n is a, c, g, or t
  misc_feature (550)..(550): n is a, c, g, or t
  misc_feature (558)..(558): n is a, c, g, or t
  misc_feature (589)..(589): n is a, c, g, or t
  misc_feature (682)..(682): n is a, c, g, or t
  misc_feature (685)..(686): n is a, c, g, or t
  misc_feature (688)..(689): n is a, c, g, or t
  misc_feature (693)..(693): n is a, c, g, or t
  misc_feature (696)..(696): n is a, c, g, or t
  misc_feature (703)..(703): n is a, c, g, or t
  misc_feature (706)..(706): n is a, c, g, or t
  misc_feature (708)..(709): n is a, c, g, or t
  misc_feature (713)..(714): n is a, c, g, or t
  misc_feature (720)..(720): n is a, c, g, or t
  misc_feature (724)..(724): n is a, c, g, or t
  misc_feature (730)..(730): n is a, c, g, or t
  misc_feature (733)..(733): n is a, c, g, or t
  misc_feature (740)..(740): n is a, c, g, or t
  misc_feature (744)..(744): n is a, c, g, or t
  misc_feature (747)..(747): n is a, c, g, or t
cccgctctctggctcgagcatcccgtcaaacccctttttctttggcccgcgcggttgcttcagtcgctcgcgctccctcccctccggggaatcatattgaggctcccccccaatggtttttttgcgcccgactcgccggtttagcaaaggcctatccctcggccacccagagcgcccccccccagaaaccaggcgtgttctacaggacccacaagtgaccccaaggcctttccccccctggtatggcaattgaggtggcacccctctccccccccataggccaggaaaagtgaaagtagaacccagctcctttaagacttgccagcaaggcttgaggctttatgtatgtagctgagtcagcaaggtacatgatgctgtctgctttcaaaaggcttttctctcctagttgactgactccttcctcagtccaaggcacagctgagacacacctntgctgagtagctctgtgatgacanagccttggtttaatgaggtgatcctcaggntgtgaggtttattagtccccaaggcnaacacaaatattagattnataatccnactttaatagtatacatttaaaagaaaaaanacaaaagccctggaagttgaggccaagcctgctgagtattgcagctgcatttgcccaaagggaatccagaacaagtccctccctgtattttgntcnnanngggntcngtctagnagntnnatcnnatcagnatgnggagcnccngcccagngctngtntggctctggagtcaaggctttaagggaggaagaaggagctttgttaggtaagtgggtgggttagggcatagtctgtggcatgcccttgccggaggctaagggtgcaaaatgtgtcccttttagaatattgatggcctttcatcttt

SEQ ID NO: 645633 - DNA, 907 bp, Homo sapiens
agcggctctctctttttttccgccctagctggggctgtgttgcgaggagaggaagaaagagagacagaggattgcattcatccgttacgtcttgaaatttcctaatagcaagaccagcgaagcggttgcacccttttcaagtcttgcacaggaaaagaactgaacaaaacgaaaaagacccaagtccccttcccggcagttttgtgccttaaagctgccctcttgaaattaagtttttgcccaggagagagatgtcgttatcaggggacgaagaaatattccacgcatcacgagcgatcgtcttctgatcaacaggacggtcaaacttgttacatgatgtaccagtcgttctatgcagacatatacatggaagatgggttgatcaagcaaataggagaacaatctgagttgtgccaggacgggagtgaagaccatgcgaggcccactcccggatggtgatccccggaggaagttgacgtccacactcgtttccagatgcctgatcagggactgacgtctgctgactgatttcttccaaggtaaccaaggtcggccctgagcttgcgggaacccactatgatcattggaccacgttgttcctgagcctgggacatgcctgctcgctgcctttgaccagtggagcggaatgggccgacagcaagtccctgctgtgactactcttctgccttgtggcctcagccgagtggcataaggggcatcccaagaaggagactggaaagcgccttgtgcgaaggatcacggggtaaactttcgcttcatcgtgttacatgggctttcaaagaatcgcttccagctagacggattgccagattttatgacgtactggcgttggaactctgggaatttgggcgccattgccaagtcacgccaaaacgcgacaccctcg

SEQ ID NO: 645634 - DNA, 681 bp, Homo sapiens
ctgggtacggtggctcacgcctgtaatcccaacactttgagaggccaaggtgggcagatcacctgaagtcaggagttcaagaccagcctggccaacacagtgaaaccacgtcttaaaaaagaaaaatacaaacattagccaggcttgatggtgggtgcctgtaatcccagctgctcaggaggctgaagtgggagaatcgcttgaacttgggaggcagaggttgcagtgagcccagatcacgccattgcactccagcctgggtgacagtgcaagactctgtctcaaaaaaaaaacaaaaaacacaagataccactaagaaaatgaatatgtataattattatttgtcaattaaacaataataactttaaattccaaaaaagaacaggcaagccacagactgggagaaaatgtcctcccttgctcccattatgtgtgtgtatatgtgtctgtgtctgtctgacaaactgcgatccagaatatgtcacaggacttataactcaataatacccccaaaattaattctaaaatggtgaacagaattgaacagactatcacaaaagaagataatgaccaacttaaacacatggaaagttgcttaccatcgttactcatcgagcacagtggcaattgaaaccacaggaggctggtgacaggggcttaaccgtgtatccagacacttgg

SEQ ID NO: 645635 - DNA, 242 bp, Homo sapiens
tcctggctgggtgtgatgattggaacgagttggataaaggcttaatccccaacaacgagcacgatctgaactaatgccagtgttcaagatgcccacagaagactacgctggggaccgtgcagatttctggagaatgcgtgtccagaggtctggggtgaagaagaaccttgaggaaaagtcgggaagacctcacagctgttgtgtctgtcagcaccaagttcccagcttatgagagggttttg

SEQ ID NO: 645636 - DNA, 268 bp, Homo sapiens
agactcctgaggagctgggattacaggcatgcgctaccacacctggctaattttgtatttttagtacagatggcgcttctccatgttggtcaggctggtcttggactcccgacctcaggtgatccgcctgcctcggcctcccaaagtgctgaggttacaggcgtgagccactgtgcccggccagctctaatttctaaaagtatatttcttagctaaggtagtcagcagatcttgtgaacataaatgactgacgagggaggcagcaggc

SEQ ID NO: 645637 - DNA, 329 bp, Homo sapiens
gacatgagtatagtcactgacttaggttactgctgctatctatttatctgtctcatgtggtacgagatggggtctcactatatggcccagccgggtctcaaactccggggctcaagcaatccccatacctcagcctcttaagtgcgggaataataggcatgagccatggcaccgtggccaactcttttttatcatatctgtataaagacggggtctggctatatagacccaggcgtggagtggaggtggtcattcacaaggcatgctcatgtacacggcagactaacaactcccaggaccacaagggactcctcccgccccacgcctcc

SEQ ID NO: 645638 - DNA, 94 bp, Homo sapiens
acaggcccccaacccccaggcagcccggcaaaggacgggaggagaccagtcccccccccacccgtaccaaaaataaaggcttttgtgcttccca

SEQ ID NO: 645639 - DNA, 244 bp, Homo sapiens
  misc_feature (65)..(65): n is a, c, g, or t
tggggggggccccccccccctttgggggggcccccccccctcctttgggggggggggggggtttnccccccccctgaggggggggcccccccccccccctttttggggggggggggggcccccccgggggggggggccccccccccccccccccggggggtggggcccccccttttggggtttttttttttttttggggggccccccggggggggggggaaaaaaaatttttggggggggggga

SEQ ID NO: 645640 - DNA, 1035 bp, Homo sapiens
  misc_feature (419)..(419): n is a, c, g, or t
  misc_feature (421)..(421): n is a, c, g, or t
  misc_feature (425)..(425): n is a, c, g, or t
gggaagtgaaatcggtggtcagccgtcctcggccgcctgcaattgcagatgagaggagaagcagcttgatggcatcattatgatgcactgctgagttcaagttggcgtgatctgaagcaactctctcggggagctttcactgtgcatagcttgaatgcatgaaataaacagcactgcttgttcctgtacatccacgtgtcatcagttccatctggcttgtggttctccatgatccagagcatgtaaaggatctcactgtctgtgctagtagctgcacaggagcggagtgactctgtttctacaggcctatggagcgtaagtcccctgtacccaatctgtacgaactcgaagacctgactctgcctgttccatgccgtctaacgtgagctcaatcgttggtcttatgtaccgtgtccaanantagntccataaaagtcccacgtgatcgctttagcgcaccacacttaatacatcactgaggctattctcagcgaaagtgggtactgaccatggccagggactatggtggggaccagggtgtgtttgacctataggcacacgagataaaggccccttcccctgtgcattcagtgtctcttgagttatgcgagcggacgaaagtgcgaaattggcactttgcaacatctgccatcgagcgggttcagtggactcgtcatatatgagtgcccagcttatcgtgcgactctaggccaggagtttccttctagagaggaaaacggtactttccttcattgtccctacagcctgtggacccaaaatggtggcaccagatctgatggtggcgaggggggcaaccccccagtaagctattggcctgccttggatcagaggtttgaacgccattcgaccctcgagaccctttcagggctaaaccagggcttttcttaaggtaactccctttgttgccgcattggccaagcgggtgaagttcagcataaagctggaccaagagggattcctctgaattaaaggtcctttccactttggccacacaaaaaacaaacttaaaccctg

SEQ ID NO: 645641 - DNA, 126 bp, Homo sapiens
cctcgcagctgaatgctcgaccacgtaccggcggcagccttgtgctcctgcagccttgttgctggagcaccagccagacaagatcaaggctctcttccgcaaggggcaaggtcgctggcccagcat

SEQ ID NO: 645642 - DNA, 340 bp, Homo sapiens
ccccccggtttttttggccccccccccccccttttgggggggccccctttgtggggggggggggtttttcccccccccccccccccctggggggaaaaattacccccgggggcccaaattgggggggggggaaaggcccctttttttgccccccccccttcccccttggcctttttggggggggccaaggggggccccggaattttttttccggggggcccatttaaggggggggtttcccagggttgggttttttccccccgggggcccctttttgcccggttccccccctttttttttgagggggttttttttggggtccttttttttttggggggga

SEQ ID NO: 645643 - DNA, 388 bp, Homo sapiens
tcaatgctagctgttgtggctcagcatgctggggcccaatccacgaggcccccagttggagtattacacagttgtgttgacctgccaaaccaaaggggggactttgttgtagaagatcatgcccacccaggcgccccaactctggccctcatagctctgcaagagctcccagacaaacacattctccatctcatccagaatagacaggacggccccacccgctctctggcagcgctgtcgcgcctccttgtggcccatcagcagctccatgtggaaagaataacagtgctcccggaagggaatccacgcggagtctgcacatccctggggacagctgccatggaagcttattattcggggaggagggggcccactgataaccccacac

SEQ ID NO: 645644 - DNA, 345 bp, Homo sapiens
gggatttgggtcacggttctcggttgcggatcgctgagaacgctacttgacaatgcacatcttcaggaagactctgactgataagaccatcaccctcaaggttgagcccagcgacaccatctagaatgtcaaggcacagatccaagatcaggaaggcattcgtcctgaccagtagaagctgatctttgctggcaccctgcacctggtgctccatctcataggcggcatgcaaatcttcacgaagacactcactggcaagaccatgacccttgaggcgcagcccagtgacaccatagagaacgtcgcaatgatccacgacacggggcatatctgctgaccagcagg

SEQ ID NO: 645645 - DNA, 398 bp, Homo sapiens
ttctaccccgtggtaactcacacatgcgtgtcctgtagcccagtgctcctggtacagtgacggaaatacagtcttgccatgtggacacaacagatggggacagacagactatagctgtcgtcatcgtgatgcgtgtgagtgccttaccttgataagatatatgtgtcaggttctccagcatcacgtctctgatacaggcatctctgagcctcactaaggagactccattcctcctgggaaaagttcacagccacatcttcaaaggtcacagtgccctgccgtgatgatgacagatgaaaccacaaacactccatatgctcatccacttatccagccttgcccttcctcctcccaaggtcctaaactacaaggagaaactaggcccactggtgtcacta

SEQ ID NO: 645646 - DNA, 183 bp, Homo sapiens
agtcactgtgaagctactgccctttgtcctctaataatttgttaaaaagaagacatttataaagacgattttttgcatttctctgccttatgcttatcaacttcaaatgttcgctttttctaacctttttttgttcgctaccataattcagtattcatgtctaaatttctgtgcccatttcaa

SEQ ID NO: 645647 - DNA, 483 bp, Homo sapiens
  misc_feature (146)..(146): n is a, c, g, or t
tgttaaactccactctcagaaaaaaacacaaacaaaaagacatgccattcaggaaagggtaatcagtgattaaaatatatagattttttttggtttctactctggattattcaaaatattcttgtctagagttttttgaaacacgnaggactgttaccaggacccaaaaattgaacataaaaaattaggacatgaaaaatagcaaataatccactttttcagaataatctaaccttttttttttgagacggagtcttgctctgtctcccagactggagtgcagtggtgcgatctcgactcactgcaaactccgcctcccaggttcaccccattcttctgcttcagcctcctgagtagctgggactacaggcgcccatgaccacgcctggctaatttttttgtatttttagtagagatggggtttaactgtattagccaggatgatctcaatctcctgaccttgtgatccgcctgccttgggaa

SEQ ID NO: 645648 - DNA, 111 bp, Homo sapiens
ggtgcttctacgacggactccccctgggctggggaccgacgggggacacgccacccgggacgtcagacggtcacgacagtacgacgccaccttgttcatacggggactctg

SEQ ID NO: 645649 - DNA, 229 bp, Homo sapiens
  misc_feature (11)..(11): n is a, c, g, or t
  misc_feature (68)..(68): n is a, c, g, or t
  misc_feature (111)..(111): n is a, c, g, or t
  misc_feature (175)..(175): n is a, c, g, or t
gaaaacctgtnatcgtttcccgaagttcctcattgtgggaccccagaaaacagggactacagctattnatttcttcctgagcctgcacccagctgtaactagcagcttccntagccccagcacatttaaggagattcatttcttcaacagccctaattaccacaagggtattgantggtacatggattttttccctgttccttccaatgccagcactgatttcctattt

SEQ ID NO: 645650 - DNA, 832 bp, Homo sapiens
atgttcgcttcccccctcctggctctttattttgggtgggcgggccttctcatgggctcgccgcccgaacaaagcggtgcggcctgcaatctcgccggggcggtttaaaatatccccccgcccttggtggagttgtctccccgcactgttctctgcgagcatattacctaaacgcgcgcgactggtgtagagctgcgcgcatcacacggcgcggttgtatctacagatgcgacgccccacgggtgggcgcgctgtcgcccacacacgatttgtttgatatataagggagcacacttaacgcgccgatgaggcacccgcggatttatatgtctggccgtcccacgctgtgtgtaattgtccctcgcccggatatgtatacccggggggtgtttccatgaattgggttacgactcccgctctacgcgaacaggcactcccccaggttgagtccgttacgggcgcttttctgccccgcgtaccacgcactcgtttctcgtcggcgtgacaacccttttcgggtatcgcagcacatcatgtcttcggttggtagaaccccacacggcggttcaccacgggtgggttataactcggccattcatgttgtgggtcgcgcacaacttatgggccctagtgtattgggtgatgcgccccccgcacttgggaatgtgcccttctatcattggcccacagaacacagatggtgcggttatggaaggagcccgccgccggacaacctggcgacgtgtgtttcaaagaagatgggggttagccaactattctgatatggcaccccgcactttgttagggagcggggtgtttcaacccacagaca

SEQ ID NO: 645651 - DNA, 363 bp, Homo sapiens
  misc_feature (23)..(23): n is a, c, g, or t
  misc_feature (37)..(37): n is a, c, g, or t
  misc_feature (50)..(50): n is a, c, g, or t
ggcatgtttttggcaagtgcccnggtaccggttggtncctgtcccatgtntaagtgccttcccttcaggaactcttgtaaggcaggccctggtggtgacaaaatctctcagcatttgcttgtctgtaaaggattttatttctccttcacttatgaagcttagtttggctggatatgaaattctgggttgaaaattcttttctttaagaatgttgaatattggcccccactctcttctggcttatagagtttcttctgagagatatgctgttagtctgatgagcttccctttgtgggtaacctgacctctctctctggctgcccttaatattttttccttcatttcaactttggtgaatttgac

SEQ ID NO: 645652 - DNA, 671 bp, Homo sapiens
  misc_feature (13)..(13): n is a, c, g, or t
  misc_feature (105)..(105): n is a, c, g, or t
  misc_feature (128)..(128): n is a, c, g, or t
  misc_feature (142)..(142): n is a, c, g, or t
  misc_feature (144)..(145): n is a, c, g, or t
  misc_feature (161)..(161): n is a, c, g, or t
  misc_feature (168)..(168): n is a, c, g, or t
  misc_feature (171)..(171): n is a, c, g, or t
  misc_feature (200)..(200): n is a, c, g, or t
  misc_feature (210)..(210): n is a, c, g, or t
  misc_feature (237)..(237): n is a, c, g, or t
  misc_feature (281)..(281): n is a, c, g, or t
  misc_feature (287)..(287): n is a, c, g, or t
  misc_feature (317)..(317): n is a, c, g, or t
  misc_feature (322)..(322): n is a, c, g, or t
  misc_feature (345)..(345): n is a, c, g, or t
  misc_feature (384)..(384): n is a, c, g, or t
  misc_feature (390)..(390): n is a, c, g, or t
  misc_feature (398)..(398): n is a, c, g, or t
  misc_feature (408)..(408): n is a, c, g, or t
  misc_feature (411)..(411): n is a, c, g, or t
  misc_feature (426)..(426): n is a, c, g, or t
  misc_feature (438)..(438): n is a, c, g, or t
  misc_feature (442)..(442): n is a, c, g, or t
  misc_feature (445)..(445): n is a, c, g, or t
  misc_feature (455)..(455): n is a, c, g, or t
  misc_feature (515)..(515): n is a, c, g, or t
  misc_feature (537)..(537): n is a, c, g, or t
  misc_feature (543)..(543): n is a, c, g, or t
  misc_feature (557)..(557): n is a, c, g, or t
  misc_feature (637)..(637): n is a, c, g, or t
agcccgcggcggntacctgcagcggaggagctctgtcttccccttcatctcacgcgagcccggcgtcccgccgcgtgcgccccggcgcagccgccagtccgcccngagcccgcccagtcgccgcgctncacgcccggggtgnannctctgccctcgctggntcagagngcnccgcagccgtcatgctttccgccatctantcagtcctgncgggactgctgttcctgccgctcctgntgaacctctgctgcccatacttcttccaggacataggctacttnttgatngtggcttccgtgggccggtagggttcgcantacgngcagcggtggccggcgcgcaccntcctgcgggcgttcctggagaattctcgccagacgccanacaagncttttctnctcttctgcnacnagactctcacctacncgcaggtggacnggcnctnaatcaagtgncccgggcgctgctcgatcacctcggcctgtgccagggagactgcgtggcgctccttatgngtaacttgctttcctacgtgtngttgtngctggggctggtgnagctggggctgtgccatggcgtgcctcaattacaacatccgcgcgaagtccctgctgcactgcttccagtgctgctggtncgaatgtgctgctggtgtcgccagaactacaaat

SEQ ID NO: 645653 - DNA, 1193 bp, Homo sapiens
  misc_feature (844)..(844): n is a, c, g, or t
ggcttcccaagcctcctcaagcctgtgagcaagatgcgcatggccactccgctgctgatgcatcgcgctgcccatgggagccctgccccgagtgggtcccatgctagaatgccaactaagtatggacatacatgatcagaggaccatgtgcatgcacctggctcctagaatgtctgacccccctgcaaggtgtacccgctcacgtgaaggcggagcttcccgtcatgaacctgcagacaccgttaagaacaccgatggcatgaccatagtactgcgaaggtctttgaggagtcttggattgcaactcgatctgcgtcggtccatgttatgaagattgaggcagtgcgacatccctcttggcagtcaaacatgccctagttgcacagtctcctaccgaagatatggttacttgtagccaaagtgctcaggaaaggaggctctatgccatcgatccctgattgtccacccgggcttcatctcaggccctaagttgtcgacgagaacgcgcgaacataatcttgccactctcagtgcctatgggacggcaatctggcttacttgcctggtagtgtcattccctcaatgggtcactggcgggtccccaaagagccaagtaagcccgtgggcaacctatagactgctagtgagttcacgtgtgaatctggaggatcctcgtcatatctggtgccttcgtgtgtggatccacatccaggatcctcgggcccagttccccacattgtgattaagcgagtcatgcatgggccggtcgttacaacgcaattcctttgtcgcgatgccacacaggactatgcgtaaccacgctctactactttagcttccccgntatcaagggcaccccctagggacccgtgccaacgcagattctttcctccagaggaccctttgttactccgttcaactcccctcgcattgaaggaacctcgcttgcggaatgccccgtggggatcatcctgttctcggttcgcacaccgccatttggggaagcagaaaggaatctcagacacccattgagggttcaggcgcacaaccaaaggcccaagagttactagcgactagtggtcagcggccgccttggtggcccgctatagtcgttagccgctcaaagctattgaagcagaatcgttcgtgtgcagcccaatgaggtgtcgcgctgactaggagttcccccaatg

SEQ ID NO: 645654 - DNA, 275 bp, Homo sapiens
  misc_feature (65)..(65): n is a, c, g, or t
  misc_feature (88)..(88): n is a, c, g, or t
  misc_feature (90)..(90): n is a, c, g, or t
  misc_feature (176)..(176): n is a, c, g, or t
  misc_feature (219)..(219): n is a, c, g, or t
  misc_feature (224)..(224): n is a, c, g, or t
  misc_feature (230)..(230): n is a, c, g, or t
  misc_feature (236)..(236): n is a, c, g, or t
ctgagcctgcgaagtccgctcccgccccgaagaagggctccaagaaggccgtgaccaaggcccanaagaaggacggcaagaagcgcangnagccgcaaggagagctactcggtgtacgtgtacaaggtgctgaagcaagtgcaccccgacaccggcatctcctccaaggccatggnatcatgaactcgttcgtgaacgacatcttcgagcgcatctcgngcgangcgtcncgcttngcgcaattacaacaaagccgctcgaccaatcacgtccgg

SEQ ID NO: 645655 - DNA, 81 bp, Homo sapiens
acctggatataatgggaaagggcctgggtgttacccatgtactgaaaatgaacttttagccatgttggtaaaaaattaaaa

SEQ ID NO: 645656 - DNA, 813 bp, Homo sapiens
  misc_feature (403)..(403): n is a, c, g, or t
  misc_feature (405)..(405): n is a, c, g, or t
  misc_feature (555)..(555): n is a, c, g, or t
  misc_feature (601)..(601): n is a, c, g, or t
ggcttccgcgtggggaggtcctccatgcgcagtcatgagtcgcttcaagtttatcgatatggtatcaacttgactgaccctatgttcagaggaatttataggggggttcaaaagcatcaagatgacttacaggatgtaatagggagagctgtcgagattggtgttaaaaagtttatgattacaggtggaaatctacaagacagtaaagatgcactgcatttggcacaaacaaatggtatgctcagtacagttgggatgtcatcctacaagatgtggtgaatttgaaaagaataaccctgatctttacttaaaggagttgctaaatctgtgctgaaaaacaataaagggaaagtggtgggcaactaggagaatgcggacttgatttgttgaccgaactgcagtntngtcccaaaagatactcaattcaaattatttggaaaagacagttgtgaactggtcagaacaaaacacaattaccaatgtttcttcatgtgtcgaaagtcacatgctggaatttttggaccttcatgaaaggaaatagagatcggggtgtangggggagtggtgcattcatttgatggtaccaaggaagcaggcagtntcgctttgactcgaccttggactcctttataataaggatcttaattggttgctccactggccaagccggcacagctgaatccggcgaagtttcggaagtcccaattcctaggctggaaacgattcacggctcggaccacctgattcccaccctgtgccgctggcagtcccccggtacccctgcctgggtcccaactatcttcagactgccgt

SEQ ID NO: 645657 - DNA, 921 bp, Homo sapiens
agcggagtttggcgctttcctgcgcagagtctgcggaggggctcggttgcaccggggggatcgcgcctggcagaccccagaccgagcagaggcgaaccagcgcgctcgggagaggcttggacctgcacgacgcccccgttctagtcccttccgggtacctgctgcgctagaccaagtttcatttgctgtatgccatcctcgagagctgtctaggttaacgttcgcactctgtgtatataacctcgacagtcttggcgatctaacgtgctgtgcgtagctactccttctggttgaatccccaggcccttgttggggcacaaggtggcaggatgtctcagtggctacgaacttcagcagcttgactcaaaattcctggagcaggttcaccatgctttatgatgacagttttcccatggacatcagacagtacctggcacacgtggtcagaaacagcaagactgggagcacgctgccaatgatgtctcattctgccaccatccgttttcatgacctcctgtcacagctggcactgatcaatatagtcgcttctctcacggcagactaacttcttgctcaccagcactaacatacgcgacaaagcaacgcgtactcttcaggataatttccggaagacccaatccagatgtctatgactcatctacagctgtctgaacggcagcgcacaggacaaactccctggaacaacgcccagagcattacatcaggcctcagttcgcgggacatattcccagcaccaccagttgatgttcagaccacaaccgaagagacgctttgcacagaaccgtccagacacttgtgagcaggacaacggtattgtgctacgaggcctgcacactccagcccccggacactcacaaacacggacataatgactcacctgggcaactggacaaaccaaaa

SEQ ID NO: 645658 - DNA, 901 bp, Homo sapiens
  misc_feature (274)..(274): n is a, c, g, or t
  misc_feature (491)..(491): n is a, c, g, or t
  misc_feature (493)..(493): n is a, c, g, or t
  misc_feature (643)..(643): n is a, c, g, or t
  misc_feature (689)..(689): n is a, c, g, or t
ggcttccgcgtggggaggtcctccatgcgcagtcatgagtcgcttcaagtttatcgatatggtatcaacttgactgaccctatgttcagaggaatttataggggggttcaaaagcatcaagatgacttacaggatgtaatagggagagctgtcgagattggtgttaaaaagtttatgattacaggtggaaatctacaagacagtaaagatgcactgcatttggcacaaacaaatggtatgctcctcatatttctttttaccgaagaaaaagaantgaattaagtaatttggaagaagtctttctgaaaactggcttcaggtatggttttccagtacagttgggatgtcatcctacaagatgtggtgaatttgaaaagaataaccctgatctttacttaaaggagttgctaaatctgtgctgaaaaacaataaagggaaagtggtgggcaactaggagaatgcggacttgatttgttgaccgaactgcagtntngtcccaaaagatactcaattcaaattatttggaaaagacagttgtgaactggtcagaacaaaacacaattaccaatgtttcttcatgtgtcgaaagtcacatgctggaatttttggaccttcatgaaaggaaatagagatcggggtgtangggggagtggtgcattcatttgatggtaccaaggaagcaggcagtntcgctttgactcgaccttggactcctttataataaggatcttaattggttgctccactggccaagccggcacagctgaatccggcgaagtttcggaagtcccaattcctaggctggaaacgattcacggctcggaccacctgattcccaccctgtgccgctggcagtcccccggtacccctgcctgggtcccaactatcttcagactgccgt

SEQ ID NO: 645659 - DNA, 219 bp, Homo sapiens
cgcgatcggtgcggctagtccatctatctggtgctagaaccgagcgattgaagcgtgcgaaagctgcgcgtaacgcaagaacctcgagatattctgcggacctacgagcaaagtcgacctcagacgagtggaggatattctgaaaaatgacgatcagatatcgacgctaatcaacaatgctggctacggcgtgagctcttcgtagctcacatctgatgt

SEQ ID NO: 645660 - DNA, 922 bp, Homo sapiens
  misc_feature (224)..(224): n is a, c, g, or t
  misc_feature (441)..(441): n is a, c, g, or t
  misc_feature (443)..(443): n is a, c, g, or t
  misc_feature (593)..(593): n is a, c, g, or t
ggcttccgcgtggggaggtcctccatgcgcagtcatgagtcgcttcaagtttatcgatatggtatcaacttgactgaccctatgttcagaggaatttataggggggttcaaaagcatcaagtttatgattacaggtggaaatctacaagacagtaaagatgcactgcatttggcacaaacaaatggtatgctcctcatatttctttttaccgaagaaaaagaantgaattaagtaatttggaagaagtctttctgaaaactggcttcaggtatggttttccagtacagttgggatgtcatcctacaagatgtggtgaatttgaaaagaataaccctgatctttacttaaaggagttgctaaatctgtgctgaaaaacaataaagggaaagtggtgggcaactaggagaatgcggacttgatttgttgaccgaactgcagtntngtcccaaaagatactcaattcaaattatttggaaaagacagttgtgaactggtcagaacaaaacacaattaccaatgtttcttcatgtgtcgaaagtcacatgctggaatttttggaccttcatgaaaggaaatagagatcggggtgtangggggagtggtgcattcatttgatggtaccaaggaagcagaagctgcattgattgactgtggatcttcatataggattcactggttgctcactgtgacgaacttgaaggtaaatttggaagtttagaaggtcaattccctagtggaacaacattcacgtgacttggacgcaccagattgcaccctgggttgtaggcagtccaaacaggttacccattggccggatccaccatatcatccgaaacgtggcattcccttacccaaaaagaagtgggggacagttggcggcccgggcttaaaagacacagaacatgcaccctgggcatatat

SEQ ID NO: 645661 - DNA, 118 bp, Homo sapiens
gggcaacatcacatctaattccagaacatttgatcactcctcccaaactccataggcatgactttaatgtaatggcatatacatatatagaaatacataagacagccaatcacagaac

SEQ ID NO: 645662 - DNA, 666 bp, Homo sapiens
  misc_feature (42)..(42): n is a, c, g, or t
  misc_feature (65)..(65): n is a, c, g, or t
  misc_feature (167)..(167): n is a, c, g, or t
  misc_feature (248)..(248): n is a, c, g, or t
agcaacacaaattcatggaagtatttggaggcaggcggtttngcagagcttaggacacgagggcncagtaatcagggctgtagtctttattatgcactagtgcatgtggctttgggcaaataactctgcttgtctggactccagttccttcactcccccaagtcacnaggttagccagaatgacctccagtcattctgattctgtgactcatgatcagagtcacaggaatatttttattgagttgacnaaacgagaggatgaagggctgcaaggttctgtatgcacatgtgggtgcgtgtgcaccagcgtcctcttctgcctgtcctctccttgttgagctgtatctccccttcagtatgggatggttgcctttacttttctctagtgggtggcctctcctgtgcttgacatatctgtcactatattgttttctcttccgtctctgaccttataggttggcatttcaagtctactccttcctcttgaattctacctccaggtaccaggctctggatgggattattgcaaagactgcctacgattccctccttacttacgggcccatgctgctctcatctgtccatgtttcacttagggtttgcttaaagactctctggactatgtgctgcccctactttagacattgttttgctatcttacaactg

SEQ ID NO: 645663 - DNA, 132 bp, Homo sapiens
acaggatcccgacagcacagaggaggtatagtttggcaatcctcttatgggcaggtcagcaaaaagcaagcagaaagaacaacaacaacactaaagagcaagttcaaatccaagggggagagctcctctgtg

SEQ ID NO: 645664 - DNA, 671 bp, Homo sapiens
ctttggtggtgtttggtgttgtggtcattggccccgtcccggttcccgtgtttgggttttttgcgttcgtgttgttcggggtttagtggtggtgcgccccaagcccgatgtcgcgtgtgggtgtgtggggtggggattggacccaaacccgtttcgttggtttggcccgtcccccacgcggctctgtggggagacacacgctggcctcttctccaccgcggaaagtggtggtggtatagacgccgcgtaggtttagggagttgctcttttggcctggcacgtgggtgtgcggcgcttttgggagacccccagttgtttgtttgttccccctttgggggcccccccacggggggaggggtgaggtgttggggcgagcgttttgcgggggggggggagggggggggttttgtggtgggaagtttggtgaagatggcggaagttttcacgtgaagcccaccggtcacgggtaacaccactgtgaaggcccgagcccgcctgagtaaaagttccacccacagactggagaattagactccaactttcttttaggcaccttgtgtaaaatgaaatctgacaatgtggtttaactttgtactggtaattttctgtatatttggaaaatttgggttaaaaatcaaaaccgactggactttgttacccgacctactgga

SEQ ID NO: 645665 - DNA, 390 bp, Homo sapiens
agaggatccaccaggcaccactgcaagtctgtagggctgggagccgtttgatgggcaaaggggtcccccggatccaggcagggtagagagggggatttcaggtttaggtccagaggagagtgcctccccacagtctggcagtcattagcagggtgatggtgaggctgagatgggcagggccaggctgaggagcagccccactgcggtactggacatccaggtctgggtggttacagccacttttagtacagcaggagacatcaatgtggttcgtgctgagggcgtcacccaggtgggcatgttggcacattgaggcggttgcacagcctcttaccatatagctttggtttttcggttcgtgagtgccggtggctaccagacattgattca

SEQ ID NO: 645666 - DNA, 957 bp, Homo sapiens
cctgatcgtacggttgactttgcggagcctggagggcggcttcggctccgattcgggggctccggcagaagctgaccccaggctcataatggagcaggtgaagtgcatcgcgtgcaccgagcttgctgcatgaagcgatgacggacaaaggtgttccaggaagagtatataggcgaaaaccctgggggctcccgtggacaaactccgagcagagaaagtgtatcgccacttgtgcatggaccgcttacatggatgccttggaaccacactgtgtctcgcggcttacaatctctgcggtcagtgcagtcggggaaacgtagcccaacatgttgacgcgggcgagcgccggggacacaccaacccctgtaccatttacccattaagacgtggcttgtgaaccgaacacgcgagtcacgaattggtacaaatacctgccatgcccacaggctatagcaagtcgattgacaaccggcgagctacggaccacacgggaacttgatgtccgtcagcaaacccccccaggcctgacaaacaatgaccaagaccagtcgcatgattgggacacttacgcgacgttgtgggacccctggtgccttccctgaggaattgctgtgcagccaaagtgccacctcatgaagagcattatgagggtaattcccccttagtggtgccccaaggtaagccatgatactcctggcgcggaacggcttgtactggaattccggagttgacgtatggccacaaacccaggaacttgtccactctgccggattgagtacctacattggtggaggaaaataagaaaataaacataagagacaattctgcattagctcaaaaggttctaaatttgtaggacccacaaatatagaagtgtacgttgaagcacgcgtcgtagtcgttatacaaaaaaacggggcgtcttaatacggggtggcctgtcaaagccagattcac

SEQ ID NO: 645667 - DNA, 1173 bp, Homo sapiens
gggagcgcggaccgcggacgaagatggcgaccgacatgatactatggagcacatatctggacagtatcgagaaccttccctgcgaacattcagaggaacttccagcatgatgcgagagctggaccttttgtgacggaagataagaaagcagagcatgacatcctggctgcagagatacatacaccacggtagaagacagcagatactacacaagaccagcgacgtaggagcgcactagcagaagataccagaacagcctaacacgcaagtgcaaggaataacagagacgacaaaagtagcagctaggccatgcagacctacgaagcataggaggataacacacataacagaaaggctagaaagccaggaccaggacgcgaaaatgacacgccaagatacagcacagaacagcatagagagagagcagagactacaacgacacagcaccgagaataggaacgcaagcaaaaaaaaaacaaaagaaccgaagcatcagaaaagacaaaacagaagagagaacaccgaggagacccgacaggcacggaaacaacactacacgaggagaaaaaaaacaaacaacaaagacaaccagaagacacacaaagcgagagaaaagaaagtaccaaagaaaaacaaaaccaggaacgaagaaacacaaaacatacaaagccaggaacaatgacaaagaagaaacacacaacaaaaacacaagaaacaggcacagataacaaacaagaacacccaaataaaagcaaatagaaaggaagacaaccaaaacagaacaggacacaaagaagacaaaacaccaagaacagccgagcaacaagaaacagacacacacaaaaggaacacaagaaaacacaacaacaacaccagaacaagggcaaccacagccacaaccaaaaaaaaagaagaaaaaaaataaacacacaagaaaacaagagcaacaaaacgaagaagagaagagcagagaaaaacaaaagcgagaaaaaagagaagaatgcgaacagaaaacgaagaaaaggaacagaaaaaagaaagcagagagcagtaataagaaaaaagatcgaaacaaacaacaaacgacgacggacgaaaacagacaaagtgcaagaacagacagcagagagaacgacgacgagaggcagagcgcacaggtcctgtggccaaaag

SEQ ID NO: 645668 - DNA, 296 bp, Homo sapiens
  misc_feature (34)..(34): n is a, c, g, or t
tttttttttgggggaaaggggggttttttgatcncccttattgcccaaattttaaacattaggggctaacaggaaatggtttaaccccaactgctcccaggggttacatggtttttcccacaagtacccaacaggggtgggggggggcccatgttggcccaaaaaaaaagaattcaaacaaaatgcatcccccggggccctaagttaaatgtgtttttttaggggccccggttttttttttttttttatggaaaaccttttttgttaaaaacagtccctttatttcttggccttta

SEQ ID NO: 645669 - DNA, 638 bp, Homo sapiens
  misc_feature (606)..(606): n is a, c, g, or t
aactcggccattatggtcggggcagccatcaattaagaaagcgttcaagcttatcacccactacctaaaaaatcccaaacatataacggaactcctcacacccaattggaccaatctatcaccctatagaagaactaatgttaggataagtaacatgaaaacacttttctccgcataagcctgcgtcagattaaaacactgaactggcaattaacaagccaatatctacaatcaatcaacaaggtattattaccttcactggcagcccaacacaggcatgcttatatggaaaggttaaaaaaaggtaaaggaactcggcaaatcttaccccgcctggttaccaaaaaacatcacctttagcatcaccagtattagaggcaccgtctgcccagtgacacatgtttaacgggcgtggtcccctaaccgtgcaaaggtagcataatcacttgtcctttaaaaaggacctgtatgaaagggttcacgagggttcaggtggctcttactttaacccaggaaattgacctgcccgggaagaggcggcatgacacagtaagacgagaagaccctatggagccttaatttaataatgcaaaccgtacctaacanacccacagggtctaaacttccaaacctggttt

SEQ ID NO: 645670 - DNA, 147 bp, Homo sapiens
ccttgtctcagatgacactgtgaactttttacatttgagttattgcgggaatgagttaaggcttttggaaactttgaatagacacgattgtattttattctgtgagaaggacacgaatgttcaggacacgaaggacacgaatgttca

SEQ ID NO: 645671 - DNA, 367 bp, Homo sapiens
gatgactgctggcgtacagcagatgagacatctcggattgatacctggagtcatcactaagcacctcgtcatgcggctgggacaactccggcgaaagagttgtacctgagcgataacattgagggatgatagcatcgagcctgtagtgctgtgcaattcatcacctatcttaatctcttgctacaccgaacagcagatgctcagacgacttgtcgatggagctccacgaatacctgtgctcgtcatccattcatcattgcacacgagctagccgtgtgagacgcccttggtccggctagcagcacatagacggttgactgcggacctacgagatacttagagcgacgctgctcctgatgatcttgtc

SEQ ID NO: 645672 - DNA, 334 bp, Homo sapiens
gtacagtggctcaccctgtcatcccagtactttggcagactgagagttgcaggagtatgaggccagcctggccaacatggcgaaagcccgtctctaccaaaaatacaaaattagcctggcatggtggtgcatgcctgtaatctcagctactggggaggcagaggcaagagaatcgcttgaacccaggaggcagaggttgaagtgagccgagatcgtgccattgcactccagcctgggcaacaagagcgaaactccgtctcaaaaacaaaaccaacaacaacaacaacaacaaaaaaatatgggtgaggtacaataaaactgtagaggaatttgg

SEQ ID NO: 645673 - DNA, 530 bp, Homo sapiens
  misc_feature (41)..(41): n is a, c, g, or t
  misc_feature (262)..(262): n is a, c, g, or t
  misc_feature (299)..(299): n is a, c, g, or t
  misc_feature (320)..(320): n is a, c, g, or t
  misc_feature (323)..(323): n is a, c, g, or t
  misc_feature (342)..(342): n is a, c, g, or t
  misc_feature (346)..(346): n is a, c, g, or t
ggagcgccggaggagcgtaggcaggcagcgctggcgccagnggcgacaggagccgcgcgaccggcaaaaatacacgggaggccgtcgccgaaaagagtccgcggtcctctctcgtaaacacactctcctccacctggcgcctccccctccgctctgcgctgcctgccctggctgggcgccctgaggcctgctccgactgctatgtgaccgcgaggctgcgggaggacaggggacagggaacgaagaggctctcccgcgggangcccttgaggaccaagtttcgcggccacttctgcagngcgtcccttcttagctctcgnccnagccccatttctgcagccntagngcggcccgaggttctcttctcttcctcgcgcgcccagccgcctcggttcccggcgaccatggtgacgatggaggagctgcgggagatggactgcagtgtgctcaaaaggctgatgaaccgggacgagaatggcggcggcgcgggcggcagcggcagccacggcaccctggggctgccgagcggg

SEQ ID NO: 645674 - DNA, 123 bp, Homo sapiens
ccgagttcatgccactgcactccagcctgggtgacaggctgtctcaaaaaaaaaaaagggaatattctgtacggtttccagtatttatatcggattataagggaacactgctttcaaacaagg

SEQ ID NO: 645675 - DNA, 548 bp, Homo sapiens
  misc_feature (269)..(269): n is a, c, g, or t
  misc_feature (393)..(393): n is a, c, g, or t
atatttcctggaagaattaaccgaccaactatctgctgcctttaagagactcacctaacacataagagacttatctgacacataaggactcacataaacttaaggtaaaggggtggaaaaagacatttcatgcaaatggacaccaaaagcaaaagcaagcagaagtaactattgtttttttgttttttttggtttttttgagatggagtttcactccagcctaggcgacagagcaagactccatctcaaaaaaaaaaaaaaaaaaaaancctagaagagatggataaattcctggaaagatacaaccctcctagcttaaatcaggaagaattagatactctgaacagaccaataacaagcaacaagattgaaatgctaatttaaacattaccnacaaaaaaagtccaggaccggatggattcacagcagaatgtaaccaggcattcaaagaattggtaccaatcctattgacactatttcataggattgagaaagagggaaccctccctaaatcattctacgaagccagcatcaccctaataccaaaa

SEQ ID NO: 645676 - DNA, 401 bp, Homo sapiens
aactgtctgagcctgaccttgtagaatggaggcaaaaaaactgatttaatgagcctgatccaataaaaaaaaaaaaaaaaaaaaaaaaaaaaaaaaaaaaaaaaaaaaaaaaaaaaaaaaaaaaaaaaaaaaaaaaaaaaaaaaaaaaaaaaaaaaaaaaaaaaaaaaaaaaaaaaaaaaaaaaaaaaaaaaaaaaaaaaaaaaaaaaaaaaaaaaaaaaaaaaaaaaaaaaaaaaaaaaaaaaaaaaaaagaagcgggagcggggcgggccgccctcacgctccgccggggcgggcgcccagccgcgccccgatataagatgaagaagaggagacacgacgtgagccgctataatcaacgcagcgcggagcggacgaagagaccgagtgggagccggaac

SEQ ID NO: 645677 - DNA, 436 bp, Homo sapiens
ccaaagttacatgctactggtctggtgtgtgggctagtacctgctatcattgtacttggctaagttagggcccctatgtcacttgaggccatgtgatcgtgaccggcctggccgtcatggtgaattaccggctttactagttgtacaatttttacgcctaatgtaccggctgatggacatgacttatgagctatagagtgtggcgatggaaaggggagatgacgagagagaacgctagaacgaatgaaggatcgatagaaccataacgagagatagaaagaaagagattgattgcaagagagtcggaccgcgaacgacagatgcggctgctcatgcttgtaatcacaactactcggcagactgaggcatgagcatcgcctgaactcagaaggtggaggttgcagcatggcgagattacgccactgtactcccctgc

SEQ ID NO: 645678 - DNA, 178 bp, Homo sapiens
  misc_feature (50)..(50): n is a, c, g, or t
catcagcagtgcaccgtaatttcgtcatagctattccttgaggaaccccntggcgcatacttatctcagttactcaggaggctgaggcaggagcatcacttcaacccaggagcagaagctgcagtcagccgaggtggcaccactgcacttcagcctgggcaagactggagactgcctc

SEQ ID NO: 645679 - DNA, 918 bp, Homo sapiens
cgtttgtgttggtgacttgtcttgaattgttcatttgtgatatattttagtatgtatttatgttatatatacagtggtaagtgttattgtgtgatatttggttttgatttttttatgtttcgtattttgttagtagtatttagtttattaatagagaataaagatctacattgttatttttttggtgttgggagtgtggtttttttgttgcttattagtctgatattgattgtcgattggtgtgtgttttatatctttcttttatctttttcgtagccgtcgttgtgcgatgcgggttattgttatgagattgtgtgggtcttgcttgtcatattctaggtgttggttcgtccccccgcttgtggggaaggggtgtctaaaaaaaaatatagagcagcgaggagcgctctcgcgtgttatgatggaaaacccctgcacagtttcgccctcggagaaaccccacattccaccgcctttgtttttgagacactctcacctatgagaagatgcaccccgcggagtccgcagtgtcacacagacctctccgcgagtctcttatatcctataggtcccgcgcggagcggagtataacacacattttacacaccacgggaaacacacctattgagcccttataggcctaatttataggtggacacacctatatatgagactccaagctttggaccacacaaaagcacggctggtataccgcgttcgcgaaatttcccgcggagatatatttttgaacccacacgggttctgccccacacggcgtccgcggagaaaggttaaaactccatgtgtaccacacaaatatatgccacactataaatgagacctatattattggcctttgattttataatatttgtatttttataaaccttttctcatataaaaattaattttaatcca

SEQ ID NO: 645680 - DNA, 159 bp, Homo sapiens
ggagtcacttaaggatccgctgatgttcggttgtcctcgtcatcatccttcacacgtgcgtcgtgtttgtgtttgcaagatcctctgacagtgatctgctttgtcccagggacgtggtagtgtattagctgacaaccaagacaaggatcagccttaagc

SEQ ID NO: 645681 - DNA, 388 bp, Homo sapiens
ctttccatggtcccatgatcattattaaacagtatggaacaccggtgacactgttcactgctattctagggcagcctctttagcttggtgggctatgtagtacagctacagacttcatcaaccttgcgaacggagtgactctaggagacctcgagcatataacagaagttctagaattatcaatcatccaaccaacatgccacgtaattttaccaaacaagagtagggtgcatggcttgaataagaggaaacagccgttcaaccaaacatatagctatatgctcttgaggagagggcagatgccaacatggaagcagtcaaaggttcctgaccttgtacatgaacagcaggctgtagcattgtaactagtggctgtgcattaagatgt

SEQ ID NO: 645682 - DNA, 252 bp, Homo sapiens
ttattcagaaagggcttctcacccaatcctaactttatgccctagatttttctcctctgagcctgtgctcaagccaaccccatgccacagaataccccctctgtgcctaatgaaaccctgctcgctcttcaatataaacagcacctccaccacgaagctctccttgatcctgacccctgtggctggagttggtggccctttccactgaacacagtgttggaacactgataagggccacctggtcagccatgg

SEQ ID NO: 645683 - DNA, 397 bp, Homo sapiens
taacaaatgggtatttgtctggctcttagtgttaaacaatttaatttcttcttttaactgaaacatcagttaagaataaccttgtaattcttttatttaaaataaggctctcggccggcacagtggctcacacctataatcccagcactttgggaggccaaggtgggcagagcgcttgaggtcaggagtttgagaccagcctggccaacatggtgaaacccctcctctactaaaaatagaaaaattagctggcgtagtggtgcgtgcctataatcccagctactcaggaggctgagtcaagagaatcgcttgaacccaagaggcagaggttgcagtgagctgagattgcgccactgcactccagcctgggtgacagagtgaaactctgtctcaaaaa

SEQ ID NO: 645684 - DNA, 345 bp, Homo sapiens
accacaacatggaaaaaccttgaaaacatatcaagtgaagaatgccagacatgaaaggccacatattatatgatttcatttatatgaaatgtccagaacaggcgaatatatatagagagaaggcagattagtggttgcttaggctgaagggttggggaggacaaaggggtgactgctaattagtatggggtttcttttttggggtgatgtaaacgttgtaaagttgattgtggtaatggtggcacaactctgaatatactaaaaaccactgaattgtatactttgaatgtttgccctgtgtggtatgtagattttatctcaaaatgttataaaaaattaaattac

SEQ ID NO: 645685 - DNA, 206 bp, Homo sapiens
cttcctgaatggttggagactccatagaagtggactaaggctgcgtgccaccactcaggcacatggaagacatctgtagtgagactggaaccagtatgtcaaacctttaccatggagaagaacgcgctcagtgaaattcgatgcatgcttaagatggcctagctccaagtagatgtacagtcacaagccatagatgtagagaacca

SEQ ID NO: 645686 - DNA, 218 bp, Homo sapiens
gatgaagttaacttcttcctggaagctggtgctattcatccacggagatccacagcgtcctgcagaagctggtgcgtccagtgcagacaccaacactggtgctgtggtgagctggtgaaacactggtgacagccaccgagtcgggagctgccagacctcacctggaccccttgcccctcatgctccctactagtccctgcggtggtggttggcacccc

SEQ ID NO: 645687 - DNA, 157 bp, Homo sapiens
aaatcccgtctccactaaaaatacaaaacatcagtcaggcatggtggcacatgcctgtaatcccagctactagggaggccgaggcaggagaatcgcttgaatccgggaggcacagggtcgcaggctgtgctgggatggcaccacagcctaggtgaca

SEQ ID NO: 645688 - DNA, 461 bp, Homo sapiens
cagacaatatgctaagctggagtgcagtggcacaatctcaaccactgcaacctccacctcccaggtttattttttttctcatgcctcagcctcccaagaagctgggactacaggcatgtgccccaaaggccagttaagttttctttttccttttttcttttttcttggttgagacggattttcgctcgtcacccacactggagtgcaatggcgcgatctcggcccactgcaacctccgactcccgggtccaagcgattctcccgcctcagcctcccgagcagccgggactagaggcacccgtcaccacgcccgctaccttgggcattcctagtagagacggagttccaccacgctggccaggctgatctcaaacccccggcctcaagtgactcacctgccttggcctcccaaagtgctggaatcacaggcccggcctatctttgcaatattggtctgcaca

SEQ ID NO: 645689 - DNA, 156 bp, Homo sapiens
aatcggctcggtaccgtcgtgtctgtttacagcaggcgcttgaggcggcgtaacgcgctgcgacagcggcgccggttgatggcggcctgcgcctgcgccaccagttggtcgtctttggcgtaaggcgaggcctggatctgcgcatccagcagctgg

SEQ ID NO: 645690 - DNA, 312 bp, Homo sapiens
  misc_feature (198)..(198): n is a, c, g, or t
ttaaagggaaaaagacacggcagaaacttaaatgtttagtgaaaggagactatgtggttaaaaaacccaagtatgcccatgtgtttcaaaaaagggacacttgaaacaagggagtgtttgtcacatttcactttcatgggaaataaaatgcagtttgcaaaaaaaacttgaaaatctggaacaagttttttcacgccngcaatcttggagtctaggttgccttgtctctccaatttttaaataagtgaaatttgggagattgtaaaatctgtaaagtttgttttgtgaaaataaaatgttcacagtagggga

SEQ ID NO: 645691 - DNA, 214 bp, Homo sapiens
gtttatctgcttctacagcgttatgcactcttatgactgatattatgctgtagagcctgtccctttcattgaaccccctgatagctttgaattttatgcacagcagctaataaaattgagggataactcttcttgaaataaccaggcaatactttgttttgtatatatttgtgattctgtgtctacctcttattttgacgtataaagcgtttag

SEQ ID NO: 645692 - DNA, 332 bp, Homo sapiens
  misc_feature (6)..(6): n is a, c, g, or t
ccctgngcacagcccagatcctagcactagctagacatataggggagacttaaccaaatctacaggatcaacttccagccagacccagccaggcacaggctgggtccagttctagacctgagcacggtttttcctacatagtagacttctagggaaggcgctccctcatactagggccaaaggaaggaggacgaagccctacctacagctaggcctagtgttaggggcatagaatactactacctactacctacctatgtactaggctactagttagacaaatccgggcatagtattaggcagtaaattaggcaccgtgttcacactagttt

SEQ ID NO: 645693 - DNA, 117 bp, Homo sapiens
gtccaaacagtgcctatcctgaattgttaaacaagaatgtacacatggaaggtggcgggcacctgtagtcccagctacttgggaggcagacacaggagaatggcgtgaacccaggag

SEQ ID NO: 645694 - DNA, 96 bp, Homo sapiens
  misc_feature (41)..(41): n is a, c, g, or t
agagcggccgcttactacgctatgctgcgagaagacgacanaagggaaaaaaaaaaaaaaaaaaaaaaaaaaaaaaaaaaaaaaaaaaaaaaaaaa

SEQ ID NO: 645695 - DNA, 146 bp, Homo sapiens
acgccgccgaggtcactgtgcgcgaactcgtcgagagtatgctcgcccccggcactctgctgaacggtggcggatcgttcaactttgtcactcaagacgacggcgtcctcgcctcctggtctccgtaaggacgccgccttcaccca

SEQ ID NO: 645696 - DNA, 1367 bp, Homo sapiens
gcccataccccgataacgttggtttaaatccttcccgtactaataaatcctatcacccttgccatcatctacttcacaatcttcttaggtcctgtaatcacaatatccagcaccaacctaatactaatatgagtaggcctggaattcagcctactagcaattatccccatactaatcaacaaaaaaaacccacgatcaactgaagcagcaacaaaatacttcgtcacacaagcaacagcctcaataattatcctcctggccatcgtactcaactataaacaactaggaacatgaatatttcaacaacaaacaaacggtcttatccttaacataacattaatagccctatccataaaactaggcctcgcccattccacttctgattaccagaagtaactcaagggatcccactgcacataggacttattcttcttacatgacaaaaaattgctcccctatcaattttaattcaaatttacccgctactcaactctactatcattttaatactagcaattacttctattttcataggggcatgaggaggacttaaccaaacacaaatacgaaaaattatagcctattcatcaattgcccacataggatgaatattagcaattcttccttacaacccatccctcactctactcaacctcataatctatattattcttacagcccctatattcatagcacttatactaaataactctataaccatcaactcaatctcacttctatgaaataaaactccagcaatactaactataatctcactgatattactatccctaggaggccttccaccactaacaggattcttaccaaaatgaattatcatcacagaacttataaaaaacaactgtctaattatagcaacactcatagcaataatagctctactaaacctattcttttatactcgcctaatttattccacttcactaacaatatttccaaccaacaataactcaaaaataataactcaccaaacaaaaactaaacccaacctaatattttccaccctagctatcataagcacaataaccctacccctagccccccaactaattacctaaaaaaaaacgggggcggacaaaagatacctcaggggccagatacgcgaaccactctggcaaggggccaaagagccgatacaagcacaccggacccgccatacaagcgcgagcgggcaacgcccgcgtgaccggtggagaaccaacgggggggacaggggacaaccaagacatagccccgacaatacaacggccagctacagaccaacgggaaccctcagattaacaaaccaacgaagaaaaagagcgacacagaacaacacaacagaaaaaccaacacacaccacacca

SEQ ID NO: 645697 - DNA, 144 bp, Homo sapiens
ccaattggaatttggggttccaaccaaagggtggtatttggaaaatgacctgccttatcttgttctataccagttttgtttgctgctgggtctttagaacagtgcctggcacacagtaagcactcaataaatctttgatgaatg

SEQ ID NO: 645698 - DNA, 412 bp, Homo sapiens
  misc_feature (239)..(239): n is a, c, g, or t
gttttaaagaagtgttatacaaagcatcgcccgccccctatagggagcccacggagtacactctcctttggaattctgtcccagctatgatccaagttctcagctctttccaactttaacaattttgttaacagcaccctgcctagaaaattttaaatatttatgtctgcaacaattgtctcaaaataataaactgtccacttcttgtcattacacaaacaaaagatctgacttttccntaatgcgccctgttagtttctctctgtctttcctgccagtgtaaatgtgaaagctttgcttgcattacgttttagaaatgcattttgcacactcgaattttgccgaagctccgtgaaaaggttagatctaagtagatgaataaagctatgcacatgttttgaaagtttaaaaa

SEQ ID NO: 645699 - DNA, 321 bp, Homo sapiens
  misc_feature (148)..(148): n is a, c, g, or t
atgccaggtgctctcctggaggcagcggtgctttcaggagcccgacggtgctggccccggcacctcggttaggaatgtccttggagaaggcggggcgcccggggccgcctcccgcaggagccgccgtgtgaggacggcctggccactntatcctgcgggctcgggagcgggtgactttggaaagtccgagaaggtgtggattcccgttgacgtccctcccgccctgaagtcagggtgatttcatagcgaagttttccgttctgctggaatgttccttttaaagaattctccttggggtggaataaatgtcacccgggatga

SEQ ID NO: 645700 - DNA, 1428 bp, Homo sapiens
tgggacagagccctgtggaggccgggccgagctcgggggtcacgccgtggtcccggtggcctatggtatgtgcagcctgtcgtgacaggtgaacgaagcttctgcgaggatgctgcagctgcccgggggtctgtgacactcgatggcctcaagggcctgagtttgttgagctggctgctgggctggcggtatgacgacggccggagggaggctcttggacggactgagccggagagcatgaacgcccgacgaacggaatcctggtgagcggaccccggggtgcaacaattcaaacgaggggaggagtcgaagaaccggagggggagaggctcacggatgcacttgggaacgagagaaacccagagagcaagcaaacacagttctgtacccatgagtctttgacagccacgatgacagaaccgagaagcacaggtgcaggcgtataacttcgaagagaatccagaaacggcaacaattatattgccccagtgggcaaaaatctattaaacccatgtggccgagtgaactccgaaaattttccaatacgggaaaataacaccataaatgatcaatttgcaacacggacagacacaaacacggaatggtttcaggggcatacacagaagcaaaggcagcaacccaacgcttgggaacagatttggtacaacctatcgtattgtcaaggggcccacaaatttggcatgacaaagaaaacagtagtgaaaagcgaaacaaggcaagcgatttgaacagcgacacaagcgcgacgagcacaaccagacaatgaaaagcgtatcaccattcccgacgctgcactgctggaaactggcgactattgagatcaatgcgtcacaaaagcgactgaagacaaaccaggccgcacgcgacaaatttacacgagcagtgttcagacaaaacgaagggcaccaattacatttagacaggaaagcaaacacccaggtcgtaaatcggcagctcactatcaccatctcggagccgcaccacgagggaagagagatattaacacgacggggggaccaccgaacacacccccttcaagaccacatcaccataggtcatacacaacacagcgacataaacactagatcgaacactctaggtacgaagatacaaccccagtttgcaacgcgatactaggccaccacgataaaatagcctgcagcaaaccctcaaagaatataaaacgggggcagccccacaagcgactagacggcacacacgaggagggaaaaaccgcggctacacaacaaaaaggaacgaacttagtaacaaaacaacagaagtacacaaaaaccaccaagcccaacccaagactatgcaggccaaacacaagagggcacgagacatatccacgaacaacagagtagaacacaagccaggaacaaacaactcgagcactatacgtat

SEQ ID NO: 645701 - DNA, 177 bp, Homo sapiens
tcgtataagagtacaaaacatggcatagaaggacaccatcatcatacacagtacaaatgctgtaaggttcaaacttacagttgtacacgggctaggcaacctctgttcttcccagaacagccatattaagatgaaagccactaagagtgaactcattaattacattaacacgtgggg

SEQ ID NO: 645702 - DNA, 556 bp, Homo sapiens
atggcgcgatcttggctcactgcaacctccacctcctgggttcaagtgattctccttcctcagcctccagagtagctgggattacaggtgcccatctctacgcccagctaactttttgtatttttagtagagatggggtttcactatgttggtcaggctggtcttgaactcctgaccttgtgatctgccgacctgggcctcccagagtgctgggattacaggcgtaagccaccgtgcccggtccccggcaataatttttaagagtacagagttgttggccccaaaagtttgagaactgctacactaaaatagtgattcaaatccagtctggatagttttttattgttgttgttttgtttttgagagggagtcttgttctgtcacccagcctggagtgcagtggcacgatctcagctcactgcaacctccatctgccagcttcaagtgattattgtgccgcagcctcccgagtgttgggactacaggtgcgcgccatcacgcctggctaatttgtgtatttttagagacggggtttcaccatgttggccacgctggt

SEQ ID NO: 645703 - DNA, 1052 bp, Homo sapiens
ccggtcggtgaacaaggcccgcgaaaggccaaacgggtaacctccgggaaggcccgtcgccttccactccaaggggggcgcctcggggggagaacacgtgtccaagcagccgcaagggtccacagaggattggcgtcctgccggcaaatggacccccagaagggagaaaccaaggatgtaaggtgggcgacgcctgggcacgcgtggaagtggaaacacctcccctccccgggccccatcctgggctgcccgagttatcccctttccaggcgccggttgagctcatctggcttcgctacttttgcgcgtatagggatgcggggaattgttttccaatttgacatgctgaacgcgttccgatcttgaaggccacgaatggctttttataaacgttgggcaagcgaagccatacgcattatcagctcagtctcaagctctttgctcgggaatatcgcgcattcacctcagatcacagtggttccacaggatcagggccgtgccctgtcgtagcatgtcgccagcctgcgtttggccccttcaaagcagtgtgccagtggcagcctgttcagttgggtcatattaggtcaccaggccagtgctcaggagggctcctttgcaaggtcggcagttcttcgggatgtcaggttcacctggccatgtatgcgcgcgcggagcggccttaccgtcgcacctgaggtagcagcagcggcgtaggaggcagtggtaccgagagtggagtctccaaccgagggactcgagagccaagcatgaacgagcctcgtgtgctgagtatacagcaggatccaaggaatgcacaccggcagaagaggaggaggatatatcggctgaggaggccggagaggaggcctaaggcaggagcccccagtcagcctcaggattctcagttcccttagaccgtcttaactcaagctgcccctttcctctcccatcagaatgtggtgttatgctgccatctatcttgttgttttgttttttcttctgggggggggatctagaatcagtgataaccgcacatagtaggcgctcaatta

SEQ ID NO: 645704 - DNA, 476 bp, Homo sapiens
aaaagccatttctatacaccagtgatggccaaagcaggaacgaaatcaagaatgcaataccattcacaatagctacaaaaagaacaaatatctaggaatacagctaactgcggaggtgaaagatttctacagtgagaattacaaaacactgctgaaagaaatcagagataacataaaaacatggagaaacattccatgcccagggataggaagaatcaataccattaaaatggctctactgcccaaagcaatgtacagattcaatggtattcctatcaaactaccaatgtcatttttcacagaattagaaagatatgattctgaaattcatatggaacaaaaggagtgcaaatagccaaagcgatcctaaacaaaaagaagaaagccagaggcgtcacactatctgacttcaaactgtattataaagccacagtaactaaaacaacatggttctagtacaaaaacagacatatgga

SEQ ID NO: 645705 - DNA, 153 bp, Homo sapiens
tgctgatacgatcgagctcggtaccagaaaagaaaagaataattagaaatctgaaagatgaaatcgaaacaaggcgagaaaacaaacacttcaacagctcatatttaaatagcgacgagcaaaatcgtagatgctacctaccttgcccttccg

SEQ ID NO: 645706 - DNA, 105 bp, Homo sapiens
tcaatcctccctgtacgaaaggacaagagaataaggctacttcacaaagcgccttcccccgtaaatgatatcatctcgtctcttcatctcgtctcttctcttgta

SEQ ID NO: 645707 - DNA, 254 bp, Homo sapiens
tcctgggggataactggaagctgcacagggtgaagttcctggtggcccctgctaatctttaagcgggaaaaggagctggcccggaagctggagtatgatggcctgtacataacggagcagcctgaggaccactgacgtgcaggggcagtgggaccgactggtgctcaacacgccgctcctttccctagcaactactgggacaagtttgtcacgcgcaaggtcctggacaaacatggggacatctacgggcggga

SEQ ID NO: 645708 - DNA, 218 bp, Homo sapiens
cacacgcagtcaatcgtatccataatccttctaatagctatcctcgttcaacaatatactctccggacaatgaaccataaccaatactaccaatcaagtactcatcattaataagtcataagtggctatagacaatagaaactagagaatagaccccactttcacgttctgaggtcccagtaggcttgcgccaagggtaccccgtcttgacagtccgg

SEQ ID NO: 645709 - DNA, 168 bp, Homo sapiens
attcaactgtacttaatgccacttcactgtacacttcaaacattattaaaatggtaaaatgtatgttacatgtactttaccacaataaaaaaaaacatttttaaaaggaagttgtacagtgttgaccctcttaaaaaggaggagggcagtattttgggatttttaata

SEQ ID NO: 645710 - DNA, 121 bp, Homo sapiens
agaagccagtgcaaagcatgtgtccgcctgcgctcggtgctcctgtcctgaaggcgcggccactgtcccgctcaggtgcctgctcggtgcatggccacagcgcatgggctgggcctgggca

SEQ ID NO: 645711 - DNA, 157 bp, Homo sapiens
aagacagcatttccagcagcgatgtcagcatttccagcagagatgtcagcatttccagcagcgaagtcagcatttccagcagcgaagtcagcatttccagcagcgaagtcagcattctcagcagcgatgtcagcatttccagctgcgatatcagcat

SEQ ID NO: 645712 - DNA, 167 bp, Homo sapiens
cacgctcgactgtcacccgtctggaatccacgttacaacaattccaaatattagttgggcatagtggcaagcacctgtagtctcagccacgtgggagagttagagatgggacggaagtgacagatcgaagtaggtattcagacggtagccgagcccgcaattcagta

SEQ ID NO: 645713 - DNA, 311 bp, Homo sapiens
gctctggagttattcattcctcctggtgggttcgtggtctcgctggcttcaggagagaagctgcagacctctgcggtcggtgttaccagcagataaatgctatgcggacccaaatgagtgagcagcagcaagatttattgcaaagagcacaagaacaaagcttccacagcgtggaaggagaccagagcgggttgctgctgctggctcaggcagcctgcattttttttctttttttttttttttttttttgggcccggggggagaaccccccttttacggggacccgggtccaaattggaacccggggcaaa

SEQ ID NO: 645714 - DNA, 415 bp, Homo sapiens
  misc_feature (357)..(357): n is a, c, g, or t
  misc_feature (389)..(389): n is a, c, g, or t
  misc_feature (397)..(397): n is a, c, g, or t
cttctgtaaattatgaggagagacaagagaccagacctccttctaatcactgatctttgtgatagattaactgcctccttttttgtacctgtattagtctgttttcacccattataaagaattgcccaagactgggtaatttatagagagaagaggtttggttgactcacagttccacatggctggggaggcctcaggaaacttataatcatggtagaagagaagcaggcacatcttacatggtggcagacgagagagagagagagagagagagtgtatgaaggggaaagagccccttataaaaccatcagatcttcatgaggaactcacttcacttattcacaaggaacatcattngggggaaacttgcccccatggttcccattcanttccccantagttttcctcccttggt

SEQ ID NO: 645715 - DNA, 811 bp, Homo sapiens
caaaagttgatgagcaagctcctccctaactcatcctgtgaggctagcatcaccctgataccaaaacctggcagagataaaacaaaaaaagaaaacctcaggtcactatgcttggtggacattgatacaaaagtcctcaacaaaatactggcaaaataaatccagcggcacatcaaaaagcttacccacccccatcaagtaggcttatatccctgggctgcaaggtcggttcaacatatgcaaatcaataaatgtcattcatcacataagcagagctaaagacaaaaagcacagtgattatctcaatagatgcagaaaaggcatttgataaaattcatacgcttcgtgtttaaaagtcatagcgaaactaggtatggaaggaacatacttcaaaatgagagtcttctatgacaagacccacaggcaacatcatactgaatgagcagaaagctggaagcattccccttagaaattggcacaaaaggaaggatgccctctctcaccaatcctattcaacatagtattggaagtactggccaggtcaaataggccagagaacagaaataaagggcatccaaagtaggaagacgaggcacagtcagactatccctgtttgcagatgacatgatccacatttctagaaaaccacatagtctcagccaaaacagcttcttaagctgcataaacaactttcagcagagtctcagaatacaacatgaagtgtgcaaaaatcgctagggattcctatacatcaacagcagtcaatccaagagccaaattgaggaacatactcccattcaccaatggccac

SEQ ID NO: 645716 - DNA, 168 bp, Homo sapiens
caggctgttcgcgactcttgaactcaagtgattttcccaccttggactcccaaattgctgggattacaagcgtgaggacccggtttaaagctgtggtttttaaaaaatcatggttttagggactgcccaactttctgcctggtggtggcccttggcccatgattgacc

SEQ ID NO: 645717 - DNA, 190 bp, Homo sapiens
ttacccttttgggttttttttgcagatatgagagatagccccgatgggcccaaggttttgccccggggggggttttttgtaaaaagtgggaaaaattgtcttgggtagggaaaaatgaaattttttagcccccggaattgaacgggattcctgttttggaaatttaataaatttctgggtttccttttta

SEQ ID NO: 645718 - DNA, 462 bp, Homo sapiens
  misc_feature (113)..(113): n is a, c, g, or t
  misc_feature (340)..(340): n is a, c, g, or t
tccccgcgtggagaccccagacaaacctgagctgaggacggtctgccgaatgacagcccagtgctcttgggacagtagatgtcacaaaacacaaaagctgactgggaacactntagattaaaggcgggggggggggggcaaatgccacgcagcagggggcgtgctgtttacaggacaccactgggacagtccatgagggctgagcctgctacagacgaggatcggcagcccagcacctgctggtttcaggaaatgctcgctgtcgcattcaggggagagggcagtacctgccacgcacggactgaaacacggctccagcaggaaagcctgtgtgagtgcntttgcatggaaacaggaaaaagcagggacaacattcacatcggggcaactgggaaaacccttcgcaccattcttactgcttttctgtaaattcggctaaaataaagacgagggataaaagga

SEQ ID NO: 645719 - DNA, 409 bp, Homo sapiens
tctcctagagatgatctatcattatactcaacagtatcaaagactgtaacttcctgtcagtaagtcatggcttaaccagtaataagctgatacctttgctccagtgactcgtgtttcattgcttcacctataaacactgtgtccaaggactgagatgaggcaataaatgagaataaatgtcaaatgcctggcacagtaaactttaatatccagtccaactcacttcctctttgtatcgctcactggattgtatcagtgcttgaagatttccctagcctgtgaccaagtgccttctatgcttacattctctctaggcctgcattcatccactggtggctgtcgagcacttgacatgtggatagtccaaatggagatgtattattatggtgacataccagatttcaccggc

SEQ ID NO: 645720 - DNA, 991 bp, Homo sapiens
gcgcgatggctcatgcctgtaatcccaacacttgggaggccaaggtgggcggatcacgaggtcaggagttcgagactagcctggccaacatggtaaaaccccatctctactaaaaatacaaaaattagctgggcgtggtggcgtgcacctgtaatcccagctacttaggagactgaggcaggagaatcacttgaacctgtgaggcagaggctgcagtgagccgagaacatgccagctgcactccagcggtgggcgacagggcaagaccccggtctcaaaccccaaaaaacaagagaagttagccaggcgtggtggcaggcgcctatagtcccagctacttgggagactgagacaggagaatcacttgaacctgtgaggcagaggctgcaatgagccgagaacatgccactgcactccagcgtgggcgatagggtgagactcgcggtctcaagaggcccgaaaaaactaaaaattaggcaggcgtggtggcaggcgcctgtagtcccaggctacttgggagactgagacaggagaattgttgaatgcggagaggcagaggctgcaggtgagccaagatgggcgctgtgaactccaggctgggcgagagaaatgagacttcctcttataaaaaacgaattggaagacctaagtgaatggaaggttttctgttccggattgggatacttaatatgtcacaatggctaagctactcagctggaataatagaatcccacacagtgcttatcaaatctcgccgactgtgtggtgccgaaatagcagcggccacaacatctgggacggttagaaccgaatgccgacaatcttgaagacagcacggggaagacatttcttaaatacacacacggccgggggggaacccgatcccacagtaggccggcacactggggacaccagggcaggaaaccacaaaaaaagaggcggacgcaccgacgaggaagacaaagacgcgacgcgccacaaggagacacgg

SEQ ID NO: 645721 - DNA, 245 bp, Homo sapiens
ctggctctgaacttaggatagcagtaatggctggaggtatagacatgcaggtcacctgtatagaggtggtggttgagtcatagagggaaaatgcccactgaagaagacaaagaggagtggagggtccaggtggaaacctgcattaggaggatgaaggagggaagagggagttttaaaaggatagaaaaaatcccagctgataaatagaaatggaagcaggaccaatgcctaagttcagagccagg

SEQ ID NO: 645722 - DNA, 482 bp, Homo sapiens
aagagaactcctgtcgctggacaggttcacttgctatctggccccaaccccgtaaggcctctgttcgttctgcgcctcctcgtaccttgcctaggttgaccccgaggcctcgtctcttcatgaggtcgcgcttgtccagcctcatctctctctagatgcgagtgctcgctcaagctaatcattgccaggtaattaactgtcggaaatcgttgctctcggacatttagcatccataccctcggaactccctaactgattgcagctcagctctcaagcgctatagattcaggggtgcatcccaatccggttgccaacactctgcttcatgcttgtcactcaacttcatctgtagagccagactgctatactgcgtcctcatatatgctcaatttccgtctcactactccagactgcatatatttcactttgtgcaatctcgcgtagtcctctcgattcctgctcatcactaccatgtcctcctc

SEQ ID NO: 645723 - DNA, 170 bp, Homo sapiens
gagggggttcccccccaaaaagggggggggtccgcccatttttggggaaacccccccttttgggcccttttggggggggggggggccccctttttttttttaaaaccggggggtgtttttcccccttttttttttttttttgggggggttaagccccccccgggttggga

SEQ ID NO: 645724 - DNA, 132 bp, Homo sapiens
tactatcggactggttaagacgacagaagggcaatccagaagatttggccagaaaagaaaactgactgacatctatttgtgtgggagacacagtatctttatttcctgttcatccacgagccagtgctggtt

SEQ ID NO: 645725 - DNA, 427 bp, Homo sapiens
  misc_feature (373)..(373): n is a, c, g, or t
  misc_feature (406)..(406): n is a, c, g, or t
gcctttagccacttcgttttggccaacttctcccacttgaaatgggtgtattcagccaatgcctgtacctccgttgtatctaagaagtaactaactagcctttgattttacaggctcataggtggaagggacttgccttgtttcagatgagactttggagtatggacttttgagttaatgctgaaatgagttaagactttgggggactgttgggaaggcatgattgatttttaaatgagaggacatgagatttggggaggggccaggggagagaatgatatggtttgggctgtgtccccatccaaatatcaccttaaattgtaggctcccttaattgtggggaggggacctggtggggagataatttgaatcntagggggcattttctcccttactgttctgggtnggtagtgataagtctcacgag

SEQ ID NO: 645726 - DNA, 489 bp, Homo sapiens
ccaccacgcccagcctgtaggtcttattgtgggctatcctcatttggctattctgggactttgtgattctatactcaaatttgtaggattatttttctacctctatgaagaatgcttattgcatactttgatagggattgcaattgaatcctgcagattgcttagggtagcactggactgtctctctaacaataactctcgagtctttcaatcatgtaaacacttgaactatcttgtctcgttgtgttgctgtcgttcctctgttagatttctgttacttcaaggtgtttagtgttaattgtagagatctttcacttcgttgaattcgtagatactttgatttaatttgcagctattgtaaatgggattactattcttgatttttcaggttgttccctgatggcatacagaaatgatactgattttttaatgttgatcttgtaccagcaactctactgattaatcagtgtgaatacgtttttgagtgaa

SEQ ID NO: 645727 - DNA, 243 bp, Homo sapiens
ctggctgggatggccccagagcatgtcgctcagcctgttctttgatcattcacctcctagaattgatgctcctttctcccatgcattgagctcccatctagcttcagcagggcagaacccttctccaggtgtgtgtaactaatgtcttgagtatctgggagtagttgaagaacagataatgcctaccaaacatcaagccttggtattcttggagcaagcagaaagccagaaccacaaatatcg

SEQ ID NO: 645728 - DNA, 787 bp, Homo sapiens
tttgctcccacgccgcgagtttttatttacactctctccatctcttatttttatatttttttctttctttcgtccagcgtattatctgcacatctcgctatcgtgtgagagcacacgcagctctctctcttctctctgcgtcgcggggtctcaactatatattcatctcgtctctctctactcaagagagacatcatcacgtacacttctgcttttttattttcctcccccccaccatatataaattattactcttgtgtgtagaaagatatttatttatatatatacaaatctcatctcgtctctatattaatcatcatcacgtcgctcttatacacacacaccactctctctttttatattcactctctcgcgtgtgagtgagactctctctctctgtgtgtgtgtgtatacagcacacacatctctcttctctcttgtttcgaatatatatatctcatgtctctcttctctttctactcgagagagagagacacacacacattatattgtgctcacaccacccttatatatatctctctcctctctcacaatatgtttctctccaccacacacacacgcgtggggggtcgtctctctctccccaccccaccaccaacacactaattacacctctctctcttctccacgacgacagacacacacctctctctcttttttatacacacacaccttccacccctcttttctctctcttcttctactcctccctcccccccccctctactccgcgcggtgtgtttttttttattaaataatataaata

SEQ ID NO: 645729 - DNA, 195 bp, Homo sapiens
atcggttatgtagatactgtggagatcacatacccagttagtacttaccacaatctgtaagtgctttttccaaagtctctcttcacattgactgaattcactcaaattttcctgaaggttagtaagctttagactctctcccctggagcctctctggtaatgctactagcctaacacacagtattacatttccgg

SEQ ID NO: 645730 - DNA, 523 bp, Homo sapiens
  misc_feature (506)..(506): n is a, c, g, or t
gacttcagacaggactttccaagggtctagactagatgggcatcgggaaagacgacatgccggattcatttcccattcggggcggagcacagggaggcggcggtgggtatggagcctttatgagcgccaagcctgtgccctctcccagccctgatcctaaacagccttgttactagagtctcccttatgtctctagctgggccctaacttcgtaggcaacaatgaggagttgaaaaagccccttccgggtgggtgcggtggctcacgcgtgtaatcccagcaatatgggaggctgaggctggcggatcacctgaggtcaggagttcgagaccaggctgaccaacatggagaaaccccatctgtactaaaaatacaaaattagctgggcgtggtggcacatgcctgttatcccagctcctcgggaggctgacaggcaggagaatcgcttgaactcgggaggcggaggttgcggcgagccgagattgcaccattgcactccagcctgngcaacaagagcgaaact

SEQ ID NO: 645731 - DNA, 220 bp, Homo sapiens
gatctagcaggatctattagctgtctggacctttcatataatggaatcatacaattgcactttatgaagcagtactggcttcttccacataagaatagatagtattttcaggttcatctatgtcgtgacatgtatcagcactttgttacttttttttaccttttcacgagacagagtctcgcactgttgcccaggctcaagtgcagtggcccgatctcgg

SEQ ID NO: 645732 - DNA, 121 bp, Homo sapiens
gattaggactgtagggttcttacggaccctttgttagttcccgatactccagccatattcccagctcccattattcgaatcatttcccatagcccagctcctcatagtcattcctcctcgg

SEQ ID NO: 645733 - DNA, 454 bp, Homo sapiens
attggatgcggtggggttttgtttagattttagttgagagaaggtgagttcaaagcaatttgcagttgttgtaatgtcaagattagtgtgcaagtgtgaatccaattcagtatagcttttaaattttaaagcatttggtgaattatgggtgagtttttttgtgttgccaatagcaaagtggttttccattaatggagaattcatgcctttcaagcattttaaatatggcaatatttataaatgtatggtttggaggaatggtttaaattgtctttcgtaattttctttgttttgaagatagattgtttcaacaagtaatttgtagtaatgagtgtgttgagttcaattttggagcgcagtaggtatgttaaagatgaagtatttggtgtcattgaagccaacacagaagttggtggtgtgttttttgttcagtgataaataaaatagttacaga

SEQ ID NO: 645734 - DNA, 886 bp, Homo sapiens
ggccactgcactctatcctgggcaacagagcgaaactctgtctcaaaaaaaaaaaaaaaaaaaagctacccttttttttctccctgatggtttattttctcatgataacgggttatgggaggaaagctgatgacgggcagtgaccattagttgaccattaaatgccggccagggcactcagcaatggctttttctcctgggccctcttagatctatgggaagctggaactcccaagcctggctgggagagacttctctaaccctggctggcgggggtctaactggtagccttctttaaaccctggctggcgggggtctaactggtagccttctttaaccctggctggcgggggtctaactggtagccagggcggtttgcctgggccttgaaggtgaagttggcctccgggtgggggcctctcgggcctggtattctggggagcgaaagttacaaccatgatgagggtggagtagcaaactcatctgactttggaaacttaaattcttcggggagtttctcagcttctcaagtctccttcatgagaatagatcctgaaaacaaatccagatccccggtagagggtgatgatttctccctatggatgccgggggtctgattcttaggccagcttcgtaccgcagctcagtgaccaaccgcgggatggtgggtcactatcatcctatgggttctgggaccccttgagttaaggactccactcatcatcctgtaaccatcccagttttctgcaacccgtgcacttagcttttgaagacctgcagatgctgtgaagcctatgctgcttgtgcgcgaagtccgtctcggtagagggactgtgtgcccctgcgagggggcgggattccgccggtcggctggcgggccccactg

SEQ ID NO: 645735 - DNA, 243 bp, Homo sapiens
gtaccgcaaatcaagatatcaagcccgagctttcgccctgtcgagcaccaccgtcacgtcactgaccatccactgagctcacctgctgacatctccgtgggatgtataatcaggctatcacacccctggccttcgtataacatcctttgtgatgatttctaccatttctcgaacctgtcttgggtcggcgctggcatggatgcaaaggaggccagtgtcctcgtagctgtggtggtatcagga

SEQ ID NO: 645736 - DNA, 737 bp, Homo sapiens
tcggggcctgctggagcctgggcctgtggcatgctgcctgtctcctgcctcggggcctgcggggtgctgccctgctgagcgctacccactgtgctgtctgcgccacctcgctgtgtgcgaccccgcgtgcaaggcccccgtgctggagctggctccctgtgtgcgccccgaactagcccccaactttgggcgaagtttgcctgcgcctctccccgcccccacgcggcgctgccgtgggccgcggactggcagctggccccggggatgcgccttcccggggtacccctggcgcgccctgcgctgctgctgctgctgccgctgctcgcgccgctgctgggaacgggtgcgccggcctgagcttgcgggtccgcgtgcggcttgcctggacggccagtgtgaccgaggagagcctgcagggcggacagcgacgcggacagcatcagactcgagctgcgcaaaggcccgacggaccctcgtctccttcaccgccgacttcaagaagtcacgggtttaaaacggaaaagataaaaattcctagaaccagcaggagggaggtgtcagaaggcccggcaggtgtacaggcatcctgttacagagagccaaagctgagcaacccagatgagccagttgggaaggtcccaaaacccatccaggccggtaccatcactccatgcccctatctacaagtgattgtgaagtgtctatccggggacactgatcctgggtgagctggaaaa

SEQ ID NO: 645737 - DNA, 742 bp, Homo sapiens
taagaacgaaagctgcattgaaatacaggccgagggatcaaatgtggtggaaacagatcctagcccttattgcattgttgctccagacacagtgatccactgcgaagtggtgagcctatcaaacgagaggatgaggaagagtccttgaatgaacgtagggtatgatagacatatgtgtagcgctgcatggaagcagctagctacagataaatggagatggtggaactgcccctgagacatcctgccctctttaagtgcaataggtgtgaagcctcctagagtgaatcctgcttaactggacctcctggaacaggaaagaccctgatatgctctgagctgtagcaaatgagactggagccttactatacttcttgatcaattggtcctgagatcatgagcaaattggctggtgagtctgagagcaaccttcgtaaagcctaatgaggaggctgagaagaatgctcctgccatcatcttcatagatgagctagatgccatctgctcccaaaagagataaaactacataggcgatggtggagctgtgcgcattgtatacaccagtatgttgaccctacatggatggcctaaagctgagggcacatgtgatcgtcactggcagcaaccaacaagaaccaacagccattgacccagctctacggcgacacggccgctttgaccgggcaggtagatatcggacaacctgaagctacggacgcaaagaaatcatcagatccataccaag

SEQ ID NO: 645738 - DNA, 263 bp, Homo sapiens
  misc_feature (213)..(213): n is a, c, g, or t
  misc_feature (244)..(244): n is a, c, g, or t
  misc_feature (247)..(247): n is a, c, g, or t
ggacaggccggttagggcgggcaaggggccccaacccctgcaacaacggaaacagttgccaacaactgggctggggtgcaggtcatcacaggacggctcctgggcaactgggccctcctgggtggggtggtgccaaaacagccttttaaaaacaaattgcgccataactgggggcaacgggggtgggcgaggccttaacttcgggctgccctntccggaagtgccttgcccaaataggcgcttnatnaatatttgttgagtga

SEQ ID NO: 645739 - DNA, 409 bp, Homo sapiens
ctacgtttgtcatttttacaaaaaagaagcaaagtctacctcccccagaaaaaagtacctgaaccaattagtcacttagccccttcccagcctctccgtgctcaccagacttgcctcacctcagcagcacacgtgtgcatatatctgtgtgttctgggcataaaaaccagccactttactgccttttttttgaaggaacattttttccttttttaccaaaattcgttgatttcaataaaggtaattttttgaaaccaattcccccttagccaaaaggattcggttatttaccaaagttaagtctggcttgctttcttctatttctgtacatgttgtttgtgtatatgtgtattttttaaaaattaaaaagtgtggaaaatgcacacatacacacccagcatttagcaaa

SEQ ID NO: 645740 - DNA, 134 bp, Homo sapiens
ctctgagaggccatatatgatctctgacacctcgtgctcgctgccgtggcggccaacatggacagcccagggccccgctggtccatcctgctctgcatgcgctcctgcaactcgcgctgcatgaggatctcagg

SEQ ID NO: 645741 - DNA, 97 bp, Homo sapiens
  misc_feature (58)..(58): n is a, c, g, or t
ggcacgaggtccggcctgagcgcctccctcctggagcggcgtccagcagcccgctggncctgctgggggctcccccacgccccccaggacagtgtcc

SEQ ID NO: 645742 - DNA, 1187 bp, Homo sapiens
  misc_feature (994)..(994): n is a, c, g, or t
  misc_feature (1032)..(1032): n is a, c, g, or t
  misc_feature (1055)..(1055): n is a, c, g, or t
  misc_feature (1058)..(1058): n is a, c, g, or t
aggtcctgttcccttcccttgtttactggtcctgtcctgttcccctggtgaccgtcatgttctcctgtggctttttatccttccccttcctgtgtccccgtgtgctctaattcccacgcgttgccgggactttttaggcttttcgtgctgccggtgtctggttcttaacctatgttggctcatcacggatctacctgggcgtattgcaccagtttagcggctctatttttcgctatacctaattagcaccatagttcggtaccactgtaacgtctggccgtgtactcggttcctgtaagttcccccgtggattctcaccgcacagatgggatgatcctcttcagtaggtatgtacttcatgctcatagtaggggtcaagctcagtatgtttccctgctttttatggggactagccatatgcctatcatcagcttgtccccgtgcccttgttgtctccaagtaagtttgccagcataggttgttagcaaaagtgctacaatctgtgtcgttatatacggacggattagtgcctcatgccctgccgcgctacccgtcaccaccgtgtcacccagatcagtgtcaccaaggccacaggagtcttattggccaggacggtgtaataatgtcccgccgtatactgccatgttgacggtgagcctagatgcttggggtcttatcggtgcttccgaagcctcctgccaactctggagttctactgacatctagatgctctcacggcatcgcacactgaagtcatggtggtcctgctggtgactcggtgcttgctgttttggaagaaccacctgtcatcagaaacatgcacagcaagcggttgttctcagttcccaagggtaagcctccacatacagatatgggtgccacagggcagccgggactccctgtctcacctacattaacccatgcatactgtatgccataaactcactttggtatatccgcgtcacatgcagagaggaactctgcgacgtcaaantgttgcttcttaaagtttcattattggcaactagaggnttgtttttaatgcatggaaactnaanagattcctcggggagttcctgaaggaaactaaacagattcctcggggagttcctgaaggaaccaggtgggcaaacctttgcttatatacatgcggcctcccctggaagagaaataacccacttgtacta

SEQ ID NO: 645743 - DNA, 720 bp, Homo sapiens
cacggagggagacaggatgcccacggtgactgccgctccgtccgtgcacacacagcggtgctcttctccccttagccacccactgcccaacccaacggtcaaagacacagaaaccaggtccccttgcagatggctctcccatcttcctgcaagtcatctgctcacacacagttggcagcacatagcgtttccttctttcagaaacattcctcttctgcggggcttcagaaagcctggcaagggccactagccagagcctcttggttaaatgcccccagcgtgctgtggccgaagctaaccagcttgaccctttcgcggaagccccacaagaaccgctggacggacactcttgagctttcctcccaaaactgccgatccaaccagatgcccttgtggacacgccgttgccgtgttcagccgcctctccctaaagtcatgattctcactcgagagcccctcgcttttctactgactgtgctttgcaagaagagtaaacactctcggatgccgctgtcctgggggagcccagcgggagcctgtgaactgttgatacgagctggccagtcctgggccccagctcactttgtccagctaacttgccaggtggcttacacgtgtgtattaaaatacatttgcattccaaagctggtcccctctgtgtatcactctaactgagaaatcctgcctagatgtgtaaggggatgtgtcctagcatttaca

SEQ ID NO: 645744 - DNA, 484 bp, Homo sapiens
tttgaggtattggataaagttataaagttttagattagaaataattatttagtatgattatggtattttaagattagagttttagaatttattaagaaatagtttatttggaatggagaatatttatttgtaatataggttttgttattttatttattttaaattattttgaattttttttaaatggttgttggatttaggtggtaataggggttgtgggttataaatttgaagttttgagaattttgggtttggagagttatgaagagggaaggaaaagagggtaagttttgaatttaattaatgatttgatggattgtttgattaagatatagaagtgaagtttgtgtttgtgtattttttatagattggagtttttggtgttgaatagagttagttgttaaaaaattgggggtttggtgaagaaatttgattgttgtgtgtatttaatgtgtgattttaaaaataaatagtaataataata

SEQ ID NO: 645745 - DNA, 150 bp, Homo sapiens
ggtggtccacaatggggcatggactgcggtctagaagagggctgtacctctctcaggtctgggctctagcagtgtgggcttccgacagagcacgtgaccgtgagggggaagcagccgttgtatctgctcaatcgaagggcttccgagtcc

SEQ ID NO: 645746 - DNA, 214 bp, Homo sapiens
tcctcccatgtgtggcggaactgggagggctaccaaccagctaacactgctattcagctcacactggggtttgacctcagtggccgctgcagctgctctgctctaaggctgaattcctgcagccagtagcgtggtgggggggcagctgcagcaacaggcacggcacatgggaggggcatggccttgctgggcaggacccaggtgtgcactagtc

SEQ ID NO: 645747 - DNA, 327 bp, Homo sapiens
gaaatctttacctcagtttcttcatcagcacaatgtggttgctgggcctctctcagggtatcattttcgataggcctaatgtaaaattatgatgaatcactcattggtaggaaaataatgatataagtttcaaatatgtatgattttacctatacttggtaatgctttgttttatagagcctgttaagctgctattgatagtcggagcttatatactgtgacttctgaagactatacatgaattccacaatcagtgctttgttgatacaaaatccttaaaagggaggcactttaaagaatatgtatttttcacttttcttaatatgt

SEQ ID NO: 645748 - DNA, 1150 bp, Homo sapiens
agcacagagcctcgcctttgcctgatcctgccggccgtccacacccaggcgccatgctcaccattggatgatgatatcagcctgcgctacgtcgtctgacaactgtgctcctggtcatgtgcaatggcctggcgttctgctggtgcgactgatgcctcccctgtgtgccgtcttccctctccatctgttgggtgcgccccaaggcaccatgtggctgttgatatgtgtagtgtgcaatggcgtcatgaagggattccttatgttgggctgactgatgtgcccaagaagcaagaggaggcatccatcacgcactgaaggtaccccatcgatgcactgtgcgatcgtccacacatacttggggagccgatcgatgtgaatgaacaagtctagggaccgaatcgacctttactaacaaattgatggcttgccgtggttgggactacaccggagggtagatcaggcccgatgtcgtgcctgaaccggaaagggctctcaccttggagagcccctcaaagggccctacatccgcgctggaagcaaacgattagacgccccaggaaatccatgagttttaagaatgaaacatgttcaaagcaaatcaccaatgcgcaagtagtaacaggtttgggcctcatactccatgggcttggtgtctattacccctaagtaactggcccttctttggcctccgtttcgcccaccttggacacctctggtgcgactgtggacctcgctgggttgaactgtggggtccaacccgagcgactttggtggccccaaatcatacacggaagggcgtgtacttgcccacttctccgaccgagtgacctagtcccctaggctagtccttgtgaagccttgggctttggtggccgagtagtaacccctggaactatggacactaagcccttccaattggcaatgggaactcccattcaactcgtaaaaacagtctgagggatatacagtggctttccacccccaaccaaacgagggtcatgaacgctcgtgtggaaaaaaattcgacttgcccgattgacacaattttaaagggcggcacaatatagacatgtgatgtcaaaaaggtacagaccccctaggacagcttttgagagcacaagcacgattgtgggaccacatgtgcagtggc

SEQ ID NO: 645749 - DNA, 320 bp, Homo sapiens
agaatattaggacaaatggatttctggtttacacaggtgaaactggaacgcagtcccaagtgtcaatggacagaacacagatacctgaatccagttccacctttcctgatttatcctcttccacttatcttacttccccttcaagttgaaccaacgattaataagtgcaaggtaaggaggactgggttgacgctgctcagtcaggcttccttttcagactataagctagtaagacagaaacaggtaccatgcaaagagcaaagccattagctggtgattggcaaatggcgccagaaggaactcatggagcgaggctatag

SEQ ID NO: 645750 - DNA, 979 bp, Homo sapiens
agcggaagtagaggttgctgtgagccgagatcatgccactgcactccagcctgggtgacagaatgagactccatctccaaaaaaaaaaaaaaaaaaaagaaaattgtggtcacttatgctagtggtgtactattctcagcccattgaaaaagagttgagattcagctcattttctcaacaacattggattggacctggaggctcattatggtacgtgaaataacccaggcacagaaagacaaacttcgcattgtttcctcacctttacctgtgttgcggaccctaaacaattcaaaaccaaatttaacactcatgtggacgattaacagaagttagaacagcgacgtggttttacccaagaaggcctagggaacaggggttggctgcggcgagtgcgctatacaagtgggctttcccaaaaaaaaatttatttttcacacacactgcactgtgacattaaagaacccctagtatatttggcccatagcccgaacaaatgtggcctgaaccctaatagctcccacatttacacataattttataatctgcgttaccccttttttaagacactttaacgctaacacagaaggctattaaacctgggggcacccttgtttttattaaaccaccccataggcggatttaaaaatctgccttgtggggagcgcacaccatgtgggaaattaacccccattcctttccccattggaacttgctaccatttattttaccacacatttttggcatgttgcccccgtgtttatttcgacagaagaccatttcctgcgggtggataacccccccaattaagaattacgcatttatttttcttaccccccacagagaaatctttttacagcaaattttttttaacaaacaaattctggaaagtataggcaagctgagttcacatgagacacaatttgggggaaccttcccccaaatttttctctcccagttgggcgcccttttcccgcca

SEQ ID NO: 645751 - DNA, 651 bp, Homo sapiens
agcggaggaggcggtgacaatgggagcagcgcgtggcggcgccgtggaggcagctgacaatctgtttgcggcttcgcttcatggccgctctcccgcccctcctgggatctgtggggagctggggagcccgcagcggcccggagccggagctggcgagccgagcggagacctgtgcgccgcgcctctgaggcgcagcatgtgaagctggagacggcatccagtggggggcgagcctctcagccggccgggatggctagcacggccgagctcttcgaggaaccctttcgtggacaggatgaactatcttgaagcgtctagtagtggacgaaccccagtgaggagtgctctacgaggtggacctgaagacttttgctcctaccaagattgattccgaaggaagtttgtaaactcagtattcaggaacatcgcagatagatggactgaacatggccttcagcatgaatgtagagaaactagagcaacaactgtcagatagaagccaaggaatttgccaagaaggtacaagagctgctagaagaagcaatcaggttgccttccaacgatttccaggaactagatgagcacattagctaatgtagcagctaagagtctgtcaccttggagtaccagtagcagggggtaaacacaccc

SEQ ID NO: 645752 - DNA, 592 bp, Homo sapiens
  misc_feature (286)..(286): n is a, c, g, or t
ttttctagaaaaggcacattgggtatcattcattacatttttgagttattttgggtttgctcttttggaaacaagtctgtgctgtaatggcccaaggcttgtatgtgtggctggcacaatcaccaggttcattgggcagttccttccaaatacaaccccagggccctaagtgcaatttcctccacacctttgttaagctgtggacctatacatgcttcaccaggacgacacccttgtgcctaaaattttctttggtagaaacggattctctatgtgcccaggtggntctcaggctccggggctcagatggtcctccttgcctcagcttccaaatgcacaggccaagttgtaccttggtcccttgccatacatgcccaacaagaggttctatacctttataatgaatggactttcataacatgggtaatgtgggagggcaagtctcttataagcgggacatttgtaaattttcctccttgaaaggtttttccagtgcgagttaccattgaactaattactacaataacgggatggctctggggtgctcaattcttgaacaactaaaaacaacgacaatacaaatcaatcacaa

SEQ ID NO: 645753 - DNA, 113 bp, Homo sapiens
agacggatcccccaggataacagcatacccggagtcactgctctccttattcatcatgctattcatctattttaaacttgccggcgacgactttatgtctatttatgaacgaa

SEQ ID NO: 645754 - DNA, 295 bp, Homo sapiens
ggttgtggagagccccaagttgagtaacaataatgaacaattattgtatgaacaattgttagagacagctaatcacaaacaatcctgcgggcacaatgacctcattccagcacgtatcacccttcagcgaggaccctataaaactttcctccagcccttgcctctttgcaggtagccccttctctgctgagctgcccactgcaacatattttcacaatttctctaataaatctgcccttctttacctacaactatcttggtaaatggctttaccacctgcaaaactgaccctagg

SEQ ID NO: 645755 - DNA, 326 bp, Homo sapiens
gttaaatcatgattttgcagaccctttggttttggacagtttcatttttttggatttgggatagattacataggagtatggagtatgctgtaaataaaaatccaaggtagtgttttgttttagtagttttaagaaattaaagcaaccaaatttaagttttcttgtattgaaaataccctatgatggtaggtccgcccttcataaaagtaggttaattgtgtttttaaattgttataacttcccccctttttgaaatctgccctacaaaatttgtttgggttaaaggtaaaaaccggtgacaatttgttctttgatgtgattgtatt

SEQ ID NO: 645756 - DNA, 200 bp, Homo sapiens
  misc_feature (59)..(59): n is a, c, g, or t
  misc_feature (75)..(75): n is a, c, g, or t
  misc_feature (121)..(121): n is a, c, g, or t
  misc_feature (123)..(124): n is a, c, g, or t
  misc_feature (131)..(131): n is a, c, g, or t
  misc_feature (195)..(195): n is a, c, g, or t
atttcttttagtttatagatctgtgcaacatttttgtactgtatgtcttcaaacctggnagtattaatacccttncttactgacatatgtacttctagttttagaaacttttatatttatntnncttattntcatatttcccttatttattacacagtgtagtgtataatactgtagtttgtattaatacactantatat

SEQ ID NO: 645757 - DNA, 233 bp, Homo sapiens
tcaccacttttattcaacatagtactggaaattctaacaagagcaattaggtaagagaaagaaacaacacccaaattgggaaggaagaagttaaattctctttatttgcagataatatgattttatatttagaaaaaatctaaagatcccaccaaaaacgaactgtaactaagaaactgattttatttatacaaccaacatacaaaaatcagtagcacaaaaaaccaactgtg

SEQ ID NO: 645758 - DNA, 182 bp, Homo sapiens
ccttaagtagttgtcatgccatacagactttttaatattaaaaagtctgtatagcatgacaactactattaaggggaagatatgattctcttgtctactaatgtgatgcgtgtgatacctatagtgcacttacagcagagcttaggtaattgctttttagagattccatgattaggatttat

SEQ ID NO: 645759 - DNA, 104 bp, Homo sapiens
aattcaagcttctaacgatgtacggggacatgagcctttgttgctatcaatccaagaacttatttgtacatttttttttcaataaaacttttccaacgaaaaaa

SEQ ID NO: 645760 - DNA, 163 bp, Homo sapiens
tgctctagaggatctcagatcactgccatttttacacacttgatttttaaaaatacaaccaaccaaccaccacaacttcttatacatttggaactcggtcagaggtgcacctctgaccgagttcccacctctgaccgagtttctcttctccttcctcctcctc

SEQ ID NO: 645761 - DNA, 1156 bp, Homo sapiens
tcgaccagccgggagccagcgcgagctctggcacggtggacacccggtccgaggccggcaagccgggtggtgccctgagctcggccaagcatgggcaagcactcagtgacggccctgaggatccggaaggccaggggccgtttacaacaagctaatacggacaggcattccagccccacgggaattttcgaggtaactgtctcaatgagagagcgtctagtgccacgtggttcccttccaagcccaggaaagtcagtgtccagtccaacttcctccaagactcccactccgtacgtaaacacctgaggaccccttccacaaagcccaagcaagagcagtgaaggtggagaaacggctgcgcgttgagtacccaaggttcgggaacgttagggcagaagccaaagcaaaagatagtgaagattaagcaggcttcggaagtgaactacaagaaatacgaagagacacaaggactctgaacgctgaggggactgatgcatagggcccaaatgtcgctggaacactcagtctccccaggtgacacggaacctactgatacgagctcttgagggaggaaggaacaagaacttttcagaaaagagcttaccggatctagcaggcacagacaaccgtggtaccgtgaagggaagaaacgtgattctaatctttgaaccacgtccctaaattccagaacggcgtgcagcaaaggtccacgcactggtcgaacagtcacgcttgcaccaaccataccaatatactccaggcagtccaagccatcgcgacaggcccaagctggcaaatcaggttggtacagatgaccgttgcatgagtatacagaccaaccgattacatgtgaaactgccaataacggggacccataagggcctccacaacagaatgcccatgtatagcacacaggcttacatatgtgggaaggcccgagaattggcataaagcggacgcatttggggcagcagaattacagcggtgagcaaacacgcataaaggggcccgtagatctttccagacatggtaaaccgccgtgaaagagagttaaaaaggggtattaaccatgaggggggaagtacgcacaagacaagggaataaaaagacttgacacctggtatccctagaggtaattgtcattagaacgagtcaa

SEQ ID NO: 645762 - DNA, 346 bp, Homo sapiens
tgatctagaggatcccgacagcatcctaaccaggaggtgaagatactggggggaggaggaggctggctgatgatccctaggttagaccaggaggtgaagatactcaggtagaaggctggctgatcccaggattagaccaggaggtgaagatactggaggagaaggctggctgatgatcccaggtttagaccaggaggtgaagatactagaggaggaggctggctgctcccaggctagaccaggaggtgaagactactggaggaggacgctggctgctgatcccagggattagaccaggaggtgaacgatactggttagggactgctgtcgggtaccgagtctcgaa

SEQ ID NO: 645763 - DNA, 171 bp, Homo sapiens
ggagttaagatagcgggcatatagtgagacctgtcttatttaaaaaaaaaaaaaaaagaaaaaaagaagaagaaaaagagtggagaaagggagagtaattgagaaaataagaatgggaggagggagacataggaaaaagtgagggaaatgaagttagagaaaggcttaggg

SEQ ID NO: 645764 - DNA, 674 bp, Homo sapiens
  misc_feature (23)..(23): n is a, c, g, or t
  misc_feature (75)..(75): n is a, c, g, or t
  misc_feature (86)..(86): n is a, c, g, or t
  misc_feature (115)..(115): n is a, c, g, or t
  misc_feature (151)..(151): n is a, c, g, or t
  misc_feature (158)..(158): n is a, c, g, or t
  misc_feature (196)..(196): n is a, c, g, or t
  misc_feature (290)..(290): n is a, c, g, or t
  misc_feature (304)..(304): n is a, c, g, or t
  misc_feature (335)..(335): n is a, c, g, or t
  misc_feature (497)..(497): n is a, c, g, or t
  misc_feature (582)..(582): n is a, c, g, or t
  misc_feature (657)..(657): n is a, c, g, or t
taaaggagggaaaaagtgatganggaaaaaaaaataaaagaataaatgtagtttaggtaaaataaaatgtaaaanattaaaataanaaataaagaaatgatatgagaaaatatanatgtaatggtaaaataaaaagtatttttggttaaangaaaaangatataaaaaatggtgataaagaagatggaggaaaaantataaaaaaaaaaaaaagaaaggaaaaaggaataagggaagagggaaatggataataaaaagataaaattatgtgtgaagggtatggggataanaaagatgggaaganaaatgaaaaggagaaggtagatgtgtgtaanaatgagtggtaaaatgtatagttaataaagaaaaagggaaaagaagataagtagaatgtgaaaaaaaggattgatgaggaaatagagaaaataataaaggaagatgaagaaagaaaggaataaagtggaggataaatagagaagtggaaggtaaaagatganaaatgggatgtaggtggataaaaaaatgaggtggaaataatttagggagatggtgggggaatggtgattattggaataggaagangaaagattggaattatggtaaagaaaaaaaaggaaggaaaaggtggaaagaagagaaaaataggataggaggtanatgaggtgtatgtatgg

SEQ ID NO: 645765 - DNA, 889 bp, Homo sapiens
cttgggcgagtacggtcctcgtgcggagagggcccctgtcctctgtgaaggcccgcccgggaattggcggtggtgctgcagccatttccggtttcggaggaggtggtgtgtgggtgcggagtcgggacttggaggcagtctgcgaacgtgtggcaccggctacagagctgtgctcttgcgtcctgtgtgctgccaggaagtatgcggtcgggagcccggaggcttgctgttgccgccggacggtgcgggggagatggctgcgtggcgaacggggaagtacggaacgggtacgtgaggagcaagcgctgcagtcgcatgcgtgtccgcctgctggtcagatccatcatgttatcacaaaagtgggaggactatggtaaacatgatcggtttcattgaatgctttatgaagaaacagccaatgctggtgtgctgtgctcatgtatgtgggttatggcgtactcaccctctttggatatctatcgtaggattctgtgaggtattgtgagaggttgaaatggtgtcaccatgcatgagataggagatgaagacagggagtttgtgtcattgtatcacgattttgaagaacttttatacaatgaatctgtacatgacggataaggagacagaatgaaagtcggccaatctgtagtgtggctggagcgaggttggaaatcatggggatgacagtctgatgattggtaacgtggtccttccatgtatacctgtggagatataactaacgggtgttattaaagattgggtatctaaagagtatttggattgcaggggatactggattttgttagaagcagcgcaaattcgttgacgaagtatggggtgattgggacacttgggaggaattggaacttgaaacataaaaagaggggta

SEQ ID NO: 645766 - DNA, 255 bp, Homo sapiens
ctgtaacaatactgaccagccggcattgtagctggtcaagcattgaagggattacagaaagaagtacactcacgagcggacacccagcaaagttggaagagtcgagcgaaacccaggctgtatgagagggggtaggttactgactcctaggacggacgtaagacttaggaaagatggtctcctgtcgtcagatgctgtacgtaagcatctactggtggtcaatcgatcttaatttctacattgagctgaatagtt

SEQ ID NO: 645767 - DNA, 345 bp, Homo sapiens
ccaatcctatggtggattatgagaatcaaaagcagagctcatatagccagcaaccatatcataaccaggaacagcagcaaaacatggaatcatcaggaagccaaggtggacagagcacctttcctataaccagccagcactatggtcaacaaagattcatatataccaggcagtcatggctatgactcacacatcaatggctcatatagatgagacagtcaaatttatagactcagcatgctttgattcctataagtcacaaaccatgcagtccatatcattcacaacagggaaaactacagccaccacacacaagatgaccgtcgtgatgtgagtaggtatgga

SEQ ID NO: 645768 - DNA, 676 bp, Homo sapiens
  misc_feature (41)..(41): n is a, c, g, or t
  misc_feature (51)..(51): n is a, c, g, or t
  misc_feature (70)..(70): n is a, c, g, or t
gaactgatggggctctacaggtcggtgggggtgagacaggnagacgagaangagggggcagccgctcagnaggcagggggcatcgtgcccggctcaggcccatcgacgcagacaccattgacatttacgcccgcgctgtgttccctgcggcgtttgcggccgtcaatgtcatctactgggcggcatacgccatgtgagcacaggactcaggccaccctcgcttgtcctggcgcccggcggcagctgcccagaaacttcctgggagaaagagccctcgggctgccttcccctctgcgtgtttcgaagtgggatgacagtcggccacggaaaacaagaggaagcctcggcctccctgagctctgaccccagcctcacccgaaaggccagcctggggctctccggcaggcagcccgagacctgcacagatgaaggagcagaggttctgaccgagaggctgagccaggccggggtctgggcccttcagggagccgcggatttttatgttcagaaagtgatcctggtttctaggtctttgctctgcaggatcgggatcagagcgtgggaggaggtgggggtggacgtccatccggtgaacagtgaaggcgtttgtgaggtctttctggtcccagcatgaaataaagccttggcctgggggccgcttcattctcaaaaaaaa

SEQ ID NO: 645769 - DNA, 830 bp, Homo sapiens
tccctctaaatatttggataatttctgggatggatgcagtgatgttttggtcccttccgtatttataaatgaaacacctttttttagtgtttctaaacctaaaatctacttggttggaattcagtggttggaacactgttggattttttatttgaagcatgtggttgatggaaaatttcatggaggaagtttcaatcaggttgtgatcagttggattctgtaatgagcacagcacctaatatttggaggagctctgtttggaggaccaatgcttagggtggatttggttcgtaaacaatatcccaatagatttgtctgacttgaggtctggttgggttgggttggtttggtttggtttggtttggttcccaatagaattaagaattctattgttgaaaacactgcacaattttttatgggacaaagcctagaaaagagaattgtggttggaatcatattctaaatcatcgtatgatagaagagggaaagtgttgctgccataattctccttcactggtgtgggacctaatcagtgaactgtttctctgtcccacaatttaggccttcagtaataggtcttagttggttctgtctaaacacaaaaaaacaaagaataataaaacaaggaagagaaaagaaaaaataaggagaggggagcatgaagtactattggggaggacaatatattcttctgagatatatcgaggcgggtgaatgcgtgttgaagtatagaggcgtaaaagaatggtgagaggagatgaggatggagagatcaatggtggggatgagagaaatggatgagggaaaaaattgaagtgaagaaattaggg

SEQ ID NO: 645770 - DNA, 660 bp, Homo sapiens
aggatattgaccagagtatgaaatctgaaacatctggtagctttgaagatgctctgctggctatagaaaagtgcatgaggaacaaatctgcatattatgctgaaaagctctataaatcgatgaagggcttgggcaccgatgataacaccctcatcagagtgatgggttctcgagcagaaattgacatgatggatatacgatcacacttcaagagactctatggcaagtctctgtactcgatcatcaagggtgacacatctggagactacaggaaagtactgctagacctctgtggaggacatgattaacacagaaatcccagaaggacaggaggattctgaacactttgaatgcttgtaacttcattgatctacactgctatgatcattatctcagaatgctgattgtcaattaaaacgcctacagatgcctgctagaatatagactgtctgtatcattagtcacctataattaggcattacgatgctttaaagctgcacttgcatttcaaagcttatacgatctaactggagatcttaaggccgaattaaatatgcataccatgtttttaaaggtatactttatacttggagtttccggacatggaaccttgcaaatagttcaatattgtctattaaggggatttttattggcctgcct

SEQ ID NO: 645771 - DNA, 116 bp, Homo sapiens
ttatcttccgtgcccattaaacaaggaaaatataaaggtattagataaatttattggcttacgtattcacattccagaaccacatgctattaatcagaggctaccatcgctgtagt

SEQ ID NO: 645772 - DNA, 497 bp, Homo sapiens
  misc_feature (170)..(170): n is a, c, g, or t
  misc_feature (189)..(189): n is a, c, g, or t
  misc_feature (192)..(192): n is a, c, g, or t
  misc_feature (214)..(214): n is a, c, g, or t
  misc_feature (430)..(430): n is a, c, g, or t
aagctgacttgtatgatatagtatagccacgcagtgtctcttatggttactatttgcatgaatatctttctccattcttttactttctaaagggttctctggaagaaaacatatagttggatttttttttttaaatccagtctgacagcaactctaaagaatgccttttnctggccgggtgcggtggcncanacctgtaatcccagcactttgngaagtcaaggcaggtaggatcacttgaggccaggagtctgagaccagcctggccaatacggtgaaaccccatctctactaaaaatacaaaacattagctgggtgtaggtgaagtgcgcctgtaatcccagctactaggaaggctgagccgggagagtagcttgaacccgggtaactcggctggaattttcactacgagacgaggtctcactgtgtnagccaggatggtctcgatctcctgaccccgtgatccacccgcttcagcctcccaaagtgtcgggata

SEQ ID NO: 645773 - DNA, 100 bp, Homo sapiens
tgttagatatgggagtagtgtgattgaggtggagtgctggagattgtaatgggttttgagacatttcatattagtaatgctagcgtggagtggaggactg

SEQ ID NO: 645774 - DNA, 167 bp, Homo sapiens
  misc_feature (33)..(34): n is a, c, g, or t
ttagaaagtgtaacggcgcgattcccggggggnnaatatcgcacgcgttcccgctctatctcatgtacctcttcgcaggcatcctaatgctacgacgaaatctaggctatatacaactacgcaaaagggccccccaacgtgtaggcctaggctataacctcgctgac

SEQ ID NO: 645775 - DNA, 718 bp, Homo sapiens
  misc_feature (701)..(701): n is a, c, g, or t
gtcaaggattccaaagatctttgagcatcacccatatcttccccccattgtattcaccgttttccttgtaaattatttaacctatttataatagttgcttaaaagtccctgtccattaattcaaataactgagtcatctgtggttggtttctattaactatgtttttctttattgtgagtaatattcctctgcttcttcccatttttcataacagtttacatttcagtcactgagtataaaaaaagcagtggagacttcggtataatattgatttgtggtttactcactgcagagcataaggcttttattcttggtgagctagggcgaggggctgatcattagattcctccttgagtcagggtgagcttgggctgggctgcacctttggttagattcatgttccctgttattaggccaactcctggacttttgccctgccctgcctttgtgatcttctcagtatttgaatgggtagatggctaggtgcagcttcagatatttttgcttgaccttggtatttcactctggtaggactccagaatccaagcacaatgagaatccacctaattatgtgatttatctctactctgcaggcaattcctccactgctgctttcttggaaacatgcagaaaatgtgggtgaggggggataacttaggctgagatattctttttcattcagattctaagcctcttcggnacactgttatgtagatc

SEQ ID NO: 645776 - DNA, 122 bp, Homo sapiens
ggggcatgggtactaccaggatctggagcttctagtagggaccatggcagttctggaagggccattcccaggggggcgacccatgatacacactctgaaatccacactcccaacttctttct

SEQ ID NO: 645777 - DNA, 262 bp, Homo sapiens
atggtgacgggggtacacactgtgccatctacgaggggtatgccctcccccatgcaatcctgcgtctggacctggctggccgggacatgacataactacctcatgaagatcctcaccgagcgcggctactgtttcaccaccacggacgagcgggaaatcgtgcgtaacattcacggagaagctgtgtaacgtggccctggacttcgagcaagagatggccacggatgcttccagtgtcctccctggagaagagctaagagct

SEQ ID NO: 645778 - DNA, 641 bp, Homo sapiens
  misc_feature (1)..(1): n is a, c, g, or t
ngaggagaacgcctgttcaccgaagttccacggtgtttgggatcacaaaggagtatggtgcgcagcccgtggtttaccacaaggggagctcagtgattctagtccagagacagaacagttgcgggtctcttctgaaggagtcatggatgtcattcagtgtcctgtgactggtctggcactcgacgttggttggctaagatggctcggcgtctaaaagctacgtcacttatgcaggaacatggacgtaacgatatcgagggggtccaaagatcatggaaggtcagattagctcgctggtcagcacgctaacaagatcggtagattgcagctccacagaaggcatcagctgttgatgtcagtgcagtgccagatggaataagctgttggagcctggatgagcagagcatgcatgacaatccgttagatattcgacgtaggagttgagtcaggcgtacattatatcatcatgatgggctgttgaactcggagcattgtgctctggcatcgtgagcccatggagtaagacagttggcatagcggtcaccgtagtaatcgtagtcagtgtgcagtctaagggaaagcctcattgaggctaaaggcaacagttttagggcgaactatacggtagagtgccaaggctc

SEQ ID NO: 645779 - DNA, 634 bp, Homo sapiens
  misc_feature (38)..(38): n is a, c, g, or t
  misc_feature (172)..(172): n is a, c, g, or t
  misc_feature (186)..(186): n is a, c, g, or t
  misc_feature (193)..(193): n is a, c, g, or t
  misc_feature (214)..(214): n is a, c, g, or t
  misc_feature (219)..(219): n is a, c, g, or t
  misc_feature (224)..(224): n is a, c, g, or t
  misc_feature (229)..(229): n is a, c, g, or t
  misc_feature (265)..(265): n is a, c, g, or t
  misc_feature (321)..(321): n is a, c, g, or t
  misc_feature (365)..(365): n is a, c, g, or t
  misc_feature (384)..(384): n is a, c, g, or t
  misc_feature (427)..(427): n is a, c, g, or t
  misc_feature (440)..(440): n is a, c, g, or t
  misc_feature (447)..(447): n is a, c, g, or t
  misc_feature (452)..(452): n is a, c, g, or t
  misc_feature (463)..(463): n is a, c, g, or t
  misc_feature (472)..(472): n is a, c, g, or t
  misc_feature (525)..(525): n is a, c, g, or t
  misc_feature (550)..(550): n is a, c, g, or t
  misc_feature (560)..(560): n is a, c, g, or t
  misc_feature (627)..(627): n is a, c, g, or t
tttttggtataatttttattccaaaataacaggagtanaataataatatttatagagaaggaaaataatgaaaatctataagagttttggcagccgccctgcatattttttttttttttagctcccctaaagactgtggcaggaaaaaaggaacactggctccgagtttctntgagaaaacaagtnaagaaanaaaaaagaaagcccaaacccncaaanaaggncaggnaaccccattgcccacccccccaacaaggtaaaaaangagttcctttagtaacagtgcagaattcatctttatctcccacctgcctcaacggnggaagtctaaagtcatgattttttttagagcattgaaactgtgngtctatagacaaataaacncatatgagatgacaattgaatttttaaaagtgcaggtagaganaggagcgatcatnttgaacnaaaanctttctatgtnttttgattnctattcaacttgctattttttagcaaaaagcgaagtttcaatagtgttcatcncaaatcttattgctttaaccgtggnaaactttcantaaaaataaaaagatgaagcagttaatccagttatttatttgacatggctttcattgggaaaggggngggctgg

SEQ ID NO: 645780 - DNA, 215 bp, Homo sapiens
taagtaatatatataaaataatatctttttacacaaatcactcaaaaactgtaagacatattaagagtagacatcattgagtggaaggatttggatgttattaatcatcataaaatcttccatttcttgagcagggcaaaatcagttttcctcaaaaccatttactccacaaaaagaaaggatgaaattttttcgtcgacgcggccgcgaattta

SEQ ID NO: 645781 - DNA, 131 bp, Homo sapiens
tactcacgattgcactctcttcatctgaaaatagccagcagctctattatgtattgtacctccgaatgatcaactttaccgatggtattcacatatcacgtactgaggaatctccccttcatggtcctctg

SEQ ID NO: 645782 - DNA, 134 bp, Homo sapiens
  misc_feature (36)..(36): n is a, c, g, or t
  misc_feature (54)..(54): n is a, c, g, or t
ttagaggttcccccgcggtactgtcttacgaagatnctgtatagggtctgacanctgcccggtgctggaaggttaaggaaggtgcttagcaagtacttcgaaggccttgactgagggccccagttaaacgcgcg

SEQ ID NO: 645783 - DNA, 144 bp, Homo sapiens
acatctctcagctccgccctctcctcctgttcgcacacgacacctgcgtgtggcgcactcgacccctcctttctgcctggcacgggcgcctacgaccggcacggcttcgtgatgtctggactcttcgtgcgtgtgcacgggtcc

SEQ ID NO: 645784 - DNA, 545 bp, Homo sapiens
gctgtacaagaaggacgtgagctgacttcgcaagtggcgtatgtgtagctgaagattggggaacacaccccctcagacctcgccatacatggcaaatgccaatgtaactggcccgttatgccagtatctgccagcagaatggcattgtgcccatcgtggagcctgagatcctccctgatggggaccatgacttgaagcgctgccagtatgtgaccgagaaggtgctaggctagctgtactacaaggctctgagtgaccaccacatctacctggaagtgcaccttgctgaagcccaacatggtcaccccaggccatgctatgcactcagaagttaactcatgaggagatatgccatggcgaccgtaacagcgctgcgccgcacagtgaccccacgctgtcactgggatacacctatacctgtactggaggccagagtgaggaggaggcgtacatcaaactcaatgacataaacaagtgcacccctgctgaaagcctgggtcctgaacttctcctacggacgagcctgcatgcctctgacctgaagt

SEQ ID NO: 645785 - DNA, 134 bp, Homo sapiens
  misc_feature (28)..(28): n is a, c, g, or t
  misc_feature (31)..(31): n is a, c, g, or t
ttggcctcccatcttctaatggggttgnagncccctcattccctctgaggagccttgggcatccgagccttttatttataacttattttgtattggaacttttaaacaacactgaagaaaaaaaaacttttccg

SEQ ID NO: 645786 - DNA, 347 bp, Homo sapiens
ctggctaatttttgtattttttggtagagacggagtttcatcatgttggccaggctggtcttgaactcctgacctcaggtgatcctcctgcctcggcctcccaaagtgctaggattacagttgtgagccaccccacccaaccactgtgctaaattctttatagtcagtacctcattcagtccggacaacaaccttaggaaataggcattcttttctctctctctctctctttttttttttttaaaaagactgagtctcactctgtcgcccaggctggagcgcaggggcgctatctctcctcacggaaattctccggcctccggggttccaagtagattctccgtgcc

SEQ ID NO: 645787 - DNA, 205 bp, Homo sapiens
acatccagatcgtcacaccggaggtgcatgagggacacccgttgaactacatttccggtggttcggccacctctgacattgagttgtcccgggttgacggagtgcatgggcctacgtcggctttatgtcatcgtcgtcgacgaccggtaaaacacgaccagaactagtgccccggttgagggaccggggcactgctgtgcctgag

SEQ ID NO: 645788 - DNA, 269 bp, Homo sapiens
gacaggagccatggggccagggccccagaatagctttacgaaaaaaaataattaatgccaccctcctccgcggcaggtatctatctcttaccacaaataaagtatttaatgcatccttggagtcatgaaatatagagaacccaataagacactacaatttccagaaaaataaaatcatgaaggcattgagtaaatatactgaataaaggtggaatgagaacaacgcgtaagggggcggacctgaagtctcggatctgacggagaaatca

SEQ ID NO: 645789 - DNA, 762 bp, Homo sapiens
  misc_feature (15)..(15): n is a, c, g, or t
  misc_feature (21)..(22): n is a, c, g, or t
  misc_feature (76)..(76): n is a, c, g, or t
  misc_feature (118)..(118): n is a, c, g, or t
  misc_feature (120)..(120): n is a, c, g, or t
  misc_feature (133)..(133): n is a, c, g, or t
  misc_feature (147)..(147): n is a, c, g, or t
  misc_feature (176)..(176): n is a, c, g, or t
  misc_feature (178)..(179): n is a, c, g, or t
  misc_feature (205)..(206): n is a, c, g, or t
  misc_feature (218)..(218): n is a, c, g, or t
  misc_feature (227)..(227): n is a, c, g, or t
  misc_feature (266)..(266): n is a, c, g, or t
  misc_feature (306)..(306): n is a, c, g, or t
  misc_feature (329)..(329): n is a, c, g, or t
  misc_feature (399)..(399): n is a, c, g, or t
  misc_feature (527)..(527): n is a, c, g, or t
  misc_feature (573)..(573): n is a, c, g, or t
  misc_feature (623)..(623): n is a, c, g, or t
  misc_feature (632)..(632): n is a, c, g, or t
  misc_feature (661)..(661): n is a, c, g, or t
  misc_feature (667)..(667): n is a, c, g, or t
  misc_feature (700)..(700): n is a, c, g, or t
  misc_feature (714)..(714): n is a, c, g, or t
tggccgccggcaaanaggatnnccaggcaggtgaagaacgtccccagcagtgcactggtcatcctgtttgcctgtnaggtggccgccggcatctggggctttgtcaacaaggaccagntngccaaggatgtgnagcagttctatgancaggccctacagcaggccgtggtggatgntnncgccaacaacgccaaggctgtggtgnngaccttccacgngacgcttgnctgctgtggctccagcacactgactgctttgaccacctnagtgctcaagaacaatttgtgtccctcgggcagcaacatnatcagcaacctcttcaaggaggnctgccaccagaagatcgatgacctcttctccgggaagctgtacctcatcggcattgctgccatcgtggtngctgtgatcatgatcttcgggatgatctctgagcatggtgctgtgctgtggcatccggaacagcgtcgcgtgtactgaggccccgcagctctgtgctcacgagggacctctgcatgtgcccccctaangtgaccccggaacacttcccgagcgggggccactcacgcgccctgntgtaatatacactgttttccgggtatttacgtctgcatacacggtagccnttttatacntttgtgaggggtttgtgtttttttgttcntggaancttgtccgtggtataccgtgttctcaaggggcntgaccggtcaccantgataggggtgggcggtggtattgaaggtgggaggacgggggccttgg

SEQ ID NO: 645790 - DNA, 347 bp, Homo sapiens
gatttttattgccctagtatactaaagtgttagtgaactcattttttggttctaatcttattttagtgatttccttaggattttttcttattattattatactttaagtttcagggtacatgtcgacgacgtgcaggtttgttacatatgtatacatgagacatgctggtgtactgtacctattaactcatcatttagcattaggtatatctcccaatgctatctctcaaagagaaaccagcatcaaagtgaacaggcaacctacagaatgggaaaaaatttttgcaacctactcatctgacaaagggctagtatacagaatccacaatgaactcaaacaaatttac

SEQ ID NO: 645791 - DNA, 1034 bp, Homo sapiens
gctgaaaggtctggaggagaaggcgccggttcggggtgtggaggaggggcgtcgtggaagacgagaagagtggcccgttccctctcctctctccctttccctcgttatacggagaagtggtttctgcggggcccggtgagcctcggagtacctgaacctcgatctccggggctgcgcgtgtccttggtggtggactgacgcgccccctcccggggacgggctggtctggccgcggacgtcccctgccgggagctgtgattggctggaaacggtacccgaaccccgcaggtgaagacccgatccctgggcggacccttgggtatcgcgactcacagtatcttgtcagatcggcacgcggtaccctgaccttgagtgagtctactgtccgcttgcgtcgcgggcgcatggacgacacgtgcaggaccagtacgggcaggcagccgtctgtctagaaggaaaggggaagttgacgctcctgtgcctcgcaggcgtctggcgcagtgggagcgcataccgggcaggccccgatctgcgctcggccaggtcacggcctgaggacggagcggggaagcgcaggccgagagcgagaacctgaagattgttgacggcgggtccagagaggtgcgcacgtgaaggggccaagagggacgaacgttccccacaagacgcttgagagagaaccaagacgccatgccgaggataagcgaatcaccgcaggaaactgagtgcccttgcccttggaagcagacatgtgaggaggtggaaccatgagcagaatagaaatggggcagagacatggtcatagacacacagaccaataacaacaaaaaaccaagcaaacaaacaaattggacacgagggggaaatgaacaaacgtgaacggatactggaacgaaaagcaaaagacacgaacaattcaatacacacagaaaacggccaacacccagagacagcgaagcaacaaaaagagacagcaacggaacagaaacaagaaaaaaggaagcgcgaaaggcacaaagacaaacggcaacaag

SEQ ID NO: 645792 - DNA, 1780 bp, Homo sapiens
ggttaattctcacccccaggcttgggtctgtcatcggtgcgtgcgtgtgattccaactagacttcatactcaggcttccagtacatatcaacgttggctgcgttcggctgtagactgctgggtgtgcgttcaactcgcgttggtgggtcgcgcatacagaaggttgctcaggaagtcccacgtgttctcgatccgattcatcgcgccacgagaatgaagggtcccgagacagcacggtgcaagttacctgatgatacttgacagctgaccatatcaccctggcgtcaatatagggcagggcagatttattctgcaagcgaaatgtgttaccacataggagagtgagttcggcgcgagatcgcttcttgcgctgaccaactacacatgagagggtccctcgttcgtgcttgatccgtcgcttgtaatgtgcatcacatatgacataatctcgtagtatccgttgaacgagatgcctttgtgttgtccaggcggttggaatgcgagtcttctccgtgaacgtggactcggagtgcgcattgttgtagaacgggtctggtagggggtatcgaagtcttggaacaacgggctggggactgcgcctgcttggagcccgtgtagatggcacttcgctctggtcctcggcgcatacttaatgtggtaggggctgcccaactcctcgtttcctctgggtatgtttttgtccactggtctctgttccgtcgtacttacccgtacgtgtcctcggttcgtgtcttcctgtgaggttcttccgccgcgctttggctgacttccgctctattcgtcggcaaggcccgtttcattctcagaggacattggcagcgggaggatttctctcgtccatataaggcgcgcgtccgccatcagtgtgacgtgaaacagacgatgggacaggccgtgggcctttggggcctggtgtctgcaatgccgtcatcgtgggaattcccaactgggacattgcgggacgaatataaccgacgagagtgaccattaggagtctaacagcgtgagggtgcacctgtgcctccctgccgggcatctactaccaagctcagcagatacttctagttgtttcatcccctgtgctctgggtctgtgaaggtgtcgtcgctcgccgcgcttctctgctgcggtatccgtccgtgaccgtcgccttatcgtcgaggcctgcgtctctctcgctctcgcgcgcgcttctcgtcacgcccctctgtgggtgtggtgctcccccgcggcggcgggaacgtgtgcgtcggactctcgccgcgccgtttgtggttctgcgctgcctcacggtcttcgcgctgcgtctgcgcttcttcgtcggctttcgggccgaagttgtccatcgtcatagccgctctggcgctctcgcagagactccttcttgcgcgtcgtcgtgggtctgggatcagtaggctagatctggcgaccgcgtcacgcgctcctctcgctctgctcttgttgtcggttctctttgtttgttttcttgcttttcgtgttctggtgtgcgtgtgtcgtcgacaccggtccgtgggctcaggcgcgcttctccttgcatttgcttgtgcgtctgctctgtgttgggcttcggtgtggtcagcggcgcgtctcgcttgcgtgtcttgctgcgggggacgctcgtccgggcgttgtctggctcgcttagtggcgttttgtcttctgctgtccgtgctcgctagggccggcggtcgtgctctgtgtcttggctgtttgttcgcgcgtcgggtttctcctcgcg

SEQ ID NO: 645793 - DNA, 809 bp, Homo sapiens
  misc_feature (566)..(566): n is a, c, g, or t
tggacccccgtctgccggctggtgcactggtgctgctgggccctgccctggtgttcgcgttgggccccgtgcccgccccggagatgcgtgagaggttgtgcgggcaccacttcgtacgcgcgctagtgcgcgtgtgcgggggcccccgcatggtccaccgaagttccaggaggtcctgcggccggaggtcggaccgtgagttgctacagtgggtggaggagacgatatctgctccatgggctggtggccgacagtaatctcacgctggaagctggtctgcagcccctgccccagaactctcacctatcaccggacatcaccggtggcagcttgccgaccaaccctgcgacggctgactggctgcgctcagtggcttgtaccgcaatgaaagaccgtagctgacccgtcatgatccctacgtgcatgtcgtcctttggtgttgcacgccattacgaagttggccttgagggcccgggaggggtcctggtactggtgacgctcactgagtgtccatcgacatgtgaccatagaagctctcgcagtctagccaggcctttgtattaccntcctggagatgggctgctcaactatctagcccgcagaccaatgaccacctggcagccttgtgagagtcgagctgcagtagataaatcagaccctaagcccatggctgtggcaggatcccccgggtttcaccagatgtctggacagctgtacagcctaaatgtcgctcatgtccagaggagccccagaaagctgcggtccctgcatgtgtaacgaccccttcttgctgtctcttagtaaataaa

SEQ ID NO: 645794 - DNA, 381 bp, Homo sapiens
  misc_feature (2)..(2): n is a, c, g, or t
  misc_feature (11)..(11): n is a, c, g, or t
  misc_feature (152)..(152): n is a, c, g, or t
  misc_feature (310)..(310): n is a, c, g, or t
  misc_feature (366)..(366): n is a, c, g, or t
tngcctggtcncccccttttcctgcctggccacgtggcgagttcctggccacggataagtgtcagcgcggtggctgcctcgcccgtggtgttgcctgcccggatttctccaggcagacactctttccattacccaggttctcactatctttngtaaatacctccgtggaggcagtttactgtattgttaaaaaaaaatgttttgcatgtctgtatctagtgttacactgtaatccacatcaaagctgagctggtgtccttccatcttcaagccctcaggggactccgagcaatgcctggaatgtgcttgnaaataagtatttgtttgagtgaatttgcgagcgcaccaaagactcgtgcagttagnaaacacgttttaccc

SEQ ID NO: 645795 - DNA, 708 bp, Homo sapiens
  misc_feature (270)..(270): n is a, c, g, or t
  misc_feature (276)..(276): n is a, c, g, or t
  misc_feature (297)..(297): n is a, c, g, or t
  misc_feature (300)..(300): n is a, c, g, or t
  misc_feature (314)..(314): n is a, c, g, or t
  misc_feature (316)..(316): n is a, c, g, or t
  misc_feature (324)..(324): n is a, c, g, or t
  misc_feature (338)..(338): n is a, c, g, or t
  misc_feature (344)..(344): n is a, c, g, or t
  misc_feature (373)..(373): n is a, c, g, or t
  misc_feature (402)..(402): n is a, c, g, or t
tagatctgggagaggaacccgagaagccagcaccgtccttggtggggactgctccctagactccaggagccatatcccagacctttgccagctacagtgatgggatttgcattttagggtgatttgggggcaaaaataactgctgatggtagctggcttttgaaatcctatggggtctctgaatgaaaacattctccagctgctctctttgctccatatggtgctgttctctatgtgttgcagtaattcttttttttttttggagacggngtctcncactgtggcccaggctggagngcngtggcgcgatctgngntcactgangctccgcctcccgngttcangcaattctccgtgcctcagcctcccgagntagctgggattacaggtgcctgccaccanacccagctaagtgtttggtattttagtagagatggggtttcaccatgtgggccaggcagatctcaaactcctgacctcgtgatgcacccacctcgtgctcccaaagtgctgggattacatgcgtgagccactgcgccctgccggttggtagtaatttttaggcaccaaatctccctcatcttctagtggccattctcctctcgtgtcaggtaaatgtcacactggtgcccagaagggatgaccaggaaccttaaagagtggctgaaaagatggcagagttatcataataaaatggctaaactggcg

SEQ ID NO: 645796 - DNA, 419 bp, Homo sapiens
cgctcacgcccacaaaggacttctttatttgccattcctattatgtacaaagccatattttctatctctactttaaaacaatagagtcttgctctgttatccatcaggctgatattgcagtgctataaacacagctcactgcatcctcaacactcccggtctcaagtaattcttccatctcactcttctaattagcttggactacgggcacacttcaccgttcccggctaattttccgttctaggtagagttggggtcttgcggtgtatgcccaggcttgtatagacctcttgtcctccagcaaccctcctgccttagcctccccaagtgctacgattataggcttgatccactgtgttcagcccactcagatctagacaggagatcagcagttaatttcgtcttttgtcattctcagt

SEQ ID NO: 645797 - DNA, 211 bp, Homo sapiens
ccaggtctcccgaggccgagcatgtactatgtagccattagcaaaccaggtagtaggagcacatagttcaatgcacaacaggcaacaaggatccggctgttagggtgaacacaagcaaattatcaaataacttatagtatgattccaagtttggcaaaaaacaggagtcaggagaggcataagaaaagggagagactgtgcaggagatagg

SEQ ID NO: 645798 - DNA, 194 bp, Homo sapiens
ttcctgtctgcctccgcttctgcaaaatggctgcttcctgcttctgcctcctgcttctgcaaaatggctgcttcctgcttctgccgcttcctgccttgtcttcctgcttctggctgcttcctgcttctgccgcttcctgcttctgcctctctctctctctctttctctctttctttcacagggtcttgaagaag

SEQ ID NO: 645799 - DNA, 294 bp, Homo sapiens
actaagcctttccgttcccggagaataaaaaaaattcctttttgaaatgaattcctcctttgggggaaaaaaagcctgccttttagccccccaagatgaaattatggaaaacaaaagggggtccttcccatgggcggtccctgtccccccccgccagtcctccccccccaaactgtttttgattgggttttagctttttggtgtttttttttttccttttaacccttggatttgggggcttttttgtgattttgagaaggaaacttttgggggtttaataaagtttttttccca

SEQ ID NO: 645800 - DNA, 250 bp, Homo sapiens
gcagccacgtggtctcacgttttcatgttgacagccagtcagagtcaagagctcagctgtatcgacagatcgtcatgcatcatctgcaggcagactgaggagactactccagctgggaggtagtctccagagagagctggacgcatgttgcagaggcaaggcccatcactcacgtctcctacgtcttgggagagctcattggacaaccccaggagcatctagtccttcgatgttgcccaacgcaagggtg

SEQ ID NO: 645801 - DNA, 332 bp, Homo sapiens
ctctgatttccctttagtccttcataaatgccatgatcccaagtaggaacaacctgtcattacctttaaacatactaaagagtctagagaggaaggctgaattttctttcaaacttctcggagtaccacatggtcataattagaaaataaaatactgccttggctatttggcaattaacataactgggttgcaacgctggaggattttctttctttctttctgctcaaattggcaaacaaggtaattgctcgaaatggtgtcagattaaaaacacattttcaaagtttagaccatctaaaattatctcctgaagtgttttagaagacagttg

SEQ ID NO: 645802 - DNA, 429 bp, Homo sapiens
ctcctggctagaatagacagcgaaacaggagcaaatcttatacaggcggcttcctcttcttcagcaggcatcatttgtaacgctgttcgaaatggcatacaaacaagatgcatctgagcgagaaggctctggaagttctggcactggggaacaataggaagatcaaataggaggaaagacagtaataatagtcgtaattgtgacctgataaggacaacatatgaagcttaggagtgaagcgacttcctgagcagaaatgggcgaacttcagtctttttactgtgtttttgcagtattctatatataatttccttaatttgtaaatttagtgaccattagctagtgatcatttaatggacagtgattctaacagtataaagttcacaatattctatgtccctagcctgtcatttttcagctgcatgtaaa

SEQ ID NO: 645803 - DNA, 437 bp, Homo sapiens
  misc_feature (284)..(284): n is a, c, g, or t
  misc_feature (344)..(344): n is a, c, g, or t
  misc_feature (351)..(351): n is a, c, g, or t
gatttgtgtctcatatgtactcccaattcctcccagtttcaagcagttacattgtgtctgcgtttagcacatagccgttcatctcctctgtctcagtcctgcgtggagatagggtgctccgctagccgctcttcccaatgcctctccagtggtttggttttccgaagcttgtttgttgccagtgccttcaggagggaatttttgggaatactgttctctgaggactggatgctgcctttatacttgaaagtaattttgtctggatataaaattcttggctcacntatctttccttgtgtgtcttaaatacgttaatcctttttttttctgttggagtttgatanttaattntctttccgttataagtcacctagtcttttgcttggatggctaaaaaatttatctttaaatagtgtttttattgggctgataagccg

SEQ ID NO: 645804 - DNA, 157 bp, Homo sapiens
gccggggggctcggccactctctccggtttctggcctcttctcccttcactcccgtccaggctgggtttgagagcggggctgttctgcagcacctcagggcggggaggagagatacctgctgcttccattgctttgcccttccaggagtcgacgcca

SEQ ID NO: 645805 - DNA, 791 bp, Homo sapiens
tgcggtggctcacgcctgtaatcccagcacttgggaggccaaagcgggcggatcacgaggtcaggagatcgagaccatcctggctaacacggtgaaaccctgtctctactaaaaatatttttttaaaaattagccaggtgtcggggcgggcacctgtagtcccagctacttggaaggccgaggcaggagaatggcatgaacccaggaggcggagcttgcagtgagccaagatggcaccactgcactccagcctgggcaacagagcaagactccatctcaaaaaaaaaaaaaaaaggtttgaacaattagaatttaccctaatactttagataataggatgggaactaatcgtggtcctttttctaaaatgtggcgtcttgtggttcaaaaatggtcattttaaggtcattggagaaggacccagagttaatatagggggttctttaaaaaacgtggttttgtggggccgaggtgattttatacacacttgtgggagattggcccatttttacgcttggaattacattggagccatggaaaattcagttcaggggagaaccagacttttccaaaagtgaggattttccgaaagttcgcggaactttgtggacttcaaagggtgaagacttccagatgaggggtacaccgggttccactattacagtggcagtgggtggtaggggggttaagggcggcgaagaatatgagctaggggtggcggaagcgaggacagtttgtcctaaaaaaccggtgtaaattggggactaagttaattaaggtcgccggaatgt

SEQ ID NO: 645806 - DNA, 1347 bp, Homo sapiens
  misc_feature (619)..(619): n is a, c, g, or t
  misc_feature (971)..(971): n is a, c, g, or t
gggtgtatcaatcttacccgctcggactactagcactatccggtgagggatgttagtgtctcatacctactggctacggacgaatcagatcacctatccgcgtgatggcgcattgatgggcgtagctctagataccccgtcatggaccagactttccctgttacagcgaaggattaggggctccctttgtgcactcacgtacgtctctctacctggcgtagacgtgaggagcccgctgtcgtgctacggccatacaagctcgtctcatggtagagaagagtatactaaggcactactacactagagtaacctggagcctatgatgatacatcgagagtggctttaagatagcgaaactacgatcccggggcggcaagtgatgtgagctaaaccagcattagcagtaaaactcgtgcactggatatgacttagctagttactgttggtaagtacaagctacataacgcaccttgggaagcacctaattttcatttaggggtttccttgctcacttctagcatattagtttctatctcgccattcgaggatccaatgtttgattctaagtgaggtctttacaaaccgcattaattcctaggtggcaatctctgataaacanttgttgcttggtgttaccatttcatggggttcctggtgcgactctaagggcgctcgatgcaatcgacttggtcgctgtctgattaggacccaggattgcctctggaaaggggccacgcatttgtcctacgggtattgaagaaaggtctactttcagcgcatactttctccttcacatatccttcatacggtatcgcccaaagagggtcatcacctatagagaacattcattgacccttacgagcgatggaacaccccaggaagactcctttttgcttccaccctatgcatatcgtgtcttgtcttagacctttcccgctccgtgctgtatcgtttccgtacttgactccccntcgccccacgaatttcgccaggccgttcattgctggaatgcaaagaacaacgccccaagatgaacattgcattcggcgttaaattaccctacttccgctattttctcactttgaggcagcgctaacggtacgcgtcagaccacaatttacgcggtgtgaggctccgcttccgcagagcgtagatttttccggcatcgtaaggggagcgcccccacgttaatagatcgtcgggttaaccgcaagtttttacataaggtatcaagtccgttggggtgcgccctaatggatggcgtagtatcgtaatatcctatggacccggggcacggtggtcgctagtggattttagcgatgaggatgcgtgaagctgtgtgaaaac

SEQ ID NO: 645807 - DNA, 235 bp, Homo sapiens
aattcggttattagattactctccttagtcctagctagcttttcgtgtaaatgcatgacattctcatcagcctgtgcagtattcaggaactgggtcgtaacatcgaggtccctggaaacagtgtcttgtcccaaacttagactcatgtacctgcaatactgtcctcagtgagcctgacgttggttagcttccggagtggatgacgcttatccttatgctgtcgggctagtcgggg

SEQ ID NO: 645808 - DNA, 410 bp, Homo sapiens
gggagcgcagttcgtgggacacgtcgcgcagcaactggcgctggctgccgatcaggctttgcaggcgtgcgcccatgcggttgaagtcgttggccagcacgccgaactcgtcgcgccgattggccagttgcgccaggctgttctgttgataagtggtttgccccagatcatgcaccgcgccgcgcaaacggctgagtgggcgggtgatggacaaggtcaccagcaggctgaacagggtcagcaccaccagggtaatcgccaatgcactgagcggccacagcaggctgctgcggtgccaggcgtccagctccgggtgaggaatacggtagatcaataggtaggtgccgccggtttcggcgctggtgtactcggcggtcaggcggcgccagggcagggactcaggtggtgtg

SEQ ID NO: 645809 - DNA, 185 bp, Homo sapiens
cagagaaatccggagcgtaacaaaagcaagacttaatagggcgtttagatcagatattgcagacccgaaacgaagtgatctatccatgagcaggttgaaaccggtgtaagagccggcggaggacacgaacccgctgacgtcgaaaagtctctgggatgacttgtgaataggggtgaaaggaagta

SEQ ID NO: 645810 - DNA, 151 bp, Homo sapiens
agaggatccccgcgagtgatgcgggaaacaagcagggcacacggaatagaacaaaaggctcccccacttgtgccctgatcactgtcatcgtggatgtcagaccaagatagccttctcacaggagatctcggatgcatccgtcgttgctcga

SEQ ID NO: 645811 - DNA, 386 bp, Homo sapiens
  misc_feature (4)..(4): n is a, c, g, or t
cgcncccccaaagataccaatatgtaatcctgaaagtctacgaataagttatatgacatggcaaaaaagatcctacagatgtaactaaattaagatcttggcaagaccaatataatcatatggatttttacaagagggaggcaagattgtcagataattgggatgtggctacagaaacggaggtagttgtgatgggaggtcatgagcaaaggaatgcaaacaagctggaaagggcaagttaacagatacaccctcaaagcttccagaaggaactcaaacatctgcaaacattattggaactgattttagatttctcatctctagaactgtaaattaaaagtttgtattgttttaattcagtatgtttgtggaaatgcgctatagca

SEQ ID NO: 645812 - DNA, 213 bp, Homo sapiens
cctctcgaggatccccggctcatagcggggcgccttgtgtggcccatggcggggcgcgtggtgcggcgctttgggtggctcattgcgcggctcatggggtggctcgtcggggggctctttgggtggctcatcgggtggctctttgcgtggctcatcgcgtggcccttcgtgtcaattcctttaagtttcagctttggccctttgcgcaacgag

SEQ ID NO: 645813 - DNA, 701 bp, Homo sapiens
gcatcagcacaccccggcactcctctgcggcagctgcgcctcgcaaggcgcagtgccgagcgcacgccggagtggctgtatgctgcccggcgcggcgccgcctgcgcgggctgtgggctgcgggctgtgcccccgctgctggccagtctgcacggtgcgggctctgcggcgcccgggtgctctgcaacgctgcggcgggctggcatgggataactgctggcatggtgcgccgagatcgcctccgcgaggatgagggagtggcgggtccaggtggggctgtggccgtgcccctgcttgctgcggtacctgcaacatacacacccctccaaggttctcccctgcccttcattcatggaacgtcttcaggcaagtttatcacttaccaagggactgcggtatcttctaccaagactctgtgggtgtggtttggaagtccacgagataagttgtgcttaaaccacggtttaccaaaatccaagctacagatggtacaacgactagggaacgggtctgacccttgaggtaacaatcgggtgatttgcccttgatatctttagggctttgcgttcagtgacaaacgagaccacatcaagtattccatattatgaacaggaccagcactcgtgaaagggctattgcggccattcttgggctcaagaaacggagatcaacttctttctcatgactatggaaatatgtgc

SEQ ID NO: 645814 - DNA, 333 bp, Homo sapiens
tcacccccaaataaaaggtttcccctttaaatttttttaggttttggccggggggggggggttttcctttttttcccccccttttggggggccgggggggggggttcccccggggggggggttttttgcccccgggggcccccttggttgccccccttttttttttaaaaaaaaaattttgccgggggggggggggggccccttttttccccccttttggggggggttgggggggattttctcctttcccccgggggggggggggttggggggcccccttttgccccttttcccccccgggggggggggggggggcacctcctttttccccca

SEQ ID NO: 645815 - DNA, 133 bp, Homo sapiens
  misc_feature (17)..(17): n is a, c, g, or t
gatcccttccagcctgngtgacagaaaaagcaaatattcagcgagtgctgggagatcatgtaagggaaatatctcaaaatccaggaaaagaaaaatattttgaagatgtgcaagtaaaatgttaacgagatga

SEQ ID NO: 645816 - DNA, 603 bp, Homo sapiens
gccatgtagcccccttcccacccaaagggcctcccctggtaactagtccgtagggagacctgtgccccaactgctgtggcccctccgtgatcatccttctccagggagcaagcaaagacccaggaatggaaagcgagtttcctaacaggatgtaaggtcccccttcagttcccccaggcctcaaagcaagtagctttccaccttttgccagaatacaaaggaaagatggtgttgggagccctttggagaaccccagtttccccggccccccgcatctattgagtttgcaaagtcccaacccctttggttttggggccagcaagattctttaaaaaaaggttttttttttcgggccccctgccaatcatgtgggtgaacccgtggaacaacgggaaacctgtgctagtttttcaaattgcccccctattacccggccccaaaagaaacccagtgggccggaggtggttttgaccccctggtttcttctccccccaggagaaaagtttaggagaaacccgccttttctgttttttaaaaaatacagcttccccccggccagttaacaaggaaagcctgggcccaaaaaagggttttcccccttta

SEQ ID NO: 645817 - DNA, 155 bp, Homo sapiens
  misc_feature (44)..(44): n is a, c, g, or t
  misc_feature (60)..(60): n is a, c, g, or t
tccattggcattgcttagtagcgtatacatggcttcataacctntggagcacagattgtntgtggttccatagatcttccacttgctccataaacccgatccctgatagagcataatattcttttcttgtctgttgccgtagttaaaaaaaaaaa

SEQ ID NO: 645818 - DNA, 378 bp, Homo sapiens
  misc_feature (372)..(372): n is a, c, g, or t
  misc_feature (376)..(376): n is a, c, g, or t
  misc_feature (378)..(378): n is a, c, g, or t
cctgcacttactccacctgacagacacctttgttgcattcattatgaggcagccactgctctgagttccaatattaactcatttaatccttatcacaaccctatgaaggagatgttattatcccaatttacagatggggaaactgaggcacagataggttaggtaacttaggatcacatgagttgaacccaagtcatctggctctaaagtccatgctcttcatcacttgcctggcttcatcactataacatgtcccgtttgaagacagaaggaccgagagtcctctcttccaccctgcaccagcatttctgctccaagaaaggacagtgctgtccggggtcaactgacatctgctcagaagacccctgtgcntganan

SEQ ID NO: 645819 - DNA, 137 bp, Homo sapiens
  misc_feature (125)..(125): n is a, c, g, or t
gcgcttagtgacttctgatctgggcctgagcttcggcacttggagcagtgaatccagtctcaataatactatgagttcatgagcacattcttcttagaagtcagctctgtcttcccagatttttnatcttcatcttg

SEQ ID NO: 645820 - DNA, 971 bp, Homo sapiens
ggaggcggtagaggggagtgcccggaggcgcaggccgggccggtccaaccctgtcctagaggcgaagccggggcccccgaccatcgtagagcggcctgtcgacgacctcggctcagacatccccgacggccgtgttcggccagaatggagttttctggccaagaccaagagggaggggtgaagcgccagcacgctatgcagaccaagcggtcccaggcacccgccgtggagtggcgcctgcaggggcgttcctacaatcgatcggtggaagaccacacagagcccgctctcagcggctcacgagggggagagtgcacgcggcagaaggaggcgtagaagcatggagcggcagctggccctgcccgcgcacggagcaggccgccacccaggagtccacattcccaggagctgtgcggagggggctgctggaggagtcgggatggtgagggggagccaggccagggcgagggcgccggagcgctggggagtgccgaggtctgtcccacggacccgccacgccgtggccaccacagagaagaagacggagcagacagcggcggcgggagaaggcctgtgcacaggactgcgggttacagcaggccgcgtatgcgcgccgcccggctccggcaccaggagctgttccggctgcgccggatcaaggcccaggtggccgaggccggcggagcggcgcggcggcggaggcgacggcaggcgcggcgggatgctgaggcgacacaagcccccgaaggctggcgacggctcaagtaccaggcacctgacatcacggcagcagagctcggagctgccagactcgccatcaggactcgaagcccgagggcaacatccttcgagaccggcttcaagagcttccagaggaggaatatgatcgagcctcgagagagcgccaagttcaaacgcaagtacaagggaagctcgtggagaacgcggcagacatacgccctgcatgtagc

SEQ ID NO: 645821 - DNA, 726 bp, Homo sapiens
  misc_feature (299)..(299): n is a, c, g, or t
  misc_feature (301)..(301): n is a, c, g, or t
  misc_feature (306)..(306): n is a, c, g, or t
  misc_feature (308)..(310): n is a, c, g, or t
  misc_feature (316)..(316): n is a, c, g, or t
  misc_feature (318)..(318): n is a, c, g, or t
  misc_feature (324)..(324): n is a, c, g, or t
  misc_feature (329)..(329): n is a, c, g, or t
  misc_feature (335)..(335): n is a, c, g, or t
  misc_feature (357)..(357): n is a, c, g, or t
  misc_feature (369)..(369): n is a, c, g, or t
  misc_feature (375)..(376): n is a, c, g, or t
  misc_feature (381)..(381): n is a, c, g, or t
  misc_feature (386)..(386): n is a, c, g, or t
  misc_feature (390)..(390): n is a, c, g, or t
  misc_feature (425)..(425): n is a, c, g, or t
  misc_feature (432)..(432): n is a, c, g, or t
  misc_feature (437)..(437): n is a, c, g, or t
  misc_feature (491)..(491): n is a, c, g, or t
  misc_feature (512)..(513): n is a, c, g, or t
  misc_feature (579)..(579): n is a, c, g, or t
  misc_feature (593)..(593): n is a, c, g, or t
  misc_feature (612)..(612): n is a, c, g, or t
  misc_feature (618)..(618): n is a, c, g, or t
  misc_feature (641)..(641): n is a, c, g, or t
  misc_feature (715)..(715): n is a, c, g, or t
ttgacccttcagttgatgttcttaaggcaacagcactccctttgttgaaacaatttgggattgatggtgaatcatttgaactgaagattgtgcgacggggaatgcctcccggaggaggaggcgaagtggttttctcatgtcctgtgaggaaggtcttgaagcccattcaactcacagatccaggaaaaatcaaacgtattagaggaatggcgtactctgtacgtgtgtcacctcagatggcgaaccggattgtggattctgcaaggagcatcctcaacaagttcatacctgatatctananttccncnnntccccngnaaagtntcaantcgggnaagttccccgggctttgggttngtcactcggttngctggnnacccnccatnggcncctttcctcatgctgaactggcctccaacccccangggccangggancagcaagtaccttccagaggaccttggcaggaactgtgcccggctgctgctggnagtaaatctcacaggggtggnntgcgtagattcgaccaaccaaagcctggcgctactactcatgacccttggacagcaggatgtttcnaagtcctgctaggncctctctctccctacacgnctaganttttttgcggaatttgaagagcntttttccagattatgtttaaaattgaaaccaagccatgtggtgaagaactcaagggtggggataaagtgtgatnaccttgtgtgg

SEQ ID NO: 645822 - DNA, 132 bp, Homo sapiens
ggtttggatgaaagtcgtagggtgattctatttctgctgtgatttatcagctgaaagctcagctggggttgtgcaaggctagggaccctattccttgtgtaatacaaggtctgaccagtgtcctggctccca

SEQ ID NO: 645823 - DNA, 870 bp, Homo sapiens
  misc_feature (24)..(24): n is a, c, g, or t
  misc_feature (52)..(52): n is a, c, g, or t
  misc_feature (96)..(96): n is a, c, g, or t
  misc_feature (116)..(116): n is a, c, g, or t
  misc_feature (124)..(124): n is a, c, g, or t
  misc_feature (132)..(132): n is a, c, g, or t
  misc_feature (140)..(140): n is a, c, g, or t
  misc_feature (150)..(150): n is a, c, g, or t
  misc_feature (152)..(152): n is a, c, g, or t
  misc_feature (156)..(156): n is a, c, g, or t
  misc_feature (184)..(184): n is a, c, g, or t
  misc_feature (207)..(207): n is a, c, g, or t
  misc_feature (263)..(263): n is a, c, g, or t
  misc_feature (289)..(289): n is a, c, g, or t
  misc_feature (294)..(294): n is a, c, g, or t
  misc_feature (320)..(321): n is a, c, g, or t
  misc_feature (356)..(356): n is a, c, g, or t
  misc_feature (361)..(361): n is a, c, g, or t
  misc_feature (364)..(364): n is a, c, g, or t
  misc_feature (383)..(383): n is a, c, g, or t
  misc_feature (414)..(414): n is a, c, g, or t
  misc_feature (429)..(429): n is a, c, g, or t
  misc_feature (439)..(439): n is a, c, g, or t
  misc_feature (443)..(443): n is a, c, g, or t
  misc_feature (460)..(460): n is a, c, g, or t
  misc_feature (468)..(468): n is a, c, g, or t
  misc_feature (555)..(555): n is a, c, g, or t
  misc_feature (560)..(560): n is a, c, g, or t
  misc_feature (637)..(637): n is a, c, g, or t
  misc_feature (642)..(642): n is a, c, g, or t
  misc_feature (665)..(665): n is a, c, g, or t
  misc_feature (670)..(671): n is a, c, g, or t
  misc_feature (682)..(682): n is a, c, g, or t
  misc_feature (684)..(684): n is a, c, g, or t
  misc_feature (688)..(688): n is a, c, g, or t
  misc_feature (699)..(700): n is a, c, g, or t
  misc_feature (705)..(705): n is a, c, g, or t
  misc_feature (707)..(707): n is a, c, g, or t
  misc_feature (738)..(738): n is a, c, g, or t
  misc_feature (752)..(752): n is a, c, g, or t
  misc_feature (759)..(759): n is a, c, g, or t
  misc_feature (761)..(761): n is a, c, g, or t
  misc_feature (763)..(763): n is a, c, g, or t
  misc_feature (770)..(770): n is a, c, g, or t
  misc_feature (772)..(772): n is a, c, g, or t
  misc_feature (798)..(799): n is a, c, g, or t
  misc_feature (804)..(804): n is a, c, g, or t
  misc_feature (832)..(832): n is a, c, g, or t
ttgggctccgggaaaccgttcggnctggggctttcggccacagggcggatanactcacacagtgggtaattcagtgtctagtattctagtgccgcncactttcccctattgcccantgcataancttagttnaactttcnatttcctttnantatntcattaaaaaaaacatcggctccaaatntaaaccactctacatccttttanaaaatttaggaaggtttaactgtgctaaacttggccggactaaacaggtgcagaantactcaaaccctaaattctccaaaantctanaacttaaataccgctttaaaaaaatnnaaaaactacactttgaaatctataaaataaaaaanaaaangcnaaaactaaagaataataanttcctatggggtactaaattttccctaaaanaaattttatccaacnaagtactaantctncccttaatgctgaaacntgaaaaancttctgggcgggggaacatcacggtctcaactcaggaattaaaagacaatcgtttaataaatatggaggtagaggccagaaacctanataanaaggacttcctgggaaaatcagatccatttctggagttcttccgccagggtgatgggaaatggcacctggtgtacanatctnaggtcatcaagaacaacctgaancctanntggaagcgggntncagnccttggtcatnnggtcngnggtgggaacccagcacacctatcctggggcnaggggccgaggagnacatggncngngtacatntncgcagtggtatggtcataccagcggnnttcancttcatgtagtcccgttttagtggtatncagctacccgtaaagtactaaaaaaaaaaacgataaaa

SEQ ID NO: 645824 - DNA, 610 bp, Homo sapiens
aaagtatttgctgaatggggaccttttgagttgaatttattttattcatttttattttgtttaactgtctggtgctttctgtcacctcttctaatcttttaatgtatttgtttgcaacttttgggcgtaacgactatttttctactgacgctactctctttccttctgcacagctttctagcggctcaactttgccctttttaactgaacatgctgaacgttatactgtggctatgcaacagctctcacctacgcgagtcttactttgagttagtgccataacagaccactgtatgtttacttctcaccatttgagttgcccatcttgtttcacactagtcacattcttgtcttcaagtgcctttagctcttaacacgttcactttcttacacgtgctatttactgacagtcattctattaaactatgcctaacacatacttacaatcggcatgtcttgcactctgatgtacttttatcacggttgcgctgcatgacacttctcatacgacttacagaacgtcgcggacacaacgcaacaaccccaccccccaaacccccccccccccaccccccccccccccccccccccccacccaccccccccccca

SEQ ID NO: 645825 - DNA, 391 bp, Homo sapiens
  misc_feature (38)..(38): n is a, c, g, or t
  misc_feature (66)..(66): n is a, c, g, or t
  misc_feature (68)..(68): n is a, c, g, or t
  misc_feature (91)..(91): n is a, c, g, or t
  misc_feature (93)..(94): n is a, c, g, or t
  misc_feature (98)..(98): n is a, c, g, or t
  misc_feature (114)..(114): n is a, c, g, or t
  misc_feature (132)..(134): n is a, c, g, or t
  misc_feature (143)..(143): n is a, c, g, or t
  misc_feature (145)..(145): n is a, c, g, or t
  misc_feature (181)..(181): n is a, c, g, or t
  misc_feature (187)..(188): n is a, c, g, or t
  misc_feature (193)..(193): n is a, c, g, or t
  misc_feature (207)..(207): n is a, c, g, or t
  misc_feature (232)..(232): n is a, c, g, or t
  misc_feature (260)..(260): n is a, c, g, or t
  misc_feature (268)..(270): n is a, c, g, or t
  misc_feature (281)..(281): n is a, c, g, or t
  misc_feature (285)..(285): n is a, c, g, or t
  misc_feature (289)..(290): n is a, c, g, or t
  misc_feature (295)..(296): n is a, c, g, or t
  misc_feature (300)..(300): n is a, c, g, or t
  misc_feature (302)..(302): n is a, c, g, or t
ttcccttcctgcaaaacaacgatgttcactccttccanattatccaaattgaagatctaccaaaananaaacaaaaacaaaagcccacagngnnatantaagggacaaaaatcncattctaatggggggggnnngtgcatttngnagtcttcgctgtgctgtcttaccatccttcagctgnctttcnnaaaanaaactccctaagcncatcaaaatatacattttccatttnctttttttaattatttatttttttttgngggggggnnnctttagggggntggnggtnntttgnntggntntttttggtgtcttgttcagcatttgggggtcaggaaggctatttgcagcacatgtgattaggggctactgatcttcagggtttagcttt

SEQ ID NO: 645826 - DNA, 290 bp, Homo sapiens
ccaggggggcattcctgtccacactatcacataaatttttagctgatactgtgctcacctgtgaaactggggaatgtatgatgatgactgggcagatcctgaaatgcaaccacacttgaccttctagaagctgaagttgggcactgaagtggtcctatcctgaagcgaaatccagggatttggtggcacacaccctgaagggtggttcacaaggtcctgaaacctaaggcaaaaggcctgccggggcatgaacagaacagaccgctttaaggggagccatgtaagtggca

SEQ ID NO: 645827 - DNA, 345 bp, Homo sapiens
ctgccactctcaaccgatgagagttccagttttccagccggctgcgatggttcacgcctgcggtccaagcactttgggaagccgaggcgggtgggttgctcaagctcaggagttggagactggcctgggcaacatggcaaaaccccgtctatagaagaagtgcaaaaattaagtgggcgtggtggcgcacacctatcatcccagctactcgggaggctgaggagggaggatcccttgagctccggaggtgaaggctgcagtgagctgtgattgaactgctgcgctccagcctgggtaacagactcaaaaacaaacaaacaaacaaacaaacaaaaaactctagtt

SEQ ID NO: 645828 - DNA, 118 bp, Homo sapiens
  misc_feature (61)..(61): n is a, c, g, or t
  misc_feature (67)..(67): n is a, c, g, or t
ccggacgagagtctgagctgtatagcagacatgtctgctgtctagggtcatgactgtgtgnctctanagttgcactcctcacagggctcaggtgatacccactgaagctggcaggaac

SEQ ID NO: 645829 - DNA, 364 bp, Homo sapiens
ctaattttttttgtatttttagtagagacagagtttcaccacgttggtcaggctggtctcgaactcccgacctcaggtgatctgcccacctcagcctcctaaagtgctgggattacaagctttgagccaccgtacccggcccgccttcaagtgttatattatgtgttggttcttcgttttttctgagatgaggtcttgctctgtcgccctggctggagtgcagtgccgtcatcttgggctcactgtaacctctgcctcttggattcaagcaattcttgtgcctcggcctcccaaatagctgggatcacaggtgcccgccaccacacctggctaattttgtatcttgtagaggacaggttttcac

SEQ ID NO: 645830 - DNA, 439 bp, Homo sapiens
  misc_feature (261)..(261): n is a, c, g, or t
ctgatgtgaagtgtatgtgttgtgtgtgtaggtgcctgtgtgtgtgtggaccatgcatgtgtgtctgtgtggaaactgtgagtgcatgtattgtagctgcactgtggttgtgtctggtgtgtctgtgtggaccctgtggtgtgtgtgtctgtggtgtgcaggtgctggaaggcaggctctgcaggtgcagctggagcttcaaagtgtgagcattgggccaggaggcacacgcgctggctgatccaggggagagaagtcgtntctgaggtttctggaaatgacagccattgggaagcaccacagcggcactcatccatgaactcaaccatccgatcacccatcagttcatgcagtcattggatacaggtttttgctattcatttatctacttacttttgtagagatgtggtctcactatgctgcccagactggcctcaaa

SEQ ID NO: 645831 - DNA, 487 bp, Homo sapiens
  misc_feature (230)..(230): n is a, c, g, or t
gctaaactgcaaatattaccctagaattaacctcttgtcctgtgtcaaaagtcttgttttgcatctggattgttaaactgtcagcttctctctgacagtctcgaactgtcaagacagtctcagttcacagccaaggtgatctgttaaccctccccatttccagggccaaatctcagttcttaagcacgtcgtttcttagcacggctttattttcatgctctttatttctntattttgtgcagccttacccctttaaagtccactgtgagtcctaccctgcagggcctcttaacacagtagagttcatgtgctactgatttggtgcctgccttcaaacacatgtgcaagttttgtggggttaaagatagcacttggtggcacaccacattggaagtgctgttcacccggtcatttgaaacggtgtttgaccacttggtgcgcaaatggcctatcggattaaaggatagccaaacccaaaaaaaaaaaa

SEQ ID NO: 645832 - DNA, 375 bp, Homo sapiens
agtacagatgcaggaaagtacagtgagggatagagaggaagccaggatgcgcaagatggagaggatgtaaggaggacggtgctgtgtactcagacaacggcaccctgggggacgccaagcttacctctctttgcaggaatagtatatgttagaaacacctggctgggtgcggtggctcacacctgtaatcccagcactttgggagcccgaggtgggcgaatcacctgaggtcaggagtttgagaccagcctggccaacatggtgaaaccccatctctactaaaaatacaaaaattggccgggcgcggtggctcacgcctgttctcccagcactttgggaggccgaggcgggtggatcatgaggtcagtatagata

SEQ ID NO: 645833 - DNA, 413 bp, Homo sapiens
  misc_feature (195)..(195): n is a, c, g, or t
  misc_feature (199)..(199): n is a, c, g, or t
  misc_feature (204)..(204): n is a, c, g, or t
  misc_feature (221)..(222): n is a, c, g, or t
  misc_feature (236)..(237): n is a, c, g, or t
  misc_feature (242)..(242): n is a, c, g, or t
  misc_feature (266)..(266): n is a, c, g, or t
  misc_feature (268)..(269): n is a, c, g, or t
  misc_feature (292)..(292): n is a, c, g, or t
  misc_feature (295)..(295): n is a, c, g, or t
  misc_feature (303)..(303): n is a, c, g, or t
  misc_feature (306)..(306): n is a, c, g, or t
  misc_feature (317)..(317): n is a, c, g, or t
  misc_feature (326)..(326): n is a, c, g, or t
  misc_feature (363)..(363): n is a, c, g, or t
  misc_feature (394)..(394): n is a, c, g, or t
cccagtggcagcctcctgggcagttacgagctggctggcggggacctggcaggtttattgggggccctgtttgacatgggcctaaaggagggagtgaggctgttgaggggtccagaaacccgagccaagctgcccagcacaagggtgaaggaagccagtgggtacgggagccagtcagtggagcaggaggcaaanaagntgggncccccccctgagccccnnggagggttttgccnngggcncccccagcctcaggtgcattgacntnntgcctgcccccagcccccttccnggnccccctgnacngggtccccccntatttcaanttttttttaaccccccccccccccccctcagttgggncaaataaaggattttcatgggaagggggggncccctccttccccccttta

SEQ ID NO: 645834 - DNA, 450 bp, Homo sapiens
tcggtctccgtttgctcggtctggaggagcgtgctgttactgggccctgtcctgtcctttcctcatcggacactgatgttactgtcactttagttatgctaaagtggtaggttgtcagcctccagaagacagcagagccttctagggtcgccttaagaataggtttagctgaggctgggtgtggtggctcatgcctgtaatcccagcactttgggaggctgatgtgggcggatagttgagcccaggagttcgagaccagcctgggtgacatggcaagtacactatgtctctacaaaaagtacaaagattagatgggtgtggtgtttacgcgtctgtagtcccaggtatttgggaagctgaggtgggaggatctcgagcctgcgagatcaaggctgcagtgaatcatgatcgtgcgctactgcactccagcctgggccacagagcaagcca

SEQ ID NO: 645835 - DNA, 138 bp, Homo sapiens
gtcacattaggcatatctttttccactattggtggaacatgatgttgtccagctccaacccctaaaataatttcctatggcagtaagagaaggaaggtagggatgcaggctccctatctgcacagcgaggggcattgg

SEQ ID NO: 645836 - DNA, 162 bp, Homo sapiens
cccggtgttttaacaaaaacacgcaaacagacatatgaaacacgacaaaaacacacaaaacaaaaaaccacaacctccatacaacccacgcgcacccacaccaaacctcacacacgtctacatcaacgaccaaacatcgctatcgaaggtgaaagacaggac

SEQ ID NO: 645837 - DNA, 367 bp, Homo sapiens
ccccgtttttaaaaaaaccccccccccccccgggggggttttttaaagggggccaaaaaagggatttttgccccccccaaagggggggcgcctgggggttttggggaatggggacccccttgtttaaacccccttccggttttttttggggggaaaacccctttccccgcccgggggggttttaaaaaaaggggggtggggtttttccgggaaaaaatcccccggaattcccccgtttaggggttttaacccttttccgccctgggggaaaattttttttgggggttaaaccccctttttttttgcggggaaaaggggtctgttttttttttccccgaaaaagggggaaagggggtccgggccccca

SEQ ID NO: 645838 - DNA, 659 bp, Homo sapiens
  misc_feature (353)..(354): n is a, c, g, or t
ctggggtgggtgccctgtgtcctgtgggcgagctcgagcagccaaccccggtgcgcgtcggggccatggactggcctgagtgcagctgcgtggagcacttcctgtgagcaaatgtgaacctggtcaccgaagtgctgtggtggcgctggaggccaagacctgtgggtggagaagctggtatcttggctgcagtgagccgtcactctgctaagcctgtatcttgctgttcgtgctacgtgagcgtctctgctgtgcaatctcatctggattttgtgtacccctgcatatgcctcaatcaaatgctatctgatgatgcccaatgcaatggactgactgacacttgtgttggctcnnacctacttggtgtgtgttgtactgaccctgttttggtgcttgtgcctgatgttctttcatgctgcatctaactaccttggtccttgtgatatccctttcccctactactgttgtgtgcaatggtggctagccttccttgtttgttccttgcattggcttacccagtggccctagtgaactgtgggtcatctcatgcttggtatcagcgctgtctgtgctgtcctgcttgttcctaatggcaccacgttggcctgtagacatgaatcatgaactgacctcagcgggcgagccctggactgcggcgg

SEQ ID NO: 645839 - DNA, 412 bp, Homo sapiens
catataaaatacatgatttgcaaattattttctcccattctgtgggctgtcttttcgctttattgatggtgttctttgaagcacagaagtttttaattttgatgatgctaatttatctatttttgtctcacttatacttttggtgtcttatctaagaaactgtcatctaatccaagatcatgaagaattattcctatgttttcttctaagagttttgtagttttcgcttttacatttaggtctatgactcagtttgaattaattgtatacatgatgtgacagagaggtccagcttcatctctggcatgtagatatccagttgtccaagcataatttgttgaaaaaactctgctttcccctattcaattgtcttggcatttttataaaaaataaaccgcatatctatgtattt

SEQ ID NO: 645840 - DNA, 580 bp, Homo sapiens
  misc_feature (526)..(527): n is a, c, g, or t
  misc_feature (532)..(532): n is a, c, g, or t
  misc_feature (550)..(552): n is a, c, g, or t
  misc_feature (555)..(555): n is a, c, g, or t
taagttcgcttttgaattaactttccccaccataatcttcctacgaaaaaagttaatccctaaacaaaaacagcctgttgtactcacctgtttccgggaacctctcaactcactggcttgcctaaggctccttgtcccccataacagtgttcaaaaaacagcccctcggaatatgttcaacatttgctctcctgtcatggtaatgcctctcctgccaatggtggaactcttccccgtggtaaagcataatattaaactccgggtaccttcccctactaaaaaaccctatgcccctaaactgtaacccccctccagcacaaaataactgggacaaactcttaaattccacctatccggaattgtacaaatctctctgtaactacctttgtaactgtcctgtggtttctcccaccattcctttgtttttggaagaacataattggattaatgccctgaaaaaaaggttccaaaaattccctttttgttcctcccatttaaaaaataaacccttttaatttatccgagnntgtcnctggaactcaatcaactnnntcnccttggtggtcatgagtacacaaga

SEQ ID NO: 645841 - DNA, 238 bp, Homo sapiens
ccgaccagcaggtccacgtcaacaaattcaccaatgtgcaaacgcggcccagcctgccaggcctgttcgccgccttcctggccataccgctcgccaatcagcgtgagcttctctgccaactgatattcgaaccccgtgccccaggtcaggcgatgttgttgatcaccgtcgttgtaggcgtggctccagccggcgttcaggttcaggcgcaatgcatccaggggttgccatgtcaggg

SEQ ID NO: 645842 - DNA, 881 bp, Homo sapiens
gactggctgctctgaacaagccatctttgcattgttcctcatccgtcctccttgctcgccgtcagccgcctccgacgtgcgccttcctccgccgccgcggacatcctggcagctttatcgccagaggtccctgtaactctcgctttctttttaatcccctgcatcggatcaccggcgtgccccaccatgtctagacgcagcccgtagaacaccatgctccagatgatcacctaccagaggacttaaaggagaagaaggaagttgtggaaagaggcggaaacatggataggagacgcccctgtctaacggcgaagtggctaatgatggaagcactggggacgcaggaggctgacaatgaggtagacgcaagaagaggacagcaaggttcgtggggatggcactgaggaggatggaccgaagaccggtgactggtgaggaagcaggatggcatgcatgaaggactgaaggcaagctgcagttcagccttacggggcgaaggccggggcccaggcttgcaactgattgcatggaggggactgaaaccgattggtcgacttaacccacatgaaaggtcacgaaaggcaacccgagcgcagggcattgacgtacgaccgcgtccgagcatcgacagggtcacatacgagggtttcaaatcagccgtttaaaacagtatcaaaaacatccagggggcccaggtcgctgttgggcaccccattaaatttgcatacgccgctgtctcaaacttatgtgccccccacggtctgcccttcagagaacaactcctagacaaacgcgcgtgtgaagactcacaatcccgcgcattaccatgcggggaccaatctacgacaacagcataggcggggccccccgacggacccgcc

SEQ ID NO: 645843 - DNA, 1041 bp, Homo sapiens
attctaccttcacacacaaaaagttaaaaaaaaaaaaaaaaagactatggaactaaaaacagtcaacgggttgtacgtataagggtaaatccaggagtgcaggggtttactaatatatccgggtttggaaacctctggttcgaaaacaaaaggtttggagcaatcaaccaaaatgggttccttttcttttccggtagatgttctggacagattggcaggggcattcgggctcacggggctagtatgtaaaaagggtgtggtttacacgagggcaaagagaaaacattggctattcagacagtggccaaatagaataattatagccacaaattacgtgtacaggggtgcctgggcacaagcaaacctgtgagaaacggtgttaaaaaaaaaaaaaaaaagtggtgttacaaaattttaaacaaaaaacttttgtggcgaaatttagggccctgtgttggaccattactggggaatggtaaacaggggacttatatattggaacccaaaagggggctgtcaaatattgggggggtcttacagagaataagaggttcaaaacatcttgaagtgttaagggggccacaaattgtgggacaacagcgggggaaacatatggcgttaagtgtatttacagtggccaaatataatggcgttagaaggtgtgtccatcaattaaagagcttaaaagtcgtggtgttttaaccctcgaagggggacttatatttgaaacccatttatcgttgttttgtaagtgaaaaatcaggtgtggtggacaaaaaatttggggagagatttttaagtaacacacaatggggaccacacctggggggaaacaaaagaaaaaaacagaaacaagaagaaaagaagaaccaaaaagaagaaggacgcaaacaagaaaaaaaagagaacacaagaaagaaaagaagaaggcagagacaggcagaagcacacacggagcgacgaaagcgaaccagagaaggaggacgaagcgcagcacgcccagcacaccagaaacggcacagacaagagacagatcacgag

SEQ ID NO: 645844 - DNA, 380 bp, Homo sapiens
  misc_feature (247)..(247): n is a, c, g, or t
gtccggtggggcctttccaaagtgggccccgttttttgggggcctgggggcctgtttttttccatggttttggggggggaaccaaaggccccccataaccttaaggggggctgttagaaaaccgggttttcctttccccccgtttttcaaggggcccttccgtggttaaaaaccccggccgggggaggggtgtgggcccccccccttcctttggggtttggggtgggggaaagcaaaaagggccttnggggccccaagatttttgttccggccccggggtttttgggggccccccgctttcccgttatacccaggggggtggggtttccgggtttgttccttttgaaaaatgggaggtttgcctttgggccctggccgga

SEQ ID NO: 645845 - DNA, 368 bp, Homo sapiens
tgccacacagactatgatggcataacagacaggcgaaatggggtatgtgagtaaaagccctttataaatcaaaataccacataccggctgggtgctgtcgtcacgcctggaatcccggcactttgggaggctgaggcaggcagatcacttgagatcaggagttcgggaccggcctggcaaacatggtgaaatcctgtctctgctagaagtacaaagattatctgggtgtggtggcgggtgcgtgtggttccggctgctcgggaggctgaggcaggagaatcgcttgggccagcggggcggaggttgcagtgggctgagatctcaccactgcactccagcctgggcaatagagactccgtctcaaaaaa

SEQ ID NO: 645846 - DNA, 179 bp, Homo sapiens
taaccaaagcatgttagcacttggtctccagcatgctgtcaccattccaaccataagttggcaccaatgctactgtgtcgtggttgtagccgattttcttaatgttagtgctgacttccttcccaatttcctcatatctcttctggctgtatggtgagcccagctgatatcccacgtcg

SEQ ID NO: 645847 - DNA, 979 bp, Homo sapiens
gcctggacaacaagagcgaaactctgtctaaaaaaaaaaaacacacacacacacaacacaatgttttcacgcctgtaaacctagcacattgggaagccaaggtgggaggattgcttgaggccaggagttcaaggctgcagtgagctatgattgcacactgtactctagcctgggagacagagttgagacactgtctctaaaaaaaaaaaaaaaaaaaagtttttggaccctttaaaattactttgtgtttggaatttccataaacttcttcatttcaacaagagcaggtaaaaaaggggttgctgtgctcctttgtacaagcctactttaatttagactattacgtgaggattttttaaagacgcctgaaatcactgtgtgggaatacttgtgggtactaacagttaattttcatttgtgttctattgtctcccccagcttattaattttccttacccgtggaaaaaactgccctgggctcttgagaactcgtgccgcgtgaatagaaaaaattctcccttgtgctccttattttttaaacacaccaacactttttctagaacaacactaacgctgggttaacacaggctttcacgactttttaacaaccttccgggcaacaagctttttaaaacattccccccaagagggaaaattggtcccccttcattggaaattgtgtcgattggacaccatttcaactggccaacctactttcgtggtgggaaatttccccataatttaccctggcttcaccccagaagtcgaacattttgcattcggccaaaaaagcagccaaagaactcctccattcaacattttcgagaggaacccgctcgttatcatgtgtcactcggacaatcaaacgcacctctttttttatgggtgccacaaaacacagacaacacagccaaatgcaacaaaaggagaagtaacacaacacaacaagacaccacacaacgacagacaacaagaccgc

SEQ ID NO: 645848 - DNA, 226 bp, Homo sapiens
actcggcactttcttagaatagacaatttgcaaaatgtccatcccaggttcatccttgtagcctaatgtttccgtcaccgttgccactagttaacgtgggtgaactttatctgggaaacgggtaacatccgcgaccacaactagaccatcatttgacgtaatgccatcagcactcaccaaaacttggccaaccaacagcctttccgtaactgagtttgatttctcc

SEQ ID NO: 645849 - DNA, 80 bp, Homo sapiens
tctttctcttgagtcattttatttttatcatggactagtgcgtgctccgtgtccaccccaataaaagggtctttcctaaa

SEQ ID NO: 645850 - DNA, 332 bp, Homo sapiens
gacaggtgatcacgaggtcagagctcgagaccggcctggccatcatggtgaaaccccgtctctactaaaaatacaaaaattagctgggtgtggtggcacgtgcctgtagtcccagctactcggtaggctcagtcaagagaatcgcttgaaccagggaatcaggttgcagtgagctgagatcccaccactgcactccagcctggtgatagagcaagactccgtctaaaaaaaaaaaaccaggagtgagaaaaataagagtcattgaaccttacatttttttaaacaaacgaatatcactttgctgtcctttccaatatagcatttccccaatt

SEQ ID NO: 645851 - DNA, 410 bp, Homo sapiens
gattgactaagacctgtgttccgcgtcatcaagacgatgtatcacgttatgcggtcactgtatcaccattctcagattgcggaagagctgcagctgccccgctttggctcacaaagtttggtcacttaatggtccacagtgtaaatccgctattcatcatgggggctccataagttgcagcacaagttatagggttccagtgatggtattatccgtacccaatgatgtcttccactaggcattcaggtagacagcattgagcagctcaagaccaaaatctgaggtcatactgtctaatatccgcatgatcctgctgttagtgttcttgaacactctcatattgttgagatccaagttggcttcacaggtgttgcgtaagactgtagctcaccatctgtacagcatcagac

SEQ ID NO: 645852 - DNA, 311 bp, Homo sapiens
cagacttctgtcaccagaaaagatactgggttcactggtttgctaaagatttctcatccattaagcagaccacccacttcaacgttccttgtcccaagtatctaagtaagataatttctactctcaggtgacagagccaaaatgtctaataatattaaaagtccacctaccaggtgagctcttctacttcataaaggcacaaacaaccatttcatgagcatgagctcactcccaatgaattaattttggtctaaaaacaaatcccacacgggctccagagtcacctctccactccttctcagctcacctgc

SEQ ID NO: 645853 - DNA, 271 bp, Homo sapiens
caaatatatattctttaatgtattcagtcagtacacaatcctttataaaagtagtatatatatttttctgtcaataccttcattacatttataagtacaagatttacacagcaccccatcaaaaaaaaaaaaaaataaaaacccttaacaaatatctacttatactgcatacctataaaacttccaagggggtgctctgtaaagggggggccctagtaaagggcccattaacgggtgcagcaatatacatataaatgtaatgtaagagata

SEQ ID NO: 645854 - DNA, 291 bp, Homo sapiens
gtaaaacacaattgaaagaatgtggtcgccgctgacgacggttctcacattttgtttatagctccagttaaggttctgatccaacatctcgatgcatactagggttaactcctttgtcatgcgccccattctcttctcattcatatatgttttccgcgaatttagttactgacctctccgcaaactcagcccgagtctcagcctccttcagacttgtcggaaaggaccttgatctcttcctcatatctgtcttccttctgcgagtacttctcagcctgagcctccagtgac

SEQ ID NO: 645855 - DNA, 439 bp, Homo sapiens
  misc_feature (386)..(386): n is a, c, g, or t
ctgctccgcccctctctggtgggcaggggcgggggtcacaaggtgcttagtcggggagcttctgagccaggagaaggaaattcacagggttaatcactcagttaaggtggggcaggaagtaatcacaatggtggaatgtcatcagttaaggcggggcagggccttttcacttcttttgtgattcttcagttacttcaggccatctgagcgtatacgtgcaagtcacaggggatgtgatggcttggcttgggctcagaggcctgacagaaatcggcttttaatgaagctgacttttaaccatagagttctaaaaaaattctttccaatctctcactatcatattttagctggaacagttgatatttcaaaagtcacacaaatatcanaccagaaaggattcattctctgagccaggaattgaacccagattgccacagag

SEQ ID NO: 645856 - DNA, 120 bp, Homo sapiens
tgctcttccagccgctgaagtatccatactccctttcaaagtctctctccactgtttgggcacaatctgttatcttgggctgcccaatcttaaacggaatccagctcatggttgtatcga

SEQ ID NO: 645857 - DNA, 507 bp, Homo sapiens
  misc_feature (375)..(375): n is a, c, g, or t
ggggtctctcaggtaagccaggctgggtctcaaactcttgacctggaggtgatccaccggccttggcccccaaaaggctggggattacagggcgtgagccaccacacccagcctagctgccatttataaaggggcccagggtgcgccagacccagtgctcaccagctgggcatagtagtcctctgaacaggcctgcgaggtaggtatggatcatgccggtgttaaaggtgatgccacgataacagctaaggctgtagagcagttcggtggtaaccacggtgctaaatactgggctggtgtctccgtttcatcaaagccacacccaagaataggagggggttcttactatttccattttacagaggacaaaagtgnagcagggagataggtggcttacagtcacatagcaggagggcagagtgggcactataacccagtctctgacccttaacctctctaagcttttcacctgcgccttatcatgcagaaatagaggttcacaaagat

SEQ ID NO: 645858 - DNA, 139 bp, Homo sapiens
cgctctcaggctcagggaggaggcatttctccaagtctgagagtcatggcatgctgccccagccaggttgcaacctgctcaatgggacacaggaaatagggcccgtgggtatgactgagaactgcaactaggaaagatt

SEQ ID NO: 645859 - DNA, 199 bp, Homo sapiens
aggatcccctgctcttccgaccctatttcactcagaaatatattgtacattttctctccataattccatccacctgtctgaacaagtgaaaataattattgtgccacattttctactgtcttgacaaagattactcctgatttgcttccccaccccaaataagctaaagagagctaaaggggcccacgcaagatcagga

SEQ ID NO: 645860 - DNA, 442 bp, Homo sapiens
  misc_feature (85)..(85): n is a, c, g, or t
  misc_feature (155)..(155): n is a, c, g, or t
  misc_feature (184)..(184): n is a, c, g, or t
  misc_feature (187)..(187): n is a, c, g, or t
  misc_feature (442)..(442): n is a, c, g, or t
gcgtctgttctagtgtttgagccgtcgtgcttcaccggtctacctcgctagcatgtcgggccgcggaagactggcggcaaggccngccaaggccaagtcgcgctcgtcgcgcacaggcctccagttcccagtggccgtgtacaccggctgctgcngaagggccactacgccgagcgcgttggcnagnagccagtcgtacctggcggcagtgctggagtacctcaccgctgagatcctggagctggcgggcaatgcggccggaacaacaagaagacgcgaatcatcccccgccacctgcaagctggccaatccgcaacgacgaggagctcaacaagctgctgggcggcgttgacgatcgccagggaggcgtcctgcccaacatccaggccgtgctgctgcccaagaagaccagcgccaccgtggggccgaatgcccttcgggn

SEQ ID NO: 645861 - DNA, 1083 bp, Homo sapiens
  misc_feature (278)..(278): n is a, c, g, or t
agcgggaggatttgcctgcaggcaaggctagtggcctgtttgactgcgttgctgtcgtgagatccgagacgacggagaaggtccctcttatttaccgaccattgaaagctcctcgccccgtcctccgttagctaattaaggaacatttttcatgggacagtagccatcctagagacattgccatgtattgttccgagttgactctttccgatctatctactgagtcccttcgggagctgagttatggtcgacgagctgccgttgaattacttgtggtnccagtacagttggtggcggaaccgaggttgcagcacagcgcagccagtcgctggctaagatggcctcccgtcgctgccttggctagcgatctgcaccagggctggtgttgcactacccaacgattgccgtacagtttaccacttacagaagccctaggtgattctgcggatctcgagcccagaaattggctaggtgggaagcatgccaagcgtaccctggcgaacaattgtttgcgagatctggtgagtaatccgacacttgactgaggccaagttctgtctgtccaaccgcagacattaagctactggcgaaggccatattccgccattaatcagctctggatacacatgttggggtggcgcctcacaagagttcgggcaacatcgcgaacatgacgacctgaagcatacggattttgaccttcgttctcagctgaccaggatcgaggtaccgtgtactcttgcaggcgatacttgactggtagcaccgagtgtgaaccttggcagtccacgccttgcaattccctggatcgatccccccaacattagggaacgaaagactggcctcttccttgcggaactttgtgccgttatcccttaaacgggacgcgacaagaaaagctttgggaaaacgctccatgggttggaacccgttggggcgttatttccttaaggaacacattcaagaatttacactgcctcttggccggtaggtacaatgggccaccgacacttgttcctagccatgaaatggagcaacagttacttctgcaggaaccattccctgaggcaagcctaaacgatg

SEQ ID NO: 645862 - DNA, 138 bp, Homo sapiens
acggattgagtagatctgacatgcacagtctgctcaacttgactcccggttcaaactggcagttcaaaaactagtacagaaagttggattttttggcaattttggcctgtgcttcaggttccaaatcctttatttgat

SEQ ID NO: 645863 - DNA, 621 bp, Homo sapiens
tctcccccaccccccccgtgggggggccccgcgccccaactctccggcccccaaggttttttttagccctccccaaaaccaaggggcgggttttttttccccccaaagtggggcttcccggcaattttttttcaacaaaaaaaccgggttcttggttgacgggcttttttcccccctcgtctgaaaaattgttctcctgtttaaccccccccccccccttggcctccgggggtaccagagtgcgggccccataacagggtgtgggaaaaggtttttcattaatttgccccccccctttgggtggggggggccccgcacgccctttttccccccccctcttcctttgggggggggagattttcctcattaggggcaagcggccctttttttatgttgggctgggaaaagtttgttcaccccccttttttaaaattatttccaacaaaattttcccagggtttttgttttggttaggttgttttcaaacagggcctgttaacttttgtttggccccggttggggggggggaccaaagccaaccgaaaatcccctttggggggccccccggttagcgggttgccttttccccttaaaccgtttttctttgggaaaaattcagga

SEQ ID NO: 645864 - DNA, 649 bp, Homo sapiens
agcgactgtgtatagtgagacttgtgctacttaggagaagcaggttaccttattgaaaatgaggttgagttgcttccgtttctgatgcattgatttttgaagatattgttttcccccttcccctcttggtcagaatcaatctctttgcgtgaaagtaagaaccgcaggagtcgagttcaggttctggtcctgctacagattctatggtaattttaagtttgtccattcctcatcggagtcctacgacatctcgcctcctcctgctatggctggaggtatctgtgtcctttaaatatcgtggatgcaggacctggtcctcgacatgtgtggtagagccatggacctttgcgcttcccttactcgtccttgagggtttagaaccatgacaccaatcactatccagcgtacccggccctagcttacggtgcgggtgatgcggtcgaccctgcagaatagacttgcacttttcattcaggaaccaagatgacgcagctcagtactggtgagggtcactccctcccagaagccccggtctggacgagccattgcctgacctcttcggtgctgaccttcgccaaaagtgatgccttactggttttgtactaactgtgttcattttacataagtgtcgtgcctgcctggggttgtt

SEQ ID NO: 645865 - DNA, 308 bp, Homo sapiens
cctccacagctctccaatgccttcagacaaatgttttttggtatgccatcagcgttcttgttctctttaagaagattggtcctctgcaagctctctaagaaacagaagcccctttctattgtgtttgaatcattatatattttggggtctctttgttaccgcaagccaccctaccctaaataatacatattctatcagcattttaatatatttttaggagaaagtggcctgcaataactatgcttctaggatgttgcaccaaaggtcttacattgattaaaataaaacatatgaatgaagtaactcta

SEQ ID NO: 645866 - DNA, 670 bp, Homo sapiens
  misc_feature (267)..(267): n is a, c, g, or t
cgtaccaccaattgtcagcccgtgggaatttccccagggagcgcgcgtgacaaaaaacgcgggtccctcgggaaaaataggccaaagttgtgtggaagacccgggtatacaggggacgatatccagccggctcacaagggtcctaaacaaccgaggcgcttgcgaagctttaggcgccccccccttgggcgttcgctaaataagccgcctcctggggagctttctctcccccggcccaaccaccacatgtttcttggcgacccaccncctgcctgggccccttatagtttcacctgccgatgcccctctctgtccccagagggacatcccaacctgtgggtcatcccccgagactcccgctatcccgtgtgtgaggccagttgacaatcgtgtgttcttgtaggtgtagcttcgccgccctttttctcccgggcgcagttatgcgtgtatgctggcgccccgatacaattccccgcaagctgcgcctccttaataaaaagagtcttggaatcccgccaagattccttctattcgagtccccttacatcacactcttctcccaccaccggaaaagttgtcttttaaccccccaagtactgcgcggtgtagtaatcgaccccccaatagaacagacttccattcttccgccccccaacaaagaacaaacaaa

SEQ ID NO: 645867 - DNA, 344 bp, Homo sapiens
atcttcggaaaaatccaaaattaccagagaaccctcgtcctcagcccggcgcagctcaattcggccgtcgggcagttcaacaatttccagaaaggacgttggcataaaagtctgttctccacgaaaggccggcattatatcagtcatcagcgcggcctcgctcaggatctgaacagctttctttacggcttgatgaatggtgcctgacttaactcagcactcgttcagcccatcccgaaaacgaatggccaacttcttcaactcctgtcgccagctttccagctcttcacggcttaatggcgcaggcccctcttcttccaggctcacggccaggatcagctgcg

SEQ ID NO: 645868 - DNA, 107 bp, Homo sapiens
acatagaatgagagaaaatcagcatctcaggaggtggcattaggatgactgtgttaccccattaccttttagaagccaacatgtaggccccattaccatgctggact

SEQ ID NO: 645869 - DNA, 947 bp, Homo sapiens
ggagagtgtcggcacagcacgcctacgatgcgcatctgataactgtataatcgtgtgagcatattgtccagacgatcggctgtacggaagggcaccagtgcgacaggaccgaggtgtaaagatggagccgttcgccagggcgggagcgttcgtgccacggtcatgtacccgtcatactcgggtagcgttctatgcgcagacaacggaagactgtgctcgttccaggaaagatggaatactcctacctgcgtgtctgagttgccgtagggacagagatatctgctaatgtacgtatgtgcctgatcacgaccctcttcgagagtggtgacacgagcatagagtagcatgaacagtggacatcattccccaaaacctcaggaacgtagccgtgattattggtagacacaaggacattggcatgaccaaaagtctgactctcgagtacaataactttgggagaacgattagccaagtctaggtacataaagcattcaatgtgaggctcgttcagggctggtagctagacatctcgctatgattgggccagtataggtggttggcgttgtattctgcctacttggtggcagagaaaagtggtttgtgatcacaaagacaaagatgatgaactagttatgcttgggagtcgtctgcgtggagtgttccttcgccggtgcgtgctgagtcatggtgagcccatggcaggggtaccaaagtgatcctccactcttaaagaagatcagacccagagtacctaagaagagaggcggggccaaacaacgtagtggcaagaagcgctatccccaggtcacacaggctatcccatcacccggatctggagaacggcaccgccccgcacggcgaactcggaggcacgcggcccacgccgaaaccgcgcgcacacacacgccccaaaactcgccacgcaccccccaccacacctgggccac

SEQ ID NO: 645870 - DNA, 436 bp, Homo sapiens
  misc_feature (411)..(411): n is a, c, g, or t
ttggagaccagcctgggcaacacagcgagatcctgtctctataaaaataaattaaggtatttttaaaaatttaaacgatcccttcttagccaggcacggtggctcacatatgtaatttcagcactctgggaggccaaggcaggtggatcacgaggtcaggagttcaagaccagtatttggccaacatggggaaaccctgtctctactaaaaatacaaaaaaaagctagctgggtgtggtgtcaggtgcctgtaatcccagctactccggagatccagccaggagaattgcttgaacccaagaggtggaggttgcagtgagccgggattacgcccctgcactccagcctgggcgacagagtgagactctgtctccaaaacaaaacaaaaacaaaacaaaaaaccgaaaaaancccaacagtttcagagatgaaaaaa

SEQ ID NO: 645871 - DNA, 162 bp, Homo sapiens
acggatgcgctggtgacagctgatgaaggtagaagtaggtgccccaggagatctatgcagatattggggggttggagaattccattgcatggacattctggactctgtggagcttcctctcacccatcctgagatattatgaagagatgggtataaagcctc

SEQ ID NO: 645872 - DNA, 133 bp, Homo sapiens
tggtacctcacatcggctacggtcagatcggctaacgcgacccccccgggatacagcagttattaacctttagcaataaacgataagtttaactaagctatactaaccccaggggttggtcaatttctgggga

SEQ ID NO: 645873 - DNA, 226 bp, Homo sapiens
ggggtccgcatgctgtactcgtgaccattgtgtggcagttatctcctcactgtttccctcctgctctgccatgctaagacatgcttgctcccccttcgccttccaccatgattgtaagtttcctgaggcctcccagtcatccttcctgttaagcctgcggaactgtgggtcaattaaacctcttttcttcataaattacccagtctcaagtaattctttacagcag

SEQ ID NO: 645874 - DNA, 168 bp, Homo sapiens
ttccttgggacatattcccaagagcaaggtcaaagcataaagcatcttgtagtctcttgtcttttttagtttttgagacagagtctcattctgtagcccaggctggaagtgcaagggcacagatcttcagcttactgcaaacctccactatcctagggttcaaagcga

SEQ ID NO: 645875 - DNA, 185 bp, Homo sapiens
tcggcctggtagcctcacatgctcttcatggtgcatcccgagtaccggcccacgcgccctgccaaccagtttgtgcccaggctctccggtttcaagatccatccgatggcctaccagctgcagctccgagccgccaggctcttcccgatcccagtctcgatgcttcgctgattccctcccccacc

SEQ ID NO: 645876 - DNA, 909 bp, Homo sapiens
  misc_feature (418)..(418): n is a, c, g, or t
  misc_feature (822)..(822): n is a, c, g, or t
agcgggggaacgctgctcggtgagcggcagccatgacgtattgctgcttcctcgaccgggcggcggcgcggcggcggtccggctgctggcccagtctgctgccctgctgtgcggtgacggtgtgtgtggagctggcgctggcctcgcagagcgtgcttggtgtcgccggacgctcacaccgtagtggagaggcgctcgagccaggacggctggagtcgagaagtctaccttgcgtcccatcgagggtgcggaccgattcgtagtgatcctcacgcatgtgaccgggaagcggaacgatccctatgaacgaggaggcggagagacataaagcgccagaagacgcttgggattgtcgttcgagtctagggtttcatagtactctcgcttcccccccatgacatgcacggctgcatgtagnccactggagccaagtcgcctctgagcaaatggaaacgtcactatcgacccagaaattatgtacattcccaaatgccatgcatgtctagccacgtaccgagcctacgtaggctttccacccatgaggcgagagaaccattccatccaaaggattatggaacccgaaaagaaaatgattggatcaatcaaaactgggcttagacaaaggtggatcatgacgtataaaggtggcaaacagacgtaacgcgcccgttaacagatatccctcccagaggagaaaacctccacgagtcagtagaaagtggcaaaaacccaaacgaatcacagagtgggctctttgggtaagtgaggcacacacaatcgcggccttaaggaagaccctcaggagcgcctatgtcaaaaggnaaaaaattgcctttttttaagcgacaaacttaagcggggcttgccgtgaaaatgagggaggaccctttttccatttaatccctgcca

SEQ ID NO: 645877 - DNA, 424 bp, Homo sapiens
tagtatcagtcgtaccatcacgcccacaggacttaatagcatctgaattttttttattttatttttggtaaagtgggggttacagtatgtgggccaggcgggtcttgaattcctccgggcttcaagggatccacccaccagcggcctcccaaagtgcggggataacaggcgtgagccattgtgcctggcaaatttttggtatttttggtaaagacaaggttccaccatgttgcccaggctgggtctcaaattcctgaccttgagtgatccatttgcttgggcctggtaaatgtgctggggattacgggtgtaaaccactgcccccagctgtttctaaaattctggctgaaagaattatgtacgcaaatactacaatgtttacagccaaattgtttgtcccctactcagtccttgggggcgtgag

SEQ ID NO: 645878 - DNA, 156 bp, Homo sapiens
cccggccccttccgcttggcggaaaggagtttggccggggtttaaacccccccagaggccagaggcggcgcgccacaggaaacccggacccccacggccccggagccccgggcccccggattccccgcgcccccagccggggtttccccggggccg

SEQ ID NO: 645879 - DNA, 819 bp, Homo sapiens
  misc_feature (201)..(201): n is a, c, g, or t
  misc_feature (456)..(456): n is a, c, g, or t
  misc_feature (465)..(465): n is a, c, g, or t
  misc_feature (481)..(481): n is a, c, g, or t
  misc_feature (499)..(499): n is a, c, g, or t
  misc_feature (504)..(504): n is a, c, g, or t
  misc_feature (522)..(522): n is a, c, g, or t
  misc_feature (532)..(532): n is a, c, g, or t
  misc_feature (579)..(579): n is a, c, g, or t
  misc_feature (582)..(582): n is a, c, g, or t
  misc_feature (592)..(592): n is a, c, g, or t
  misc_feature (614)..(614): n is a, c, g, or t
  misc_feature (621)..(621): n is a, c, g, or t
  misc_feature (624)..(625): n is a, c, g, or t
  misc_feature (628)..(628): n is a, c, g, or t
  misc_feature (632)..(632): n is a, c, g, or t
  misc_feature (635)..(635): n is a, c, g, or t
  misc_feature (638)..(639): n is a, c, g, or t
  misc_feature (648)..(648): n is a, c, g, or t
  misc_feature (658)..(658): n is a, c, g, or t
  misc_feature (662)..(662): n is a, c, g, or t
  misc_feature (677)..(677): n is a, c, g, or t
  misc_feature (681)..(681): n is a, c, g, or t
  misc_feature (683)..(683): n is a, c, g, or t
  misc_feature (686)..(686): n is a, c, g, or t
  misc_feature (703)..(704): n is a, c, g, or t
  misc_feature (724)..(724): n is a, c, g, or t
  misc_feature (729)..(729): n is a, c, g, or t
  misc_feature (735)..(735): n is a, c, g, or t
  misc_feature (784)..(784): n is a, c, g, or t
gtgctgaatctcgtcagttcaccatccgccctcggcttccgcggggcgctgggccgccagcctcggcaccgtcctttcctttctccctcgcgttaggcaggtgacagcagggacatgtctcgggagatgcaggatgtaaacctcgctgaggtgaagcctttggtggaaaaaggggaaaccatcaccggcctcctgcaaaantttaatgtccaggagcaggacatcgagactttacatggctctgttcacgtcacgctgtgtgggactcccaagggaaaccggcctgtcatcctcacctaccatgacatcggcatgaaccacaaaacctgctacaaccccctcttcaactacgaggacatgcaggaaatcacccaccactttcccctctcccacctggacccccctcgccaacaggaccgcccactccttccccccaggaacatttacccctccatngatcaactngctaaaatacttcctngattccttcaacaatttnggctnaaaaacattattagcatnggaacaagancaagcacctacatcctaactccatttcctctaaacaaccctaaaatngtngaaggccttntccttatcaacctgaacccttntgcgggnggnnggntggnctnggnngcctccaanatctcaagangganccaaactctcccggncatngnggngtcccacctttttgggnnggaagaaatacacagtaacntggangtgggncacacctacccccagcacattttgaataacatgaaccccccgcaacctncaccttttcatcaatacctacaacaaccggcgcga

SEQ ID NO: 645880 - DNA, 324 bp, Homo sapiens
cgggagtgggtggatgtgttttgggcagtcacacaccgaggtagtcataatgataggcagaagactgggagggggtggatgtgttttgggctgtcacacaccgaggtagtcataatgataggcagaagactgggagggggtggatggaagtgagctttgaaagtatgattatttttgtattgttgaaacaaatccagaacatgaaataggttttgtttcatataattaggcagctgcactcagataatccttatgatggagatataaaagctgaaagaagggatgatgagggaaagaaaggtcgacgcggccgcgaatttagta

SEQ ID NO: 645881 - DNA, 172 bp, Homo sapiens
  misc_feature (129)..(129): n is a, c, g, or t
accacgatatgtactacgcctggcgagtacctaactaagtataaaaaatatggaatatttcaaatgaattatggtatatgctcaatttctctgttatatacgggagcctcatttcttttctcatctatntcttgggttactttccagttctaataattatagcttgccttct

SEQ ID NO: 645882 - DNA, 702 bp, Homo sapiens
ctttttccccccccgggaggtgtaagtttccttctttcctcacaaccaaatttgtggcgggcaaaaagaacaatctttcttttccctccatggtcatcgccatcaatagacctgtggtggtgcaccctcattcttgggggaacctcataaaataagttttgagaataataagcactggtttgcggctctttcgcaggtgttctccgttgcacattcataaaagatgaacttcagctatcttctctagaagatccatcatatgattgtgagaggcgggtctcccccaaaaatcccgcgcatgtattctttcgtttagaatctgaaaccctctttcttttcaggcttgatgactcttataaggtatttgttatgcctctcttctgggttgttcgttttgccttatcaagaagcacaaattctttctccatggcaacagaaactgcttctatttcgctggctgctgcttctttctctttccttagcatacatgtcacagctctgtttagtctctggctcttaatacgttgagcatcttcttcctcctgttgtgctaatctaaagaaggaatcaattcggagctgtgtcttttattcagtaaattcacttttaagaaaatattctttggccgcgcatggtggcacacacatgtactcccagctctgtgggaggccgaggcggaaaaataaagaggtcagctcgtgc

SEQ ID NO: 645883 - DNA, 109 bp, Homo sapiens
cagatatgtatgtggatactgcgcaaggatcccggatccgaccttctaagtagctggtgatagtgctggagctccaggtgacatgggccagcaggcgctgagtcaccag

SEQ ID NO: 645884 - DNA, 889 bp, Homo sapiens
tggccgatcaacttttattttttatttattttgagcacagagtttcgctcttgttgcccaggctggagtgcaatggtctcaaaaaaacaaacgaaaaagcaaaaaactgcacatatttaatatgtacaatttcatgaacttggatatatgcaaacaattatgaagtgataatcaaagtcaagataatggttatatccaaaactacacaagattttctgtgttcatttgtttttatttttccttttgttttttgatgatcttggctgtggtactggtagtaagaacatttaaagtgagatccacgctcttagtaagttttgaagtgcacaatatacaatactgcattaactgtaggcattttggtgtgcaacagatctctagaactttttcatcgagcattatcaaaacttgacaccctctgaagaactgccgttttccctaagccgcaggcagccattcatgtatatcggatcctgccatgtaaatccttttttagactagtgcagtgtatttgagcataatagtccgctggttaaataccattgtggtgaccaaagggcaggacttaatatttgaaagggtgattaatttatgctaggtattaatttaaatatatattcttagttggctatatatgcactgggcatctggtgtctatgcttcgcgctggaccccatctactgccacgaacatcatgtgcgcccaagatattgataactgggtgtacgtcattataaccgttatatactcactacagacttgcctcacattctacaaggtgaatatgggtagcggacctcttacatttctgacgccaattggggtaatacccaatcgtagttactgttctgggctaattgcggcaaatatcccgtggtctggcgtgttg

SEQ ID NO: 645885 - DNA, 1634 bp, Homo sapiens
gcttgtttctgttgttttttttgctttctgtggacgagagcagaaccagacggaacccttgttttcttttgctctgctgcatgttatgtttgtttctctgtatctcgtcttgtggcgtgcacggttttacctctgttgttccccccttcttttccgtgtgattcttcttctcccttgatttctgcttttgtctccacagttcctcatctttttcgcttttggtttccttccgtttttgcctctttgggggtgtttttgtctgcggtggcaccccccgccctgttgtcggcccccttacaattccccccggggatatagtccccccaaggccccgttttgtgtcccatagggcattttcttggggtattccttgtggcatcacctggggttatataattatgcctaagccctctgtgtcgcacgccccttgtaacatagtgccccacttgagtgtgatgggtgatagtacacaacacatcaggggtgtctttttggagttggttgtacttttggtttgatagggggtggtctcccggagacttatttgttccttttgggggccaaagagggcccacccttgttttgtgtgtgttgtgtcccccagagggtttttcctgtgcccaccagaagttcctccccaggagtctcctgttggtttatccgaattgtgaggctctaccccacccccaaagtgtggtggtgggacccccacgagaggtaccagtaacccacagtgttttgtgttgtctctcacgatgcacggagaccaacttgtttgtccccaaaaacgccctgttttttcccccacacacaaggacacacagtgtcttggagacccactggtgtggcccacactaagggagcttgtacacacacacgcagtgttccctcggtaatctctcacagaccccgcgcgtagttccttgtgttggttgctatcacacacatccgcggcgtgagaaacatgttggttataatagagtctttgggagactttctctccccggtcgccacacactctgggtgggtcacactctctacagcgccacacactctcccctcggtgtgtcccacgccacagctgtcgtcttggcacagagggcacgccgctcacacacgcggggagtgtccctcggtcctctcacctctcgcgagggtgtctctcttgagagctccacatagtccacacacaccctcgcacagagagtgtttgttccccctctcttcttcttgagttcccagcgccgcggcgctcaaacacacagagaggtgttctctggcttgtcttggtgttgaccacttgtcttcctctctctgggggcttctatacctctctcccaccacactgttccccaagagataggaaaaaggccacccctggattacatcttttgtgaaatcccactcccttgtgtgggccagccatctcctgaggcttctccccagaacccgagcctcttgtcgtcttggcccctctttgcaatcttggaacacccccggtgggtttttcttggcatagagagcccccctgcccttttcatagatctttatttgattaaattccctcttcaccttctgtgtatttaaaaaataattattttctggtgggaaataaaacaaaaaaaaaaataaac

SEQ ID NO: 645886 - DNA, 1353 bp, Homo sapiens
gattcatttaactaaagtaacaaatgtggtttttttttacacccacttaaccactctactgtgtgtgcgtgtgtactgtatgtgacgcacgatgggtcttaccagaactcattgttgacactaccctgaagacaagtcttgagacatacctacaatactaatgctgattgtctcttcctttttgaacacttttctgagttttattcccccaaacacctcagcttaaatactttaccccactatgactatatatgactgatcctgaccttgacaacagtatttaaacgaacaacaacttatttggacactcagctcaagaatattccaattgaatgggccactaacattctagacatttatacgtatgatatgtgtcacatgtaatatacaacagttgaggtcattcatacacgcgcacgcacagcaagacacagtacggctggctatcttctagccagatagcaacatcggattcacaaggcacaaaacagccatgcgtggtagccagtggccggcactctataccagccaacacaccttaccccagaggcggcttccaagggccacccaggggcgagcatcgtccatcatgagcaaacaacaaaatggtgacacacaatgaccacatttgcctgcctgacacctaaacaaacacataacattgaaaaacaccctacaactccacaaaccccccccagtataacagaccacccaactaaagcacagagtaggaacacaaacacggacgaaacacaacaggcggaaagccagcatgtacacaacgtaggaacgacaccaccagaaatacacttgcaccacacaacaagggatagaacatcaaggcaacaagaggaaacaactaacacgcgatcaacgtccaccctcacgagaagtggaggcatgctacacggaaaacaaagggaaaacgggagtacatgacgacaaccgcacctgctctacaccgccccctcacaaaagcacgaagcatccgactaaaacagcgcaacaactgccatggtgcacaacacaataaagaccgcacaaccatgaccctcgagaccggaaacatacgccctaacctccaaaccatgtacccacgtgcaaagacactacagccagcacacaaagcacaacacccacaattagtagcaacagggatgacacacaccatggaacaggcaaccccacaagtgccaggcagaagagacaaaacggaacacaaccagaacaaccactgcagcgcaaacggccgcagaagcagaccaagaaacagcgcaagaattacacaacaatggaactaaacacgaatcgcgcgtaacactagtgcccgagacccacagcaccgcgtgagag

SEQ ID NO: 645887 - DNA, 1279 bp, Homo sapiens
agcggaaggttgggggccatgtagcagttgagcccaagcggatactgctgtcgtgtaagagaaggaaagaaaaaactttgtactttatgtacgagagtcatcaagggtccaactttgagagctataagatttgtaacaatttacacttgctacaaatggtctttcggaacacttaagagtagttaagattgttgattgagagacattggaacgttagacatgttcgacgacaaaataaaacgtctgtggtcgagtagtccggaatacgtcggaaggatgactcatgggaatggagaccggttttctccaagattcatgctacttgactgtgagtgtggtgtgcctaatgccattgaatccgccgtatgggcacgaaaccaggacctgtgaactagcgtgacatatcttatggtgattcgattttttctggcgaatcgatcgacttgttatccggggcattgttgtggtacttacggggaggatggttccgagtggcagcttcatagaaagggacattcagacaatagtccgataagaactggggcagtaaccatccactaacgtggcaaagcttcgttcgaacaggacacgaccctcgttctagaagatgctcgggcggggaactccagagaatgtgatcggcccctgagcaataacctaggcgaactgatgattaaccgtcgcccccaggcgcgccatcgctaaacgaggacgcccccggttacaataacaccactgacctcaaatcgcaagacaaagaccctcactcacgtagacgaagatcttatatatgggagaaattgcagaacagaattatgaggaagggagaacagcgcgaacgtagaaatgggccacaacttacagaatacatcgctccgtgatgcacttggcagtcagaaagaatgaactagtatgttgcgcatagtattcggttggttggttgggagcgccaatttactctatatagtcgcaatgcgcagagagatattgtgacatcaggcggaataaactccttaacgcaaagagtaccggagaaatcagttacgcgtgaaacgcagggagaaccatggcccccgggacagacccaaatacaaccctgcgcccgcatgtggcggaataaattcaacccgcgaccgatggagaaacgcgctggtgagacggcgaaggggcacacccggggaaaaatggcaccggcgcgcccttacaaactgtcacgtcatagcagagtgacatctggcgcggagaccatcgggcgcgagaggtcgcggcactaacatga

SEQ ID NO: 645888 - DNA, 194 bp, Homo sapiens
tgcgaatatgtcccaccctgtttctgcatcaggtctcgccccaaaaacgaaattctgcatttggtctttcttattaatagctttcatcaggttggaagcgtgcagatcaccggaagcttcacctgcaatgatataatattttaagtgttttgtattttagattttgaaagtctgatcaatagataaatctaaag

SEQ ID NO: 645889 - DNA, 1047 bp, Homo sapiens
ggaataggccagcactgaggacgaggacaaggagtggccagtggtgtctgcgccctctgtcaagggagtgtcgtttgaccagggcctgtaatctgctgcagtagaggcctgactcgcaattgagcgtaacggcgcaagtagctgactccgtcatccatcctgcgtggactgtccgcgttgtcatacgtggcccatatcccaggtgcgaggtacgcatccgtctgccaggtagcatgggggccctctgcggcttgagatatgcgtcgtgacggactcacgacacagttcctggccctagcgccggtgtagggtagcttccgagtgcagtccctgtgtggtgtttcgtcctcactaagagatgcctctcgcgtcgaggggacctgttctctggtttccggaagccgcgatcgtagtcgcgcgctcttggtgcgaaccctggctagttccgtaggtccactttggacacctgggcgttggaactgggtgccgtggggttgcctagggcagctctagggaatccaggctccaaggttgaccccttggtcccggggtccccctgcccttagtgcactcttgtctgtctgcggctaggggtcgcctgtgctgcgtgcacccctgttggaaaccacccgtgggtgctctcaccggtgctacactttgtgtggcctattgtccataggcactggggctacgctttggtgggacagaagcgctgtgtgcgacactccgaggcgatgcctcggcaggggtggttggcccaacgttggacgcccgcaacagagctattgggcgaaatattcacccccgtcgaggcaggaagacccgccgaaccaaatgaagcacagaatgcgcggagattctttctccaattttttccgccaagagcgttagaggccccacaataagagagagaggccgatgtgcacccgagacagcgcacagaaccggtatcctggccattggtcaagtagtaaggggccttcttaggctgggcatggtgcacgcgatgtgtgtggaaacccaagccaatgactcccttggattcgg

SEQ ID NO: 645890 - DNA, 164 bp, Homo sapiens
cttgagtattattcagctagccatgatgaaacaaatgagtctgccgactatctgccagcttcatggctagctgaataatctcaaagctagctgaataatctcaaagctagctgaataatctcaaggctagctgaataatctcaaagctagctgaataatctcaa

SEQ ID NO: 645891 - DNA, 176 bp, Homo sapiens
tcatggaataagaaactataagatattgcaaataatcaatactatgacatttttatactgatttgtccatgcagatgatcatacatcatccaaaaacagcaggccatctttttatgcacacaagtcatgcgtgacaatatacttctctgctggataccttggataccgagctcgaa

SEQ ID NO: 645892 - DNA, 771 bp, Homo sapiens
gaggaggaactctaagtctgggtcttgacacttttagtgtcagttaagtctcaagtcgttcaactctctggtatccagtctgccaggtttgcgcatgatcgctccggagcggagcgggttgtgttgcgcaggtcgatacgtcgaggatcgtgctgagttaacctggaatcaccacggcagccactctccctctccccgacgcggggagttacaagaagattcttgccggggtgctgcagccatgcccatgacgtattgcctaaggcggatttgaagtctctttctctccctatcagaatcttattctatggctaaggatcttctaggataggcagaagtcacgtaaacaccagaagcacctgaagaccatcaaggtgagtctgagcagggctgtttttaaggaaccaactgggaacctggcttgagcgctcacatacccctaattcatacaacagatttgtcttacaggacgctacaacactggctcatgtcttgcgctgggtactagaaccttatcgacctcattacaccataaccaacggaccatgataatcacacccaacggaagcaccagcggcacgttaacgtcaacgacacgtgggggcagacttcaacagcgtttcagcacggctgcactaggtggggcaaatgacagaaaaccagcgaaaccaggcaagcggccgcaccagccacagtgggaccgtgaactcgggcagcatgcgtagatgccccactagaggcacatcagaatgggacaactccagtccctgg

SEQ ID NO: 645893 - DNA, 144 bp, Homo sapiens
accggcccatttggagcagtggaagaacggaactatgatttggcttccttatgcctccgaaatatttattaactgcagaggaaagcctgtattattataggagaaaggcgaacagaataaacgcacagcagataaatttcaggg

SEQ ID NO: 645894 - DNA, 210 bp, Homo sapiens
tgctgggattacaggcttgagccaccatgcccagcctcctgtcatacttttctctgtgttcccatttttctagcagacactttatttttatagtgagtaaaatctgctatttgaaacttggcagtgaggtatccagactgtcttataaaatcctgtttaagccattgatgtatttgaggatggcgaggtccatgctatcctttgtgccct

SEQ ID NO: 645895 - DNA, 150 bp, Homo sapiens
tagcgatgcgtcaccaatgcccagctatttttataatttttcgtactcgctgggctcttggcctcgtgccaggtggcgagggctgacggaagcggggatcttggcctcagtgccggggtatcctcttagacgtcgaccctgcagagcatg

SEQ ID NO: 645896 - DNA, 263 bp, Homo sapiens
cccgcgagtttagttgtgaccttcgcggtaggtgccggtttggggccggctgtgaattgttatcttggtgctgcagaggacagcagaaagaggagattgggtcagaaaactaccctgaccgaaccagagcacagcggactagtgggacaggggtccctgactcagagcttaactggctgtgtctgcgtggtttttgacttttgctgggaaaggggctgaggtgggcacttaaatcagggcatagatgagaaacttgaagcttt

SEQ ID NO: 645897 - DNA, 419 bp, Homo sapiens
gtaaatgaatccaatgtggaagaaaccctttttcctcccccttcaaagacagatcaaaggtggtccagcccatcctccagcaaaatcatgtcccaaagtcaagtatcgaaaggggttgatttttaaccaagggggggtgatgatgatgacccttttatgacccctagttttttaaaaaaaaaaagaagataattttttttagggccctgagaaccctgcaagatcccggaaaaatgaaaatgttcccagctaagggtttcccgtttaagattttaaggattgtttcctgggcaaaaccccataagtaaaaaatttttggttcccagacaaccaaaagcattgattccccctgtttttttaaccggggggtgggagtaaaagctttgtttcaatatcccttttgggtaaagttttaaata

SEQ ID NO: 645898 - DNA, 207 bp, Homo sapiens
  misc_feature (17)..(17): n is a, c, g, or t
actctagaggagcgtantatacacccacaaataacatttcagtaattcagtagcaaaagaataccacagcagagctcaatcttggctcttctcttgggatctagaccccttgttcaaacttccttgaggtactgtggtccctgggtgaggctttggtcctctctctctctgagataactactgaaactggtgtgccccaccaagggc

SEQ ID NO: 645899 - DNA, 449 bp, Homo sapiens
ccctctgcgggtatcgtcctcttctggtttaggaacaatctgtcctttccgtaagactcatctcaatgtggcaggaagagctcatgtatgggttaatccgaccatgagctcctggtaggtccggcggccgcttcttaggtgctttgtccacttggatatgctcaatggaccagagaatctacaatctaaaacccttaagttcagcattactctctgcgtttttaagcatgtccagcaaaaattcagcactctttttgggccaccgaccttgtgtcccagccccattgcttggcctgcgcacacctgccaactccaccattgtaaccgtcggaatggtacacactgtttctgtaaagtgacatctttcagatacttcgtggcttttcgtatatgcatacccttgatggcctgagcagtttcacgagtgttcttaaagtgaacacgaaggc

SEQ ID NO: 645900 - DNA, 953 bp, Homo sapiens
gtacccatgttgtcttttagcgctgcgtgtgtcttgtgccatgtccgctatactgggctgagtggtgaccggtctgggtgtcccctgccaggtttcctggctcgaggatttctcttgcgccgattggcacatcggggccaaaccggtggaagttcacctcctattttggggtctcccgccccccttggtgtgaattttggcgcccttctgcggttaaccgacagtgtccaagcgccctgtgtaaaaacgctctggtcttaaaaagaagccgtcttccggtttcaccgccaaaaatacggggccggcctttttctttaacgcggccaaaaggcaataaatggggcccactccttccaaacaaagaagtctgatgaagtgggaaatcctaatattgcccggagagagcgtctcccccgggacatacaggggaaaccgctctaccacgaaagttccgtgcgcagcaccactataggcacttgggagtgcgcgacaaaaacgtctcttgcctcaaaaaagcgggcgtgcggaccataaagccccccgacagtccacagggcgacatagataaccccccacacgagatgggcggtcccaccgggagaaaccagagtggttgaccgccgcgtaccccacttaagccgcgcgcattcaggagccaaaactgggcgaggtatctgcaaactatggggctttttatttcccccagtcccgggcgagtgctcccactaagtgccccagaaacaaggttgatgacccacgctatgtttataaaatggggagatacacaattcgtttacaggagaaggatcactcaacctgcatgttccccaagctctaacccggtcatccccagacgatacaactttcatagcgtggcccacgctcccccaaggtttaaagcagaaaaaagctctcccccattttaaaagggttggggatcccaaaaacaaaac

SEQ ID NO: 645901 - DNA, 113 bp, Homo sapiens
ttgtatacagctcgatcaatagcacaaactgaaaaattaaagtaataagccataaccatcatgaacaaggatgactctaaaaataaccaaaacaggccgggcacggtggcttc

SEQ ID NO: 645902 - DNA, 803 bp, Homo sapiens
  misc_feature (81)..(81): n is a, c, g, or t
  misc_feature (83)..(83): n is a, c, g, or t
  misc_feature (86)..(86): n is a, c, g, or t
  misc_feature (89)..(89): n is a, c, g, or t
  misc_feature (104)..(104): n is a, c, g, or t
  misc_feature (124)..(124): n is a, c, g, or t
  misc_feature (206)..(206): n is a, c, g, or t
  misc_feature (216)..(216): n is a, c, g, or t
  misc_feature (236)..(237): n is a, c, g, or t
  misc_feature (239)..(239): n is a, c, g, or t
  misc_feature (241)..(241): n is a, c, g, or t
  misc_feature (260)..(260): n is a, c, g, or t
  misc_feature (266)..(266): n is a, c, g, or t
  misc_feature (273)..(273): n is a, c, g, or t
  misc_feature (486)..(486): n is a, c, g, or t
  misc_feature (490)..(491): n is a, c, g, or t
  misc_feature (535)..(536): n is a, c, g, or t
  misc_feature (543)..(543): n is a, c, g, or t
  misc_feature (552)..(552): n is a, c, g, or t
  misc_feature (559)..(559): n is a, c, g, or t
  misc_feature (570)..(570): n is a, c, g, or t
  misc_feature (572)..(572): n is a, c, g, or t
  misc_feature (575)..(576): n is a, c, g, or t
  misc_feature (578)..(579): n is a, c, g, or t
  misc_feature (583)..(583): n is a, c, g, or t
  misc_feature (593)..(593): n is a, c, g, or t
  misc_feature (628)..(628): n is a, c, g, or t
  misc_feature (635)..(635): n is a, c, g, or t
  misc_feature (639)..(639): n is a, c, g, or t
  misc_feature (656)..(656): n is a, c, g, or t
  misc_feature (664)..(664): n is a, c, g, or t
  misc_feature (673)..(673): n is a, c, g, or t
  misc_feature (681)..(681): n is a, c, g, or t
  misc_feature (683)..(683): n is a, c, g, or t
  misc_feature (690)..(690): n is a, c, g, or t
  misc_feature (692)..(693): n is a, c, g, or t
  misc_feature (698)..(698): n is a, c, g, or t
  misc_feature (706)..(706): n is a, c, g, or t
  misc_feature (718)..(718): n is a, c, g, or t
  misc_feature (721)..(721): n is a, c, g, or t
  misc_feature (723)..(723): n is a, c, g, or t
  misc_feature (727)..(728): n is a, c, g, or t
  misc_feature (741)..(741): n is a, c, g, or t
  misc_feature (748)..(748): n is a, c, g, or t
  misc_feature (751)..(753): n is a, c, g, or t
  misc_feature (759)..(759): n is a, c, g, or t
  misc_feature (764)..(764): n is a, c, g, or t
cctaggcaacacatgactttctgcaaggcactgataatagctatgaggaataaatattgcagatggattaaatcaaaaaangnatnggngagccaaattaatcntgaaaaggagggagaagcanaaatgaagaaaaaagaaccacagaagtaaaatcagcagcattgaaaagaaaatcatctgctgtttgaataaagacccaaganctttcattgntggatccccaaagccagtgnngngngggagcagcaagtcccaanatcaanaaatcanaaggaactaatactttaactaattagtagtaatgaaaatttactagacatcaatgacaaatttacaaggcaaatttatttccaaagtacattcatatatatcacaggtaaaatgaggttttcacgaacaccgttttaaacatagggtttatttgcaggagctatttttgtggcttagggaacaaatggttcattgaaacagaactttgctggnctgnnttcaaaaattctattatataaaagattctgtagaacagatgggnncaaaagnccctgaacncaaacangaatatcaggnantgnnannggcntttgggatangattatggtttatgctttgaaagattagtatgcanggaactnaggnaagagcataaaagaggnagtgggantatactttntggttaananggtttananntttcnaaatactnacatcctactgnagntngggnncaagattatcctnggttatnggnnnaaaacntgctnccagaaaagagggttcaacgcacaaaaactcaagtgggt

SEQ ID NO: 645903 - DNA, 248 bp, Homo sapiens
gctgtcagagttcccgctttacgaggccacatcctcatggatctagttgggtttgttaacctctgagccatgaagggaactcctttcacctcacctctgaagcttcactagctacgcttccattctgatgacctgtgttctagataacggactgccctgtggattaattcccaataacttctgcctaataactaacccctgccacccatggcagtcatggaggagaaactgggattggccccctcgtt

SEQ ID NO: 645904 - DNA, 150 bp, Homo sapiens
ttactgcaccacgctgcatcgcggtcgatgtagaaatgcccgctgttgccggcaccactgtcgtacagcacacgctcgccggtactcgcggccatcgccagatccggcagctcggtgcagtggatcaccaccatctccagcgtggccggg

SEQ ID NO: 645905 - DNA, 258 bp, Homo sapiens
cagaggactgattgatgacagtaagctcaaaggacatgcgagatgaggtcctggaacatgaactgatggtggctgaccgaggccagaagcgagagattcgagagctggacacaggaactgtataagtggcaggtgctagtggaccgcatcataggtctgagctctccggagttcgacaaccagagactggcagtgctgcgtgcaccggatagatgcgggacctgatgcgctcgcgttagatcaccctgatccagagaa

SEQ ID NO: 645906 - DNA, 145 bp, Homo sapiens
gcttatgccgaagagtatggtatgtggcgaaatagaaggctgaataacctgacaagaaccacactgatgtgagagttttgattccatgctcaggaattttcaacttttcccagtgtgcaaactgtaaaccaatgacacagtcctg

SEQ ID NO: 645907 - DNA, 628 bp, Homo sapiens
  misc_feature (492)..(492): n is a, c, g, or t
  misc_feature (524)..(524): n is a, c, g, or t
ctgcaaaagatgaaatgtttttaatgtggcttgatatcaggatgatgctggcctcataaaatgagttgggaggattccctctttttctatcaactggaatagtttcagaaggaatggtaccagctcctccttgtacctctggtagaattcggccgtgaatccatctggtcctggacttttttggttgatttttttatatatataggatgctgtttgtaaatggactgaggggagaggtgcgaagtttaagaaatcttgttcaacaaatagatacataaattttggaagcactggattacagtaaagggtctctgaaataatcttccttcaagagcaaagaaagttgtctcgtctacttaattaaattctccagaataactcctggtgctttccaaatatatgtgtagtcccagctacttggaaggctgaggcaagaggatcacttgagacgttcaagggtgtagtgcaccatgatttgccctgtgtgaatangcatgagatccaggctgagcaaaaaagtgagnactcatctgtaaacaaaaagaaaaaatgctcctgtcgatttcaatgtcaatttatcggtagaaatcttaaaaattaatcctcctaaaaataatgctgttaaggg

SEQ ID NO: 645908 - DNA, 348 bp, Homo sapiens
  misc_feature (292)..(292): n is a, c, g, or t
  misc_feature (304)..(304): n is a, c, g, or t
  misc_feature (330)..(330): n is a, c, g, or t
tgagacaagtctcgctctgtcgcccaggctggagtgcagtggtgcaatctctgctcactgcaatctctgcctcccgggttcaagcaattctcctgcctcagcctcctgagtagctgagattacaggcacacaacaccacgcccagctaatttttgtatttttagtagagacagggtttcaccatgttggtcatgctggtctcaaactcctgaccccgtgatccacctgcctcggcctcccaaagtgctgggattacaggcatgagccactgcggccagccctgttccttctntctacccatctnacactcctctcaaatttggggggagnccagatagttaataggca

SEQ ID NO: 645909 - DNA, 169 bp, Homo sapiens
cttctgctgtcactctaagatccccgcgtcgcttctagtgtgcgcgtgcgcgctctggtacctgtacccctacgtttactcaccggattaccgactccgcgactatgttctatatgcaatatatatacgtatactaattgtgtactcgtaggagataaaatcactgtaa

SEQ ID NO: 645910 - DNA, 253 bp, Homo sapiens
tgttggccgatcacagtgagtgacagccaaaggcacccagtgtctaccccaaatgaggacttgtgggggttgacgggtggaccccagaggccagtgtttgctcctcttccagcatcaggcgagagcaagaacagtcagagcctcctgggcaacgtatttgactgtccacatcctggtcctgggtcagttactctaggattggcttgacttcactcttgcaggtgctgttgtcccaggatggggccaaacattg

SEQ ID NO: 645911 - DNA, 118 bp, Homo sapiens
accggcgtgctcgaagaaggtggtgtagaggtcgcggtcggtaagtagtatagtgatgacagcacgcaaggactggaagagaccggagccgcaggaccgcagagataaggcaaggcca

SEQ ID NO: 645912 - DNA, 150 bp, Homo sapiens
aagcagtatacagactcatctttctctgattttcatcatttgatcctgcttatggcatgcctatttaaattaattaattaattatagagacagggtttcagcatgtgggccaggctggtcttgaactcctaacctcaggtgatccacccg

SEQ ID NO: 645913 - DNA, 685 bp, Homo sapiens
ggcctcttcttactctcttctccaacctctctcactgtccctcaaccactttctcctttccactcttcaatctctcccttctcttaatttcaattcctttcattttctgggagagacaaaggagacacgttttatccatggacccaaaactccggcgccggtcacggactgggaaggcagccttcccttggtgtttaatcattgcagggacgcctctctgattatatacccacatttcaagggtgtcagaccacgcagggacacctgccttggtccttcactcttagcggcaagtcccgcttttctggggaaggggcaagtacctcaaccccttctctccttgtctctaccccttctctggtttcctggggcaggggcaagtaccccaaccccttctccttcacccttagccacaagttccgctttcctggggcaggggcaagtacccctcaaccccttctccttcaccttagcagccaagtcccgctttcctagggggcaagaacccccccaatcgcttatttccgcaccccaacctcttatctctgtgccccaatcccttatttccgcaccatgactcttatctctgtgccccaatcccttatttccgtgcccaaacccttctctgcttttctggagggcaaggaccccctaccccgttctccgtgtctctactcttgttggg

SEQ ID NO: 645914 - DNA, 274 bp, Homo sapiens
aaaggcagatttagttaacaattcatctcttaacttaccagatctcttaaaatctaacaaagtgtttttaccttattctaagaatcaacaaccaaaaaaggaacttggatacttgtcactcccccgttttcatccatttctctgaggggaaaacagccctgggccagtggggaagcaaaagagggtgcctgtttggagtccgattggagcgctgttggggacagcacaggggctcccctccccaggaggtctgcttagggtagggagggagtgc

SEQ ID NO: 645915 - DNA, 288 bp, Homo sapiens
  misc_feature (273)..(273): n is a, c, g, or t
agagcacggggcctaagggagacacgctgcatctatcgagacacaaacgggctggggatgggggcgggggcctggagggccagctgacatgttaactgtgatgcataggactcgctcttctgatgtcgagtgagagcagaaggtagagatctccgccccgcgggggcttatctgtactggtagttcatgctgtggtctgcgtttctgccatagccgccttgtgaggactggtaggagctgggagggccactgtagttctggccggaccccggngagttgtagttcgac

SEQ ID NO: 645916 - DNA, 1068 bp, Homo sapiens
ggacgcgtgggtcgagccacgcgtcgaggacgcgtgggtaatggaaatgctcccaagaagcggagagaagtcgatgacggttaacaagcaagaaagtggtataggctggatggagtacccatcagcatcggcaggtcgtctcacgctgcaggtgctggcctatgtcaccaagagacatgacttgagccatatccatggtgagaaacacgatcaaaaggcacgagacaaaatctagttcattgaagccagtagactatcacgctacaaccgaaacaggcacgaaaaaacacattaaatactaatagttggcgtagaataccatttgtgcagcgcgattaacatgtgaggatgcaagagatgaacatactagaggggacacgagcagtatccgtggtaggtagtaccatatggtgacttaaggaaggaaaaagagagaagagatacatattactagtgagcaaacgttaaacagtgaaaagtcaaacgggagtaatacgcaactgagtagaaaatgttcaaactggcaagacgaaaaacggtgtaacgtatgtggcagacaagatgcatacgacacagcacgactaggggacatattacaacacactggagcaaagtacgtacaccacgtgcacggaaagctagcctatcatggcacgcggagctcaaggacaagataagacgaagaaccaaaagatcgaggggataacgccagagcagcagaaccactcaacacggacaaaaaaatcaagtaaggaagagaaagcaacaaagacgtgcaactaaacgagggcgacaaccgaggacatgaaaacaaaaacatacgagacgcacaaacgcatggaacacaaatgaacgaaaacggagagcacacacaaatgcaacgacaacaaaagaagaaacacaacataacaagacaaaaacgaggacacagaaagacaaaagaagaagaaagaaaaaaaaacaactgaaaggaccaaacatatggacacaggacaacaaaccaagaaacgagacaaaaggaatccaacagtgaacaccagacgaacatgccaccccaacaaacaacgg

SEQ ID NO: 645917 - DNA, 289 bp, Homo sapiens
  misc_feature (165)..(165): n is a, c, g, or t
  misc_feature (196)..(197): n is a, c, g, or t
  misc_feature (241)..(241): n is a, c, g, or t
ttagaggatccccggaagcacacgcaacaggttcgtgtcacctgtgcagaagatgtgtagttgatcatctaggcataatggcctaagatgaactttgggaccaacttctaagtcacacagcgtcagtatcagatttattggcacaacagcttattcttttcactnctatgtctgaggaaaaagccctcccagaatnncgtaatgaatttctccagtggtaacccctcttctggtttacaanacagaaaagtttctcgtaggctggtgctggagatgcatttgtgttaac

SEQ ID NO: 645918 - DNA, 1294 bp, Homo sapiens
gcttgtttacggacggtgacgagcctaccgcgcacgagaacagtgcctctcggcaaaaggactctccttcatcgccgtctcctagaatgaggacgagagatggagaacagctagaaagagacgcactggatgcatgagccccaaatgtcctatcttcatggatgttgaaatagtgccctacgcgtagtgctataagaattcatgcgacggtctcgttgtagtcacgaatgccaacgaaagcgggtaagattgtagatgctgattggacatgcatcacactgattgcatcctgaccagtgccttaccagtgcaggagaatagcgataggacgttaccatgataggcactgttcccgttcgagagtgaggtacatgccagtcaactgattaaggcagctcatgtgagtttcactggaactgccagtgggggaaaaacccgatcgtcgagataaaacgagcaatatagggtccatgaacagcaggcaagcatagaatagcccaaagcaagcgacaaaacctttctcctaaactgccctcttgtgagcaccttgggcgatatataagcacatctgcgcacaagaccacacttgcttcggaacatgtggagtaagtcaccgcgagggcgttccccacagaaaagagacgtccatgggtgcgaaccagggcgaggggcgccatttaattgcgagaatcaaccatgggggaaggctatacactcccgccgaggggcacagggaaactaattctgccgttcggcaagtttaccctttgggttccatcgacgttggcatcctaaaatacaaatatggggcccaccccccgggagcacggcagaagcgatccaggtgacacgcagtgtactgcacagaactacaactatacgccttcttcacgtaagtgtgcggtggcagacatcccgtcgggaacagggtccctgggctaacatggggaagggacatgtttctataccaccgccaaaaggcaagaagggaaagcgcaccacttcaaacaatggttaggctgttccgtatgtagcaaagcaagtgaactatcccttattacagcgatacacctcgacctgtgggtgcgacgcgggtaggcgtaaagacttacagcactgtcccacgttttaagattctgataacccaactcgggatgaaacactagtgggctggaaagctttccaagtcggcagtgccgacgccatgtcacaggttatgacaagtaatttcacgaagcgtgtgtacggttgcctcttgggtatgcgttggacacaccaagtgggttggatcgac

SEQ ID NO: 645919 - DNA, 208 bp, Homo sapiens
  misc_feature (35)..(35): n is a, c, g, or t
attttgaggattgggggagccttgccttccaaacnaaaagtcctaatagtagaagaaccccccataaacctggagtggctatatggatgcccccccccctaccccccattggaaaaacccggatacataaaatttaggcaaaaaaggaaggaatcgaaccccccaaagctggtttcaagccaaccccatggcctccatgactttttca

SEQ ID NO: 645920 - DNA, 366 bp, Homo sapiens
  misc_feature (23)..(23): n is a, c, g, or t
  misc_feature (25)..(26): n is a, c, g, or t
caggggctttacagagacctttngnntgttggcaaatttattttccaatggatcactattgagaatattgtatcctatagaaattactatgagtctgccgggcgcggaggttcacgcctgtaatcccagcactttgggaggccaaggcgggcggatcacgaggtcaggagatcgacaccatcctggctaacacagagaaaccccatctctactaaaaatacaaaaatcagccgggtctcatggcaggcacctgtaatcccatctactgaggcaggagaattgcttgacccaggaggcagaggttgcagtgagccaagatcacgccattgcactccagcctgggggacagagcaagactctatctcc

SEQ ID NO: 645921 - DNA, 896 bp, Homo sapiens
cctctgtgccgatcagcggaagaccaaagaggatgagaagagactgacaagacccatccgagctctggatgagcggggatattgccttgttgaaaacttatgcgtcagagcacttactctaggcagatcaagcaagtcgaagatgacattcagcaacgttctcaagacaaattaatgagctcactggtattaaagaatctcgacactggccctggccccaccagcactctgggactttggctgcagatacagcagcacactccagagtgaacagcctttacaggttgccaagagtgtacaagaggataatcaatgctgccattcgtgaggacccaagaattacacttagtcaagctgtaaacagtcagctttgccacagcttttgctgtgtggcaccttacgtgattcaggtggtcatcctactgacattgacacgaagggatgacgagtgggcgtggatacgaaagtaaatatcaaattacatcgattccgattagcctcctaagattgaccgcaacaagttaccatgatgcgagagtggaagagaaaccgtgatgtcaacatacagcagatgttgagaggctgtaaggaacagacttgagaaatctgcgagtgaagtaggttgaaacctgcgattacttcatccagagaagggtaagtgaacctagcgcacttgagcctacgcaagggcgtgactgcttcataagagtccacaccggatacaagagccaaagatagaactcttggcaacgccaggagccagcattgcctaaacaccgggacctgaatgccgatgacctagccataacgaaggttatatggcaatgtgagacccattgtaccaaaaaaataacaatgcaagaatgaaaggaggctccaaatggcttccagcgaac

SEQ ID NO: 645922 - DNA, 292 bp, Homo sapiens
tttttttttattccgggggacccccttttgggggccgtaaaaggggggttttcccgttttttttaaaggggggggaggggggtttgggaaattttttccacggccggtaaaccccccgcccaccccaagccccttttaaaacccccccgggttttgtttggaggggccaaggtttttttttttcccccaccggaatttttttttttttttggttcccccggaaaaggtttccccaaaatttggtgggggggggttttttttttttaaattttaaaaaaaaatttggggggga

SEQ ID NO: 645923 - DNA, 920 bp, Homo sapiens
gacagccagccgggcccggtggcggagaggaagtgcggtccgcgccaagcccgtccccgcgacgccggtccccgcggctcgggtgacagcgtcgggccgcggacgcagcgcgggcaggcgcggcagagcgagcgcaggggaggctccgggaaggcggcgggggaaaaatggctgatgactgggctcctctcggtcgtcggaagagcggtgccccggagggcgccgggaggagggacccgggcggccggcttcctggccccagcaagggagagcgcgagatggggcggggcattaagaggacacgaaccgagcggcttccggggccacctgccgggggcacatggcgggccccggcgacccagcagggggccccaacagagtggcgggggggctcctgacgcgccctgggggcacacacgcccactggggagattggtgtccagggggccaaacgccccgtagcttagattgggcttaccgcgcgagccatggcccgtgggtgaacagggtgtgaccacaggaagctgggaggagcatccggccaatgtgggaagaaggagcccgcaggaaccgggctcaacaaatggattcgctggcatctaaaggggccccggacacaggcgatgggggggaaaaggccaaaaagggcccgtggaggaggtgaccccgcgcggtgtggaacacttcgacgacgacagatcaacacggcacgaagagcttcgggaagatccagcgggaccccagccagggggaaaggggcccgtttttgattacccaagagagcagcggcaagtggcgccggcggcatgccgaaaaagccgccgcggcgagggtgcccacggggcggcacggacgtgcgggacaacgtccaccacaccccggggggccaccccgggccccccaagcgctttgggcaaacc

SEQ ID NO: 645924 - DNA, 119 bp, Homo sapiens
tgacgatcttccccatacctcagatgttaaaactgaggcacattgttacgttgctataactgcagaggccagacctgggagcatgtgccctaaatatcaggcttgccctctaagactca

SEQ ID NO: 645925 - DNA, 754 bp, Homo sapiens
gggggcttatgccggtgatcccagcactttgggaggctgaggtgggagtgttgcttgaggccaggagctcgagaccagtctgggcaacatagtgagaccttgtctctacaattaaaaagaaataaatatttaaaaaaaaaaaaaaaaaaaaaaaaaaaaaaaaaaaaaaaaaaaaaaaaaaaaaaaaaaaaaaaaaaaaaaaaaaaaaaaaaaaataaaaaaaaaaaaaaaaaaaaaaaaaaaaaaaaaaataaaaaaaaaaaaaaaaaaaaaaaaaaaaaaaaaaaaaatttgttttaccttttatacaaaattgatttaaccctgacaaaacttttttataggggggagaaatcaatttctttttccaaaaatgcccttttggggggacttgccaaaataggagggccctttttaaaaaaggggctccggaaaaaaccttggggataccaaatgttaatcctttgtgaaaaattcctttttacccggggggatatatgcaaaatgggccccacatgtttcgtttattaaaaaatgtcctttatccaaaaggactatacaatttaaacgctttaaatttttgaaaaattcgcgaaaaattttttttaaaggatccttttttataacaaagtggcgattagtgtaatatttttttaatataataataattcccccttttggttaggaggttttcccgttggaaaacgatgccccctttaaaagctgggcctcccaaggtgtaaggggtgacctt

SEQ ID NO: 645926 - DNA, 116 bp, Homo sapiens
gtgtactggacagatgttgctggacggacaatcagccgtgctggtctggaactgggagcagacctgagacgatcgtgaattcaggtctgataagccctgaaggacttgccatagac

SEQ ID NO: 645927 - DNA, 355 bp, Homo sapiens
attcaattttcatagcacagtttttttaatctgttatataatgttttatcatttcaacatgtaatcagtatacaacatgattagtgccgggcgcggtggctcacacctgtgatcccagcactttgggaggccgaggcgggcggatcacgaggtcaggagatcgagaccatcctggctaacacagtgaagccccgtctctactaaaaatacagaaaaattagccaggcttggtggtgggcgcctgtggtcccagctactcgggaggctgaggcaggaaaatcgcttgaacctgggaggcggaggtggcggtgagccgagatcgcgccatttcactccagcctgggaggaaaaaaaa

SEQ ID NO: 645928 - DNA, 329 bp, Homo sapiens
ggagagaatactaaacacaggaattaggaaccaagaagctaagccaggagctcagagtcaaggttggaagtccaggacaggtccgaccagtgctgatggtggacaagcccagaaatggaagattgtactttactatacctactggaatgtacttaaattatatactctatatacgatgttagcacacttatttaatgggatcctatgattacctggcacaacagcacaatgatgctagcaactttggctttgaactgctacaaaatgtactatcttgtagtaatatacagtacaaaacacactagaaatcaagtgctcctacaacgaaa

SEQ ID NO: 645929 - DNA, 683 bp, Homo sapiens
  misc_feature (31)..(31): n is a, c, g, or t
  misc_feature (68)..(68): n is a, c, g, or t
  misc_feature (97)..(97): n is a, c, g, or t
  misc_feature (107)..(107): n is a, c, g, or t
  misc_feature (124)..(125): n is a, c, g, or t
  misc_feature (155)..(155): n is a, c, g, or t
  misc_feature (157)..(157): n is a, c, g, or t
  misc_feature (169)..(170): n is a, c, g, or t
  misc_feature (180)..(180): n is a, c, g, or t
  misc_feature (183)..(183): n is a, c, g, or t
  misc_feature (190)..(190): n is a, c, g, or t
  misc_feature (201)..(201): n is a, c, g, or t
  misc_feature (238)..(238): n is a, c, g, or t
  misc_feature (273)..(274): n is a, c, g, or t
  misc_feature (278)..(278): n is a, c, g, or t
  misc_feature (295)..(296): n is a, c, g, or t
  misc_feature (304)..(304): n is a, c, g, or t
  misc_feature (315)..(315): n is a, c, g, or t
  misc_feature (334)..(334): n is a, c, g, or t
  misc_feature (338)..(339): n is a, c, g, or t
  misc_feature (369)..(369): n is a, c, g, or t
  misc_feature (383)..(384): n is a, c, g, or t
  misc_feature (386)..(386): n is a, c, g, or t
  misc_feature (459)..(460): n is a, c, g, or t
  misc_feature (466)..(466): n is a, c, g, or t
  misc_feature (506)..(506): n is a, c, g, or t
  misc_feature (511)..(511): n is a, c, g, or t
tccgccatttcgtggacgccgggtgagtganagagttggttggtgtgggccggaggaaagcgggaagnactcatcggagcgtgtggatttgagccgncgcatttttnaaccctagatctcgaanntgcatcgtgattcctgtccattggactgtnangtttatgtaggnnatcttggaancantggcaanaagacggaatnggaacgggcttttggctactatggaccactccgaagntgtgtgggttgctagaaacccacccggcttgcttnngtgngaatttgaagatccccnnagatgcangctgatgcagntccgagagctagatggaangaannactatgtggctgccgtgtaagagtggaacngtcgaatggtgaannangaagtagaaatcgtggtccactccctcttggggtcgtcgccctcgagatgattatcgtaggaggagtcctccnnctcgtngcagatctccaagaaggagaagcttctctcgcagccggancaggnccctttctagagataggagaagagagagatcgctgtctcgggagagaaatcacaaagccgttcccgatccttctctaggtctcgtagtcgatctaggtcagatgaaggaatagaagacagtttgcagagaagtggtgtcaggaaattacttcatttgacaggagtatttcgc

SEQ ID NO: 645930 - DNA, 330 bp, Homo sapiens
  misc_feature (53)..(54): n is a, c, g, or t
  misc_feature (103)..(103): n is a, c, g, or t
  misc_feature (175)..(175): n is a, c, g, or t
  misc_feature (230)..(230): n is a, c, g, or t
tagcgaactgataccttcaggcagcagcagcaagctgtatctcccaactgtcnntggttcagttcaatattggttgagtaaatagcatttccactatatcttngtggcccccgtggcaagcccagtataaggcagtgcttccagctttgtctaagccattaacacccactctgtngtccaaacactctctcaaccagctcaagttgcctctttttgctgcttcatgcaanggattgtcaatggattctgcctgctcagccacatagttgcttggaattagtccagtcctgcctttggaggtgcctctccaccaattgtatcgcatcagaa

SEQ ID NO: 645931 - DNA, 297 bp, Homo sapiens
  misc_feature (70)..(70): n is a, c, g, or t
  misc_feature (142)..(142): n is a, c, g, or t
  misc_feature (197)..(197): n is a, c, g, or t
ataactgacgctgatatataccatgttttatatgttaattaaaaacataacagattaaatatatatcttngtggcccccgtggcaagcccagtataaggcagtgcttccagctttgtctaagccattaacacccactctgtngtccaaacactctctcaaccagctcaagttgcctctttttgctgcttcatgcaanggattgtcaatggattctgcctgctcagccacatagttgcttggaattagtccagtcctgcctttggaggtgcctctccaccaattgtatcgcatcagaa

SEQ ID NO: 645932 - DNA, 773 bp, Homo sapiens
  misc_feature (362)..(362): n is a, c, g, or t
tccagttagtcctgatttcagggtcacccaaaaaacccctgccaaacagaagtcttaaaagctgcaaaaattcccgggcgctgagcattacttcgggatgtttcaacagagttcaggagtgcctcctcctcattctgtggtgcccaagcctttacatagcctcttccgaagagttttcgtgcatctcagccccgcctcattcaaatctccagggaaaggctcagctcacagtgtgccctcttgaggaaccgtgtgtgccatgtggcgacatactctcagggctaggaggagacagtgggtgaacggcaggagacccaagatctgtggtgcagaaccccaaatgtgtgcccccagaaaccccncgcggagaagaacggcggcgagaagacgccggggcagaccgggttaccgccggggggacaaacccgcccgaaaaaatttgcaagaccgcaaaaacaaagaagaaccaggacaaaagggggggaggaatctcagggggggggaaaaaaccccacctgggggacccccccccacaaagatttatgcacggccttttgttccattttttatgagaacctataacaattatcctagcggggctctgagaagcaggggaacaagtgtttctcctacaaagggctgggcccaaaaatgtcccgcaaagaaatcttttgaaaaaggggcgccttagaaacatagatcgcctgggaaaacaaggttgtgtaactgttaggtagactcaagggaatgcgccccaaaaatcccccttttcg

SEQ ID NO: 645933 - DNA, 193 bp, Homo sapiens
  misc_feature (90)..(90): n is a, c, g, or t
gtttaatggcagagctattttcttctcaaactgttcaaaatgatgaacgaagatgcagctcagaaaagcgacagtggagagaagttcaantggcagtagtcagacgaagaaaaagacccaagaaggtaaattgctggaattaggcatgtctgtatggtctgtatgtatgtacatagatgcgtctgtgtgtgtg

SEQ ID NO: 645934 - DNA, 168 bp, Homo sapiens
gattgcaaaaaaacaggattagaaacccccttaaaaaaaacccccatttaaagttttttttcctcctcaaggaaccactaggccccctttttaaaaacccctttaaagcctaattactccaataaaagtaactaaaggtttggagtctggttaaataaattttgagta

SEQ ID NO: 645935 - DNA, 250 bp, Homo sapiens
tacactcactagggcggaaaacctttagggcgttcttctgctcttataattgaatcctgagcttcatcttccgcttttgctgcctgatgcagctcctacttccttgatatgctgctaaggaggcacagtggctttcttccttagcctttaattggagagccatcatcctcaagctttcatcgtctctctccaaagcacaggtttactccatcagtagccatccaatgtcatagtccacacgacatgccag

SEQ ID NO: 645936 - DNA, 945 bp, Homo sapiens
gccgtttgttgccaagggtgatgcaggtactgaatgcctgatgccatgtgttgtgaagctgagctcaggcgattacaatgacgattcagctgtcgcatgcatcacgacacaccgacggctgtgaggtgggagcaacacccaggataagaatcaggaacctgcgtcccctgtatgacattcctatactatggttgagaaggccccgaggatatttctctcagtataaaagaagcttacttgggcgtaaagacacggctcaatagtggactggtggacctacaattagaccgagctcgagcccagcgccactaggaggacatgttgccttgcctcttttctcaagtaggcgtacctgctgccactgtcaacccattggcagtggatataaacatagctgaggctctttgtcggcaaaggtctgagactcatcatgatgtgctcaagatacctgggcaggattgattgagcctaagaggattctactctatcgaacttatcagcatgacactgcttttgcatgcaatgagagtccaagaggctcattagggaactggcggaaacgggagttgcactaggccagtaaggagaggatgccctattccgagctgtggtgtgcacgagtattactccctgggggggtacccaataaatagcagaaacggcaagtgtccatgtcctttgttctttcgagtgggagcaggtccgttacttgacctgctggggtcggaagtatcgatcgtctcagtaggtctcctcagtactacgacaaccccgtattttggcgaaaggggagattgagccctttgagtctacctttctgtggatcgggaacggccattatgcatgcccccaggagggagccccgaaaacctcccggggtttggtgcacgaagggagaaccccttcaaccgacggacgctacacttacccccaacgcaactggac

SEQ ID NO: 645937 - DNA, 101 bp, Homo sapiens
ggctataccgtgactggcagtacaaggtcagcggcgacgtgctggcggcttcgctgcagtacaagttctgatccaggcgattgcctgaagcagtgcgaagg

SEQ ID NO: 645938 - DNA, 750 bp, Homo sapiens
actcaaagaatactaataaatgtgtactcaggtatatgtacagaaatgctgtaacattataattttaaacaatttaaaacagactgagtttccaaagtcagggtccaggaaggaaaggggggctatatatatactgcgggaaatatcctaccaggcagtcgaagaaggatgatggatacacacacacacacacacacacacacacacacacaccacacccccacacgcgtgtgcgctctccctaaatcacagcaaatcgcaccgtgccccaccgccccacaccactcctcgtgccccaccacacgtgcagcgccgccccacccgcgcacgccgcgcctctcgcccactctccccgcaccctgagatcgcggagtgccaccggtctctctatcgtcgcttccacccattctcctccccctccctccgcccctcccaccctgctggcccaccgccctctccccgccccgggcctcccctcgctgcccgcctcccccccccctccctctccctccccccctcctccccccccccccccgccccctcccgcctcctccccccccgctccccccctcccccccacccgccccacccatctcaccaccatgcccttcttccccgccacccctctccgcctccgtccctccccccccgccacccgacccttcctcacctccccaccccctcatctccccctccgccacctacccctcctccccccccctcccctccgcccccctcgccctcccacct

SEQ ID NO: 645939 - DNA, 943 bp, Homo sapiens
gtgtctatagtcaatgtagtctgtccttcactacctaccatatgtactagccgccactagctgctgcatagcatgcatagctgccgactgctagctgcaacgaatcgtcagcagaccccacagacctatagcgacgtacgtcgcatacctccatcggacagacaatttaatgaagtaagcagtcagaagccatgtgctaacagtgccagcggattcacaaactcgagacaagggatgaaacaatgagaaatacgcaacccaacagtccttacaggtgataccacttagtccagggagcttcaacttgcagtgcttggtcgattgacccttcgcaagcctgacacccacaaatttcatagtgactctaacacgagtcatcacaggacgtatcgcattactccgctccgcctcacttgcacgacgcaacacactcactatccgacatactcacatggcctgcgcctgagcacgctacatgcctatagaccccccattgatgagccaaactgacagccattaagactctgcctcggcactgacaacgaagaaatcccaaacgactggcacccaaacaccgcacctggacggactcgctctcacaccacgacaaagcactggaaacatgccattaccatcgacacacacacaacacaacaggacaaccaccactaagaggacctccacacgaggatccataccaccaccaacatgacgatacaccttccaaggagcatgcgcaccacgttaacggtatacttaaaaggaacaacacgaaaacggggccaacacccaaggacaacagaacaaatggaatacaaagtgacaagaacaagaacaccacactcagctacttccgtaaacgccaactacgccacaggaccaatatacagcacccggaaacacacccagcacagtacacagtaaccaaacacaagcagatggg

SEQ ID NO: 645940 - DNA, 118 bp, Homo sapiens
accacaggcatgaaaatatgtattactcagaggtggcttaatacatgatatcgctttcttgtggttgtttttttactgaaataactcatgtttgtgtagaagagtgctgtggttaaga

SEQ ID NO: 645941 - DNA, 195 bp, Homo sapiens
  misc_feature (7)..(7): n is a, c, g, or t
  misc_feature (10)..(10): n is a, c, g, or t
  misc_feature (74)..(74): n is a, c, g, or t
  misc_feature (113)..(113): n is a, c, g, or t
agtgctnccncctgctcgggcgctgcggccggcgttcgccactgaccagtgagctggacatcttcgtggggaanacgacccttatcgacgaggacgtgtatcgcctctggtcngatggttactcggtgaccgacgcggtggccctgcggtgcgctcagggaatcctggagcagactggcgccacggcagcggtgc

SEQ ID NO: 645942 - DNA, 595 bp, Homo sapiens
  misc_feature (13)..(13): n is a, c, g, or t
  misc_feature (27)..(27): n is a, c, g, or t
  misc_feature (59)..(59): n is a, c, g, or t
  misc_feature (100)..(100): n is a, c, g, or t
attctgctcgatncggttacttcatgncagagaagctggcattcatcccagcagctgcnacgaatggattcctgggcgaagcatggagactccagtgtgnctgtgtggacagtgcctatgaagtcatcaagctcaaaggctacaccaactgggccatcggcctgagcgtggctgacctcatcgagtccatgctgaaaaacctctcccggattcaccccgtgtctaccatggtgaagggaatgtacggcattgagaatgaagtcttcctcagtctcccgtgcatcctcaatgctcgggggctgaccagcgtcatcaatcagaagctgaaggacgatgaggtcgctcagctcaggaagagtgcggacaccctgtgggacatccagaaagacctcaaagacctgtgactgccagtctctaggctgtagaacacaaacctccaatgtgaccatgaacctttagtcttcagccatgtatgtaggtcacagtttgcttcttccctgacatgtgatatgagctcacagatcaaagcccaggcttgtttgatgtttgcactaggagctcctgatcaaataaagttagcaattgcagcataaaa

SEQ ID NO: 645943 - DNA, 722 bp, Homo sapiens
  misc_feature (173)..(173): n is a, c, g, or t
  misc_feature (515)..(515): n is a, c, g, or t
  misc_feature (524)..(526): n is a, c, g, or t
  misc_feature (530)..(531): n is a, c, g, or t
  misc_feature (540)..(540): n is a, c, g, or t
  misc_feature (545)..(545): n is a, c, g, or t
  misc_feature (563)..(563): n is a, c, g, or t
  misc_feature (569)..(569): n is a, c, g, or t
  misc_feature (571)..(571): n is a, c, g, or t
  misc_feature (573)..(573): n is a, c, g, or t
  misc_feature (583)..(583): n is a, c, g, or t
  misc_feature (585)..(585): n is a, c, g, or t
  misc_feature (602)..(602): n is a, c, g, or t
  misc_feature (616)..(616): n is a, c, g, or t
  misc_feature (622)..(622): n is a, c, g, or t
  misc_feature (625)..(625): n is a, c, g, or t
  misc_feature (628)..(628): n is a, c, g, or t
  misc_feature (721)..(721): n is a, c, g, or t
tgagccgcagcctggactcggcgcggagttcctggagcggctggaagcgcggggcggccgggagggggcagtcctcgccggcgagttcagcgacatccaggcctgctcggccgcctggaaggctgacggcgtgtgctccaccgtggccggcagtcggccagagaacgtgaggnagaaccgctacaaagacgtgctgccttatgatcagacgcgagttatcctctccctgctccaggaagagggacacagcgactacattaatggcaacttcatccggggcatggatggaagcctggcctacattgccacgcaaggacccttgcctcacaccctgctagacttctggagactggtctgggagtttggggtcaaggtgatcctgatggcctgtcgagagatagagaatgggcggaaaaggtgtgagcggtactgggcccaggagcaggagccactgcagactgggcttttctgcatcactctgataaatgagaagtggctgaatgaggacttcttgntcaggaccnnnaagnnaaattacanaaggngtacccttctttttacangcaaangnanatgtcctggnanaaccgtggggtcccagnagtcctgacacatnctcgcnatngtngaggaagccgtcgcctcagggatttggccctgaaccctctgtgtcactgcagtgcgggttgtgggcgaacaggcgtcctgtgcaccgtggatna

SEQ ID NO: 645944 - DNA, 257 bp, Homo sapiens
ccctgtctctactgaaactacgaaaattagccgggcgtggtggcgggcgcctgtaatcccagctactcgggagtctgaggcaggagaattgcttgaacccgggaggcagaggttgctgtgagccgagatttgccactgtactccagcctgacgacagaacgagactccatctaaaaaaaaaagagtgtgcatgtgtgtgtgtaagagagagatatcctgtgcatttaaaataattctggaatctcctataaatgtaa

SEQ ID NO: 645945 - DNA, 442 bp, Homo sapiens
agcagttacgatgctgggcatcatcatttggtacaacgtgtcaaccaacgattcccagaacttggttttctttaataatcctccaacatgccacattgagtcaactactggaggtgatgagctggcagttttcatcagtacagttggtcgtggtcttaactcacgatcaactccgatatgcttggcagagagagcttacagatccaatctagactacagctgatgtgtcacctcgacctggagccatagttctgcaagcgaacatttacctgtgtaaatcatttaccattttggacatgtgcttgaagacaatattggactctaattacagaaacacattcttcccctattggattgatgggtatgtcatgggcttagttagcaaagagaaggaacggctgttgctaaaggataaaatgcctggcacctttttattaagatt

SEQ ID NO: 645946 - DNA, 142 bp, Homo sapiens
ttcagaatctgtcgaactattcaggctgcttttagaggcattaaagttagacaaaaattgaaaaatgtatctagagtgaaaagatggcagccacttgttaaccaaatctgcactctgcttgttacagcaagtttaactcagt

SEQ ID NO: 645947 - DNA, 306 bp, Homo sapiens
attttcagtagagatgtggtttcatcacattggtcaggatggtctcgaactcccgacctcaggtgatctacccgcctcgacctcccaaagtgctgggataacatgtgcgagccactgctcccggcctacatttttattaaaaacctgaatttgaagatacattccaatcttacataaagttcatgttgggtttttacattacctaattagaaaaaaccttttttaaccaattttctgtgccatgttatgttaaatactattaaatatcttgtgtgaccaaccgtcgacgcggccgcgaatttacta

SEQ ID NO: 645948 - DNA, 326 bp, Homo sapiens
aaatgccccctagcgggaatgtctgggcagtcacccccatcctgcgcgctttttgcaaagggctgctggcaggtgacagacgacacggttccgcaacagcagtcccgagccctgagattctgaatgtcagcaggtggctggagagtatcaccagagccactcaggaaccagccatgcggaatggctgggtttcttattgaacatgaaatgcttcctctttggcctggactgttttgctaaaattgttagtgggttttggggcaggccagtgtatgggaaacttttttgttgttgagggggggcgatggagtctccctctgttgccc

SEQ ID NO: 645949 - DNA, 495 bp, Homo sapiens
ggcggggcgcggtggtcacgcctgtaatcccagctctcagggaggctaagaggcgggaggatagcttgagcccaggagttcgagacctgcctgggaatatagcgagaccccgttctccagaaaaggaaaaaggacaaccacacaacaacaaaacaaaaaaaaaaaaaattgtgtggccggccgcgtgcggaccaagagaaagggtttcataaaaaccactttcgcgttgtggggcgcgccgcggcgcccaaaggtggggtgtactgggaaccccggggccaaacaggcgcggcgtccaagagagaaccccgggcgcacaaagcctggggggcggggttctcctccaaccaaataaaaaaaacccgccgggggggcaacccggggggcgctctgagacacaacctccaaggtgggggtgtcccaggggccaactagcggggctcatcccacagggggtcccacggagggcaaaataaaattagccagcggggggag

SEQ ID NO: 645950 - DNA, 134 bp, Homo sapiens
actctagctcggtacccatgggaagatatttcctttttcacgttacgcctgaaagcacgccaaatgttcacttatagacactacaaaaagagtgtttcaaacctgctctgtgaaagggaatgttcaacactgtg

SEQ ID NO: 645951 - DNA, 283 bp, Homo sapiens
aacaagttttttttattatcatgtttacatagcactgaggacacaaaacaacgctggaagctcagctgtctgattcatacgctgtattgctgactctcacttctcccttcccctctctactctacctctctgcaaaagaaggctttccttccagagctggcagctgcccctgcttcttgacaggatgagcaagacagcggtggtttaagcaaggtcttcgctgtgctccggagagatgtggatattctgggggaacatgcctatgttataacatttattgaat

SEQ ID NO: 645952 - DNA, 816 bp, Homo sapiens
gtccctgcccctagtcacctagctgtgagggtgcctgagtgctgaatggctccacccctacccccagccctgctatctgacctgtggctctggagcccctgcccctgcctgcataccccgagcaccccaccctccaggcctccacataaaggagaggagagggctgtctgcagcagcatgcacatcagccaccataacgccagggatggggccagccgcagaatgggctcagagaaagccccaggtgcacatcagacagagagccctgcctttcagttgccaaaagcctgcactcagaggcgaatgccggcaaggcacacaagggcatctgagcacgcccctgtgggacattggagacgcctgccccatgggacgtgggagaagccatggccatggactaggtgtttgaggcaccggacgcagacatctctccgtgtgctaatcctcccacctcacacaccaccactcacagacatcaaagccaagtccacgctggccagcagatcttcacactactccaacactcacattacttaatcttgggtgctatataacctttcctcgccctgaccgtctgcgtcctctagcccaataacaccggtcccttgagtgtttgccgaaccaacaccaacaccaacccagcaacaccgtcggaggcccaacacaatacatccggggacactgcgaccacaagctcaagtcatattgcactacgtgcatccatgcgccaccatacagcaggaattccatggtacgccccagactatctcttggtcccacaccgtgtgtgaccaacatcagcggcacccacccata

SEQ ID NO: 645953 - DNA, 309 bp, Homo sapiens
tgaacaccaatgctggtagcaacatttattaataatagcccaaatgaccatcaacaggtgaggagataaacaaaatgtggtatatacatgcaacggaatattagccttaaaaaggaaggaaatactggcgcatgccaccacttggatgaagatgaaaacattatgctaagtgaaacaagtcagttacaaagggcaaatattgtataattccacttacatgagtacttagcgtagtcaaattcacagacaccgaaagtagaacagcggtcccacgggctggtggaaggagaaactggggacctattgttt

SEQ ID NO: 645954 - DNA, 588 bp, Homo sapiens
tgggagtcaagatggaggagtacgcgcgagagccttgccccatggcgaatctgtggatgactgtggtggggcctttacgatgggtaccatgggtggctggtatcgttctcaagcaatcgaaaggttttcgcaatgtctccagtgggacgtaaagccacagagctacgagggagttcgacagctatgaaaaccagggctccacagttaggaggtagcttggcagtttggggagggctggtttcccagtgattgactgtaggtatgcgttcaagtcagaggaaagaggaagatccctggaactcctagtcacaaggtggtgccttaacggggagccatactggcagcaaggaaagtggaccatgtggccatggtggggtcagccgcaattgggtggcatggctcctagctttgattgaaggagctggtatctgtcgacaaaagtttgccgtctgtcgcagttgtcccaagtggtcctcaggttgcagaagagccctcccagtggccttcaactgcagtgtaccttcctcacctttggggactatcgaccaatatcagtaggacttcgtttcctaggatttctgttaacag

SEQ ID NO: 645955 - DNA, 319 bp, Homo sapiens
cggcggtgatctgagaggacccgtgcagatgacattctttaacaataaataatttatctcacatcttaagtcaagtctctcctaagttgggggagaagggggaagaaaatgtagtaggcttagtggggactagcaacagaacgtgaaatcctattcggtgacgtgcagtataaagagatgatggatcacgtggcagagttacaaggcaagcactagtttaaatctgaattagactagggccatggacctgatatacctgttaaggacactacggtgtatacgatggtagagacaatatacacataagggggtatcctaa

SEQ ID NO: 645956 - DNA, 1424 bp, Homo sapiens
  misc_feature (616)..(616): n is a, c, g, or t
  misc_feature (644)..(644): n is a, c, g, or t
  misc_feature (728)..(728): n is a, c, g, or t
  misc_feature (855)..(855): n is a, c, g, or t
  misc_feature (1044)..(1044): n is a, c, g, or t
  misc_feature (1089)..(1089): n is a, c, g, or t
gcgtgctctgtgtcctcctgcgctgtcgtctctgcggtgctagtccgacgccagtgtggtggctccaagttcgggtttcctttgttccccagggctcttctctcggtggtgcttttataggaatatttttgtatgtcccaggtgccccccgggggtttgcgaccccgcttggttcccccccattgtttggtcttctttccccgtggggaaaacctttctgaaccactttgggtgtattcccacccccgaatggtggccccggcttgtaccacccctcctttggagagggttttgttgtaattgcccaccccgctgttgccgcggtgtccccacacccacgggaaatttggttttggggaaggtgcccaagcgcaacatgttgcccgcttgtggagtttgagacttccccctgtccgcctgcccccgttgtggggtgttgggaccgcttcccctttatagggggggccccttggctgttttgagcagaggttacccccgccggcgcatcccatttgtttaggtttatgaactgttgagaaaccccgttttgccccccaaagccccccacgtcttttcccaagaatgtgttctcaaatagtgttttcgccccacgtgngttgttacaaaaatagtttttttcgccncgcagatacacacaataggcgcccgcatgtgacccacccacgattctccatatatagatatatacttgcgcctgcgcattggangaaaactatttttaataggatatctccttgtgaaagatgttttcctcatacaacactagtgtatatttctctttatataaagagatcgcgatccccccgcgggatattctctacctctatatatatntagagatatatagagataggaagccccgcgtgaagactctgtctcttttttcctcgccaaaataggtgaaatatgccacgccacaatatttatatacaccacgttactcgcccaccccacgatatttgttgttatatcaccatctcatatttgagaaatattacgccacgtgatagcctttaatatganaagatatttgtgtccaaggttatataaatatgacgccacgtttanagataattaacacccatatttatagccatagctgtggacatttagtctttataggatatttatatcccacaaattgcgtttagtgccacccatagccagtggtcttgtgatattttgataataatagtggtgtccataataataaccattaatgattataataccataataagaatgaggtggtattcaccattattcctaataatagggataatgctgtttattgtccagaaaaagtaaaatccgttcttctttccaattaatggcccctttattttgggacccggcttttattttccccgatattatttctatttaatactcttttctctcca

SEQ ID NO: 645957 - DNA, 768 bp, Homo sapiens
  misc_feature (93)..(93): n is a, c, g, or t
  misc_feature (162)..(162): n is a, c, g, or t
  misc_feature (209)..(209): n is a, c, g, or t
  misc_feature (258)..(258): n is a, c, g, or t
  misc_feature (283)..(283): n is a, c, g, or t
  misc_feature (311)..(311): n is a, c, g, or t
  misc_feature (363)..(363): n is a, c, g, or t
  misc_feature (381)..(381): n is a, c, g, or t
  misc_feature (383)..(383): n is a, c, g, or t
  misc_feature (412)..(412): n is a, c, g, or t
  misc_feature (444)..(445): n is a, c, g, or t
  misc_feature (468)..(468): n is a, c, g, or t
  misc_feature (476)..(476): n is a, c, g, or t
  misc_feature (512)..(512): n is a, c, g, or t
  misc_feature (514)..(514): n is a, c, g, or t
ggaggccccgccccctgagcctgggtagcggcgcgagggcgggagaaccgtcgcgaggaaaggcgaactagtgttgggatggccaccaactgngggagcctcttgcaggataaacagcagctagaggagctggcacggcaggccgtgaccgggcctggctgngggagtattgctgaggacctcacaggagcccacttcctcggaggtgntgagctatgcccattcacgctcttcccctcatgtccccagtgccctgtngagcaagctatgctgtgcagatggncttcaactgctagtggatgctgtcagcnagaagctgcttcctgagcaaactctttccagcaccatcaaacaggatgattnaccgtcgtctctttgacntnccacaagcaagtcctaaaagagggcatgnccagatgtgtcctgggctgaatcgtcagactnnatgtccagcgcagggaagatggntccccagnccttgaaacagatgaaatcaacaccatctctgcagntnggggggctggctccggaacccagtgtgacgaatgtttcagtgtctgggtagacaagaagtggaagatctcttaatatcagaggatggcctggaatgcaggctggagttaggtcaccatgtctgtgtctgttgtcaaaaaaaaaaaaaaaatttgggggggcggaagtttaacctgtggggggcaggaagaatgaaggtcacgacggcgaggggttcacaaagcgggcggtgaacggtgggttgtctagtaaagg

SEQ ID NO: 645958 - DNA, 833 bp, Homo sapiens
  misc_feature (15)..(15): n is a, c, g, or t
  misc_feature (61)..(61): n is a, c, g, or t
  misc_feature (63)..(63): n is a, c, g, or t
  misc_feature (65)..(65): n is a, c, g, or t
  misc_feature (68)..(68): n is a, c, g, or t
  misc_feature (83)..(83): n is a, c, g, or t
  misc_feature (110)..(110): n is a, c, g, or t
  misc_feature (116)..(116): n is a, c, g, or t
  misc_feature (119)..(119): n is a, c, g, or t
  misc_feature (153)..(153): n is a, c, g, or t
  misc_feature (163)..(163): n is a, c, g, or t
  misc_feature (180)..(180): n is a, c, g, or t
  misc_feature (183)..(183): n is a, c, g, or t
  misc_feature (190)..(190): n is a, c, g, or t
  misc_feature (194)..(194): n is a, c, g, or t
  misc_feature (239)..(239): n is a, c, g, or t
  misc_feature (243)..(243): n is a, c, g, or t
  misc_feature (320)..(320): n is a, c, g, or t
  misc_feature (328)..(328): n is a, c, g, or t
  misc_feature (332)..(332): n is a, c, g, or t
  misc_feature (378)..(378): n is a, c, g, or t
  misc_feature (394)..(394): n is a, c, g, or t
  misc_feature (396)..(396): n is a, c, g, or t
  misc_feature (423)..(423): n is a, c, g, or t
  misc_feature (447)..(447): n is a, c, g, or t
  misc_feature (449)..(449): n is a, c, g, or t
  misc_feature (511)..(511): n is a, c, g, or t
  misc_feature (519)..(519): n is a, c, g, or t
  misc_feature (540)..(540): n is a, c, g, or t
  misc_feature (661)..(661): n is a, c, g, or t
  misc_feature (681)..(681): n is a, c, g, or t
  misc_feature (709)..(709): n is a, c, g, or t
  misc_feature (806)..(806): n is a, c, g, or t
cccctcttgccttcntcctccacggtgggtgccagcaggctctcccctttccagtgacctncntntcnctcctcccagaaccncacttggctttaacctccagtgactgnacaganccnacccagggtctaaagctagggaaggcagctgaanctcacctttnttctcccttcttccacntcntcatctnattntcatttcttgtttaaataaaatacagaaaagcaagcgcagtggtntacntgggagaatggattcaccccggggctgggggcaggggtgggagtattgggggcggggcaggcagaggaacctcagcnaggtgtantggnatcacagcaggccaagccacaggggcccggctcaagctgtcctctntctctctctctccctntnggaggctggcctggcagtgagcctgcngtccagaggaggctggcggagaancntctatgcctgcctctcaggcaccatgttacagggtccccggggtgggggcagcagccagggnagaaaagnagaagctagcctctataaaantacctctttccctttgcttctagaggaagccctctttggttttaaggcagatgtggagtttcctggaagcagggtaaaggaagggaggagaaattaggattgagatagatgagatagatgntttttttttttttttgcttntgtttttccttcagtataaaaccactgnagaaaataacttctcttagaaaaaaaaatacagaagaaaaaaaccaaaggggttatttttctttggcttcaagccccctcccatgtacgtgcagggnaggggggtgggcatgaggtgaggagga

SEQ ID NO: 645959 - DNA, 625 bp, Homo sapiens
agtatatcaactgtctctgatggatgatagagcttggggtcggtgtgagagacatggtatcctgacgggatgatagaactgggtcgtatggagagccgtgggtccccgtgtgtgatgatagacgctggatagtgtgtgagagcgtggatcgccgagtgagatgatagagctgggtcgtgtggagagcctgggtccctgagaggatgatagagctgggtcgtgtggagagcgtggatccctgatgggatgatagaactgggtcgtgtggagagcctgggtcgctgagaggatactagggccaggtcatgtggagagcgtggatccccaaatgggatgatacgagctgggtcgtgtggagacgcctggatcccagaatgggatgatagagctgggtcatgtggagagcctgagtcccttagaggatgatagagctggggtcatgtggagagcctgggtccctgagagggatgatagagctgggtcgtaatgaagaggctgtatccccgatgggattgatagagctgggtcatgtaggagagcctgggatcctgagaggataaaagaactgagacgtgtggagagactggatccctacgggatactagaactggtcgtgtgagagctg

SEQ ID NO: 645960 - DNA, 233 bp, Homo sapiens
ctctagggaatggtataggggaagatgggaagtaagagtcacatatcagaggggcctccacttatactaccctgcagacgagggtatatgaagtataaaggggtgggagccccgaggtgagcgggaacggtgctgctttatttgaaatgtttacttacctcattctgtgccccagtagggggtccagcctcatctgtctggcttggccctgtgtacctcctgtcccctgctcc

SEQ ID NO: 645961 - DNA, 188 bp, Homo sapiens
tgatgttatccccaacacctgacaacaggatgaaagccctgtctactgcaattccttttacccagtgtatcatgtctacctatcaacagaaaattacaaagcatacttaaaaggcagaaaatgcagtttgaagagactgaacaagcattagaaccagagtcagtcgtggcaggagtgttgggcgataa

SEQ ID NO: 645962 - DNA, 300 bp, Homo sapiens
  misc_feature (148)..(148): n is a, c, g, or t
  misc_feature (178)..(178): n is a, c, g, or t
  misc_feature (265)..(265): n is a, c, g, or t
ctccggtcctagctggcctccgtgcttccaccagcgactggatcttacgggtcaacggaacagggtacctaccgggcatgggtcgtgtgctgcttcctggaaccgagcgtttgtgagcatccaggaaaagatggcagaagaccctctnacctacaaatcccggctgatggtggtggtnaagatggacagttccatccagccggggccttccgggctgtccttaagtacctgtacacgggggagctagatgaggacgagcgtgacntcatgcgacattgcctacattggtgaagtggtcga

SEQ ID NO: 645963 - DNA, 111 bp, Homo sapiens
tactgcttgcagcgtggagaatgcgtgggagattgtaatgggctatggagacagtgtcgtataaccttatgctacggtgagtggtaagaaccctctcttcatagggaggtg

SEQ ID NO: 645964 - DNA, 890 bp, Homo sapiens
  misc_feature (132)..(132): n is a, c, g, or t
cacaggcgggtgaccccccgctgctgcctaggacccctgggccactggctctacagccggtggaaccccctgccccccatatatccggccggaccccaaactgcgcccccacctaagagccgcctcaacctntgctggggaggggcgacaaagtgccccccttcaggggacaacacggggggtgcacttcaccaagcgcctggcccgctgggggggtcatcccaagaaaaccccgcgcccacgggtattcccccgccccaagacccgccccaagtgccgggccacaacgggttcgccacgccccacccccaagaaaaacacgggggcgcccccacccccacagaggtcctcaacctcctagacgcccccctcgaccacccacccggcgcgtcgggaaacccccctcaccggagccgcccgtgttggcgcccaccaacacgctcgtgggtgtgtccacacaggcacccccccgcgagcctgccgcgggcccctcgtagaccacccggggacaacccgctgtggagaggaggaacgcccacagaccgagactgcttaacccccaccgcgcgagtaccaccacgccgcgctagagcgccacgtcagtccgtgaacccccgcgcagcgggagacaccccacggaaagagggggtgtcccgccggttggagggggggcccagcaccccccgcgagaggtgtggccccgccacacccccggctcggcgaaaaaagtagtgtgtaaaagaacggtgggcgtggtgatcaccgagggccccccccccccccgcgtcccccccggggccccccccccccccaaaaagagggggggggggggccccggggccccccgaaacccgcggggggcccgggccccccccccgggggggttggta

SEQ ID NO: 645965 - DNA, 1016 bp, Homo sapiens
  misc_feature (657)..(658): n is a, c, g, or t
gatttctatgtgattggcagctcctatgaaaatgagctgatgcttatggctgttctgaactgtctcttcgactcattgagccagatgctgaggaaaaatgtagaaaagcgagcactgctggagaacatggaggggctgttcttggctgtggatgaaattgtagatggaggggtgatcctagagagtgatccccagcaggtggtacaccgggtggccattaacggggttgaaggattggttccccctttaagggaagcaaggaaccggtggttcttcaggttgccttgaagtcaaggccaaagaaaccagaatctcaggttggttacacttccttctcggtgtgaaggaccttacactgtgttccgttggcttctttcattccttcttctcaaaacacacttgtgcatgtagtcgtgcgtgtggaattttctcactctaagtttccccaaatcgaatgtctctacgagggtcactctcggggaatcacgagggaactccttagaattctccaattcgtgttgtgtgagttggccccacgtcaacgctcacccttacacgccttcgctattcgtttttcaattctttcttggccagttctagggcagctaacacgctcccagcatcattctagataactacgggcaggtggaagcaccnnctctttcttctctaagactcggatctatggctcacattgctccgcttgcccttgacattttttgtaaacttctgtgacccgtttgctgtagcttacactttcagattaacagtaggagaagcgaatgtgctgaggtggtttgcctccctttggctctaccttgagcctcatccccaacagcccagcgaggggagagagacacgacgaattcttttctatagaaacgaagtgggggcggggaatggggaggggatttagtcgcaatctagaggcctaaaccccactaaatgaccctcagtgtttccttccatgcattcttactggcgtgtcctctggcttggcaaacaggattggggaa

SEQ ID NO: 645966 - DNA, 350 bp, Homo sapiens
caggcatgagcacggcgtactttgtgtgtgtatgtgtgtgtgtatgtgtgtgtgatggagtttagctcttgccctgctggagtacaatggcaccatcttggctcactgcaacttcgcctcccaggttcaagcgattctcctgcctcagcctcccgagtagctgggattacaggcatgcgccaccacgcccagctaattttttctatttttattagagacgagtttcactatgttgttcaggctggtctcgaactcctgacctcaggtgatccatccgcctcggcttcgcaaagtgctggattacaggtgtgagcccgcgcgtccggctgtcactttaaagagtattataa

SEQ ID NO: 645967 - DNA, 168 bp, Homo sapiens
agagtcagtgttcagatagaggtgtatcctgtggcagtgcagtgggggtgggcagatgaggacatctctagcagggctgtgtcggtggagtagtggaggtaatggccttgttggattcggctgaagagagaccaggaggccagattctggagataatgagcaggaact

SEQ ID NO: 645968 - DNA, 494 bp, Homo sapiens
tggtgtctgtatggatacaaatgaactctctgcacctggacgggtatgggctcatggcacgagaacacagtgcatcatcagacaagagaatggcacatctgcatactggcgtttaaggatcacaatttatacaaaacctatggctgtagccaggtgcagtggttcatgcctgtcatcctacgtacttgggaggctgaggcacgagaatcgcttgaacccgggaggtggaagttgcagtgagcccagattgtgccattgcacaccagcctgggcaatagggaagatagacacggaggcctcactgtgttgcccaggctagtctcaaactcctggactcacgcgatcctcctaccttggcctcccaaagtgctgggattacaggcagaagccaacacgtctggcctgatgtgtctttcgggtactgaatggtagttaactgagtgtgttatctatgtaaatattccttgaggcaatatgctcatgattggtataca

SEQ ID NO: 645969 - DNA, 137 bp, Homo sapiens
  misc_feature (6)..(6): n is a, c, g, or t
cgcggntctgagccaaaaggacaaagctagaggcatcacactacctgacttcaagatatactgcaaagctgtagtggctgaattagcatggtactagcataaaaccaggcagtagaccaattgaaccggatagcttg

SEQ ID NO: 645970 - DNA, 115 bp, Homo sapiens
cacgaaatcccaggtcgggctgtcccggcatcttcaggccggccttgtcgaacaggtcggtgcggtacatcaccatcgagctctcgccgtagaacggcgcggcgtagagcttgcc

SEQ ID NO: 645971 - DNA, 363 bp, Homo sapiens
  misc_feature (335)..(335): n is a, c, g, or t
gtcagtctgataggaagagtttcaatcagcagatatggtttggtgttccgggctggtctgttgggaggaagagaactggctgaactaactgaattgagtggcctcgaagtggtctgggacatctagatgccttaatttgtcttggataggggacggggggggcttgaatgttgcaaaaaaaaagttacccaagggatgtcagtttttatccctctgctatggttggatttccaaaatcataatttgcagaaggaaggccagcatttatgatgcaatatgtaattatatatagggtggcacactagggcggggtccttcccccctacaagttttgngccctttcagagattagaaactgggtta

SEQ ID NO: 645972 - DNA, 343 bp, Homo sapiens
  misc_feature (1)..(1): n is a, c, g, or t
ncaggtcggctttctccatttccacgagcagacattcggtgaggtcccgggcacagttggggtcacagagattgatggtgctctttcaccctttcagacacatactcttttacttcagccacattttttatgacttttctgtggcttccaggcaagtagtgtagaaatctgggaaaattattgtaacgctaagccaggaatgtgctgagtaggtggaagttctcattaaaaaatactcagcttagaatttctcattgtagtcacaatgcttgcggaagaggatgtcgtatatgacgttacagggcgcacagcctatgagaaaggtggggtcgaaagtctggcc

SEQ ID NO: 645973 - DNA, 360 bp, Homo sapiens
cgatgtgctgtaggcgttgtggtgggttagagagatgtggtattgaggaacgttgggaaatttggaatgagtctttgaactggattcgtgatggggtcatggatgagcagcatacgtgaaggtgttacatgagacgaggcatggaatgtgtgtactgagggaaacggggtcaggggccggcactagctggagcaggagcaggaaggggactctaggttgaacgggggcaagacactgtgtgttttgtggtctttagtacacatctaatacttatagatctgttagtctaggattactctttatatagatttgccaccactttagtttgtagaattgactatgtggtggcatcgataagca

SEQ ID NO: 645974 - DNA, 304 bp, Homo sapiens
ggctcctgcccagctaatttttgtatttttagtagagatggggtttcaccatgttggctaggctggtctcgaactcctgaccttaggtgatccgctgcctcagcctcccaaagtgctggattacaggtgtgagccacagcgactcttctagttttttctaactgtattatttgtctatatataagttttgactgtcaaatctatccatcttttcctttgagattacttatgttgctttcatactctgaaagcccttcctcatccacagattagaaaaatattcacttcaagcttttgtcgacgc

SEQ ID NO: 645975 - DNA, 297 bp, Homo sapiens
cccccccagggttttcaaaaaataaaaaatttgggcccctttgaaagggggttttgggggggccttcctttaaaaagccctcttttaaaaaaaaggggaaggttttttgttaaaaccacccttttggtgggggttttgtaataaaacaattccaaaatgggggggggttggaaacccggaacccccaatgggggaaaaaaaaaaatggttcctgtttttaattggggtttgggggggggcagattcccattttttttttaaaaaaagggttttaaaaaaaaaactttttgggtccca

SEQ ID NO: 645976 - DNA, 123 bp, Homo sapiens
ggctcggtacccgcaatttacattgacgcgtcatgccttacgtgggaggcacagttccagggaaagctgccatgtggagaagttgtctagccttccgttccagaaaattcagcgacagcgagg

SEQ ID NO: 645977 - DNA, 340 bp, Homo sapiens
  misc_feature (124)..(124): n is a, c, g, or t
  misc_feature (126)..(126): n is a, c, g, or t
gtttttttttttggggccccttggaccaaacccccccttttttttttaaaggggttttccccccaagtggggggggggggggggtaaacaaaaggggaaccccctttccccagggggggggggnantttttttttttaagcccccggggttaaggggccccccccgggtttttttttttttttttacccccaagggggggggttttccaaaaattttttgggggggggcccccctttataagggggggcaaacttggggtcccggggggggatttttttttttttttcccccccccccccccgggggggggggtttttaaaaggttttttccctttccca

SEQ ID NO: 645978 - DNA, 602 bp, Homo sapiens
tcagctgtcgcctcggattacgggatgggactgctgctaagtggggttctgcctgttccacttggctgctgggtctgcaaggcccggcccagctcatcctcagcctgccgtccccgccgccgtgctcggtgagcctgcgctggtgcggtcggctgtgcgcctacgtgcggcggttactgcaatgcccagtgcggcctggcgtggactggagggagggagcccgccaggtgtctgcgcgctggcgtgtctggccggatgacccaacacctgctgacccccgagccctgatccctagccctgacccctggctccgaacccgagtcctgaaccctgaactctgaatccgcctcgagtttgccacctggcctctcctcatcccaccggtgctgcccgtgggcccctggcctgcgctgtttgctgcttgctgcctggtcgagcagggttttaccttttagtgggatctgtcgtgttgacttgccttctatggccaggttgcaggtatttggttttaccatcagccaaggcccagcctgcccaagacatctttctctgtgtatacccactcttgcttgagtatccatgcacttcacttactcacaggc

SEQ ID NO: 645979 - DNA, 693 bp, Homo sapiens
agcgggacgcgggtgggtgtaccctcacagccccgtcatccggagtcataaggcacccgcgcgttagccccagcgccaggcacgcgagcggcgcggagggaggaaagctccgccgcgggccggacaaaagcccgccgcccacggcttgcccgccgtcggaccgagacgcccgccgcggtcagtcgctgtccgctggcggatggggtggccgtcgcaggatgctcgccgtgcccgttcatgaattagcggctgttgtcggtgctgctgcccaaccgctattcccattcccgtgctgcgctgtccggtcctctcccggcggggtcgtatcggcgtgtacatggttgtccgtttccctagcctgctagttctccttgtttttccaagcagttgtttggctttccgaagctcactttctgtctttaagaggtttaaagaaactaccagaccattttccaatgaatgtcttggtaccaccagacccgtagttcctattgattcatcagatttgcattggatattcgtatgtctgggtttacacctaaacagttgatttcaagcctctagctagtatgtatactgtccatcacatgttacttttgtatgcaatatgcctttatcaactggaagttactgttttgtgatgaaggaacctgtacagataacgccaatattttgttttcctgggtgaaaaat

SEQ ID NO: 645980 - DNA, 113 bp, Homo sapiens
ctccccagccacatggaactgcaagtcccatcaaacctctctcttttgtagatctgcgcagatatcaagtatgtctttatcagcagcgttaaaacggactaatagcaacatag

SEQ ID NO: 645981 - DNA, 437 bp, Homo sapiens
tgctacgaacatgtcgggtgccttatatcatgcggcgtacctttggtggcaataaactctactgggctgtattctctgaatatgtaacaacctatggttacggaatggattatgctcctgttgaatttatacctcgaagggacaagaagccgctctgcacaagacatagactcctaaatatggtcttctgaatactgtgatggagccatatatataaaagagaagttaagatacctacctagtcccaattagtatcagtatgataagatcttggcagaaactctttatgtgtatgagctactaggggtacctaaaccacaagaattaacacctgggtgctgaagccagaagatctctctgaaacttggcagctcatgtgtactaggaatctgtgtactacatcttggagctggagctgctgactcataaaggtccaa

SEQ ID NO: 645982 - DNA, 649 bp, Homo sapiens
aaaaaacaaaaaaaaaaaaataaaaaaaaaaaaaaaaaaaaaaaaaaaaaaaaggaaaaaaaaaaaaaaaaaagaaaaaaaaaaaaaaaaaacccaaaaaaaaaaaaaaaaaaaaaaaaaaaacctggtggcccctttggcccaaccgatttttaacttgggccagtttttgccgggggcccgaattggggcttattgggccaattcccccttatggggggccgtttaaaattaaggggccggggtttaaaaacggtgggactgggaaaacccgggggttccccaatttaatgcctttgggaaaaatccccttttcgcccggtgggggaaatccaaaagggccccaaccggtgggcttttccaaaagggggccaccccgaagggccaagggaatttggacggggtaaaatttgggaaaaaatcgggttaaaatttgggtaaaacggcttattttttacccaagggcccaaatgggaaaatcccttttattaaaggaaatccccggaaatgggttgggggttttccccttttgggaacaagggccccttttaaaagacggggcctccaagttaagggggaaaaacctttttttggggcatggggcccttggggcctttcccctcaggttttgggcccggggccccggcct

SEQ ID NO: 645983 - DNA, 183 bp, Homo sapiens
ggtgtaatgtggccaaaaaataaaatggtttgtgtgtgtattgggaggaaaggtgtgcaaagctgtggttgagtggtgaattgtgaatggacagatgatgtcagtactgtgaacgccgaatgtgggaggccatttcataacatttcttgtatatcaaaccacctgtggacacgcttcttttgc

SEQ ID NO: 645984 - DNA, 724 bp, Homo sapiens
ggctttgaggaactggagcctgaggagctgcgtgctggagcacgagccgtatcccgagcccgaagatgagccgcccactggtgcgtgcgctccctcggtagactccgttcccctgagggcactgaggtttcagggagctcctcgagcacgtccacagagagagcgacgagtagtgcacgtctcgcgagcagctgtatcagtcgcgtggtgaagcctgacgttgactgtgggccctgatctgagcgggagcccgcgtatgccttgggacacgctgtaatcgaaacgtctacgactgtcagtgattcatggtacggggctagcgactgaggacacctcccctggtagctagaagtagagcgatcgttatacgtaagctgactgacctatgagctcactcactcctgagaccaggtagcatgagaccctagcgatgggacctactttgttttggtttcacccccacttttacttggttaaaattttgcgaacttcggacttcgggcaagtaacgggcacaaggttcccattgaaacgttcggtcccgggctttcgaacactcgttatttggctttgtcgaccgttttcgttgcgaccataaattgactagcgagacagccaagacattattcggtgcggtaccgttactacctggaccctggttactagctgggagcaacgacaatagcacagttgctccaccttggtagcattttctgtggacatg

SEQ ID NO: 645985 - DNA, 1378 bp, Homo sapiens
ggagggtgcgtgcgggccgtggcagccgatctaaggagcaggggcgccgccgctagggacccgcacactccacctcccggggccgcagcatcggccatctcgttctactgccaccagtgaccgccaagcggatatatgcctgatggctggtgcagatccagcttcggacctcatcaacatgactgcaaactagtacctgacggccgatgcgttcgtggttcacaggttgaatcgcgtccagtcagcagtccttgacataagtaagcagaatcatggtatcgcttgagagacatgtccgcccctgactgatggcgaggcaagctcggccagattgtgaccatgcgcagaccacgctggggcccgtctatccctaggctggtcggcaccgaggtatcgcgtcaaaccagttgtagccttgccgaagcggccagaaggttgcccacgtgctctcgctgagcgtggcactgatttacgcattcaatcagtcgcgacgacacagaacgtagcaggtcggccttgggtcacgctgcgcagtccgtccggtgcgtgcacctgtggcggctacttctcgggcgtgccgaccggaggaagcgcgacctgttccctgcattcgctccgcagcatcgggttgctctcccgcggccggatgaaagttgggacggcgtggcacgaattctgtccaagtgccgaccactccaggtgtctaagcatactaattaggcagtcacctccgataagctgctaacagggtcgatctggaagcggcagcgtgcacagtgcccgaacggatgattcgatcgtgggacccagcagcaacggtgcccctggggggcgttctgactcgccgtcatcaaccccattcggcacctattcccagtgaaacccaggcgtcttaacaggcagttgtcaatgatacagttcggagccaaccggagttctcccattgtcgggcctcacgcaacgggagcgcgccttgtggttggtgtcgacccacagaaggcccgccccacctatgggatacacgactggagattcaacagcacccgaagaaaggagggaggcttctcgcggacattcgcagagcgcgcgccgcaaacactgtgaacccagactggggtgccccaacggggaaccgaccaaaaggggggggacgggccccacaagtggggcgacggaagaagagcaccaacttatgactgtagaggacaacaaaatgtcacccagagagagaagagataaacgacggaccaacaacagaagaaagcgctgtaccacagaggcaagttgatactgacttcgcacacacaagcagcagaagccgcacaaagcaacagacaagatcggacagaccaaagaagagtagtaaaacacaacgaga

SEQ ID NO: 645986 - DNA, 343 bp, Homo sapiens
  misc_feature (51)..(51): n is a, c, g, or t
  misc_feature (159)..(160): n is a, c, g, or t
ccctttttagaggaaaagcaagaagaaacattgccctgaaaggtgattttnctagtcatttcccaattagtacagaaatgttactgcctctgggtgcagtggttcacgcctgtaatcccagcactgtgggcggatcacttgagccccaggagtttgagnnccaatcctgggcaagatggcgagaccccatctctacaaaaaaatttaaaaattacctgggcatggtggcacacacctttattctcagctactcaggtggctgaggtgggaggatcccttgagcccaggtggtcaaggctgtggtgagctatgatcatgccactgcactccagcctgggtagca

SEQ ID NO: 645987 - DNA, 238 bp, Homo sapiens
ctgctctgatcagagtctacaacattgaatatcacttgacacaatggtgccaagcgtatctcacatcctgctattgattccctctgagtagctagttctcggtttgcagtaacattcaacaaaaatgtagagtagtctccagagcacgggaaacttggttccattgttctatcgtcctatgcttcgagccattggtcttcagtgtcatccttatcagactcttacatattcttagggt

SEQ ID NO: 645988 - DNA, 350 bp, Homo sapiens
gcggctgcctttcctttaactacattctcactctttctcagactccacctcagagaggaaggcacacagtgagcgaatcacttaatcaacaaaaccactctggtattataaattgagaaactgaattacaaataacagcatgtacaacaatttcagatacctgtccagatgtagagtatccacctagaaaaatgttctgttttctatttatccatcttatcctccagttctttaactgaattattacttgttaaatcacgcttcaggtaattcgtaaaacagacttcagggaaaaaagtacaatgtgtatattctttccattctctgttcccacagaaagctgcgataat

SEQ ID NO: 645989 - DNA, 725 bp, Homo sapiens
cggacgcgtgggtcgacccacgcgtcgctaagaattaggtactacagccatggagctggctgggtaaaatctaattggatatttcagtttcattcacctaccctgtttaggtgtttggtttggtttggtgagttttttttcactatttttgggacaagcaaggatcacacttgccgccctccctggttccttaatcccttttgctaaaagggggggaaaatccggatggataatcagggatgggctcgtggctgctcagcgtgtgtattatggcagcacctaaatccgtgattataggctttcatttctccgcaaagcctttatttgggcagttacgccaaagtgtgtttccccagaaaagtatagtaatattagctcctctttacttccctattctttcctcccctttttcccgtctggaccccaaacgtgtaattggcgccacacacatggacgtgggaccaagaaagcttttggtgttctggaccctggtaatatagacagtctggctaaatattcggacacgaagggtagcaagtagttgggggtaaataacgtcgagattatccggactaatacaaatcaatattaaagccggaaacaaaaatggaccttgttcccgggtgggtccgtggacgtcttcacgaaaaagggtgcccactagctgagggtgcaccaattcccacgagggcttcaaggtacccaccgtgtattccacaacctgg

SEQ ID NO: 645990 - DNA, 551 bp, Homo sapiens
  misc_feature (23)..(23): n is a, c, g, or t
  misc_feature (35)..(35): n is a, c, g, or t
  misc_feature (182)..(182): n is a, c, g, or t
  misc_feature (205)..(205): n is a, c, g, or t
aaagagagatgtgaccatgtcanagatgctggaanagcatttgataaaattcagttgccattgcaaataaaatagggataggagaaaactttttaaacatcataaaaagtatttgaaactaacagtgaacattatattaaacagtgaaacacaggttacattctcattaaagtcaagagcangacaggcttatttgttatgtgtntaccagatcctgtcagcataatgtcatcagtgtaatggacaggcattgtgcttgtgggatgtaaagatgtttgaggtcccttgagtctatattatgatagaaaacaagagagctaacattgccctgatgcatgggcagtaaacttaatactcttgttcctacttggtaaattcaaatgtattctgattttactaatgtatggaaatgaagaaaaaacattctctaggtcaatacttccatatcaggtgcctggggctgtgtaaatttgcttcaacagagatatgatatctggaattgcaattgttttttggcatcaccacctgattaaatttgtgatctgctgtca

SEQ ID NO: 645991 - DNA, 649 bp, Homo sapiens
  misc_feature (401)..(401): n is a, c, g, or t
  misc_feature (605)..(605): n is a, c, g, or t
ctcagtggctcacgcctgtaatcccagtactttgggaggccgaggcaggtggatcacctgaggtcaggagtttgagaccagactggccaacatggcaaaacccctctactaaaaatataaaacttaggctgggcacagtggcttacgcctgtaatcccagcattctggtaggctgaggtgggcagatcacctgaggtcaggagttcgagaccagcctggccaacatggcaaaacccctctactaaaaatacaaaaattaggccaggcatggtggcttatgcctgtaatcctagcaccttgggaggccgaggcagatcacctgaggtcaggagttcaagaccagcctgctcaacatgatggtgggtgcctgtaatcccagctactcaggaggctgaggtggnagaatcgcttgagcctgggaggcagaggttgcagtgagccaagatcacgccactgcactccagcctgggcgacagagtgagactccatcccagaaaaaacaaaaatagccggtatggtggcaggtgcctgcaatccactactcggaaggtgggccagcagactgcttgacctggaagcgaaggtgagggagccggatcatgcantgactcaggcgacgtgacagagcagactcatctcaaaaatcacc

SEQ ID NO: 645992 - DNA, 1267 bp, Homo sapiens
  misc_feature (519)..(519): n is a, c, g, or t
  misc_feature (530)..(530): n is a, c, g, or t
  misc_feature (1267)..(1267): n is a, c, g, or t
tgtaactttaagctgttaggtccagagaggaacagctcttaggacagctaggagaaaagcctgtagagagagtaaaagaatttaacacccatagtaggcctaaaagcagccacctaattgaagaaagcgttcaagctcaacagccgcactacctaagaagaaatcccgaaagcatataactgaactcctcagcacccagagtgggcaccaagtctagtcaccctatagaagaacgtaatgttagtataagttaacatgaaaacattctcctccgcaataagccgtgcgtcagattaagatacactgaactggacgagattaacgagccccaagtatctacgagatcaagccaactaagtcatgtgattacgcgctcactgtcaacccaagacaggcagtgctcataaggaaaggttagaaaaaagtaaacaggaactcggcaaatcttaccccggctgtttagcaaaaacatcacgctctagcatcacgcagtattagaggcaccgccttgccccagtngaccacatgtnacaaactaacaacagagccaaaataagaggaaaagaaagatagaatacaaagcctgggcaagaagcacaagatcgaggcggggggcagaaaagagaagtccgaagagggcaggtggggcaataaggagggcttcggggagccaacaattttcggtggaaaacacaggttgggcaaagaattggccgggggagcgacccggtagagaggaaggcccgagacaaaattcgagagaaaagcgcaggggtaccgcggtagagcttctttgcgtctctctataaaaacaaacaaacgggataaacagagcacaaaaacggcagcactggccagaaaaacaaggggccccgggaagttagcaacgacggagaggaaaaccagagggaggaagccatgaaggctggaagaaaagtcccccgggactagtgaccgcggcacacacgggtggagacagaacagaccacggggggacaaaaagcaaaacaccaaaagaaggaacaagaaacccaccaaacgaacgacaccaaccgacaaaacagatgagccacgaccagcaaatcgaaagaggcaaaaacacaggcaaacaagagagtcaatagcaaaaagtaaaacacaagagagaacccccaaagatttgggaaacccaccccagagaaaagagacaaacaaagacgcgataaaaaagaatccaacgacacgaaaaaagaagaagaaaacgaccatattctaaccatgtattcan

SEQ ID NO: 645993 - DNA, 882 bp, Homo sapiens
ccacgcgtcggtgcgtcgaccctgctgcacagcccaaggccttcgtggggctcagaccagcctgaaatgcgatcaccccgtaggaaataaagcaggcatctctggacctcaaaaaaaaaaaaaaaaaaaaaaaaaaaaaaaacaaaaaaaaaaaaaaaaaaaaaaaaaaaaaaaaaaaaaaaaaaaacaaaaaaaaaaaaaaaaaagagaggggggggcgcgcgcaccagcaagtatcccccgcgggggcgggagaccgagactcgacccgcgcagccagccacgtgtgtttgttgtgataaaacagagaggggcgcccatacagttaggagcggcgctattatacatattactaaaggagagagcacagaggcagcgcaccgcgacagtaacaacacaatagaggaaagaggcgagagggcagtacacagacagggcagacagaaaggacgtgaacatcgatgatgaagggagaaagcagggcagactcatagatctcccgtgatcgcggcggacgcgagagcggagacacccacacgatcgcggagcgccaccaaaagcactcgcaaccccacaaccaaggctatagttacaccagcccaccaccacgcaaggggacaaacaaaagaaataatgaactgagctagagagagcggaggcgtgagagcgagagcgggccgagtgacacaaacagagagcgcgggcacggctctgcttctgtcgtgcgcggcgtctggcgtgtgacagggagagcaggagcgtggcgagacgaatagagcaggcacggagaggtagatcgtggatcgagccgaatcggcagtaaatctatcattgaccagccagcgcacggcagctgctgacgcatgaggaacaaagaggggt

SEQ ID NO: 645994 - DNA, 147 bp, Homo sapiens
gatttcggcacgagctctctgggaacaatctaatgtctaaaccgccaaaaaagcgcccatttcttagctgctgaaatcagtgctctctcactcctacagagacgcaggtatcgaccatccccggcagtaggttagatgtgggtgatt

SEQ ID NO: 645995 - DNA, 253 bp, Homo sapiens
gggggggtttttttttttcccccccttttttggtttgggagccccgttttccccccattttggggggttttttcccccccgggccccccggggtcccccccggtttcggggttggttttaaacccccccccggggggttgggggtttttttttgggcccttaaaattccccccccccataaaaagcccggtttttcttttttttgggtttgagagattccccaaaaatttaaaaccccttttccttgggggga

SEQ ID NO: 645996 - DNA, 236 bp, Homo sapiens
tctctagcacggatcccccacacttcgatcgcggagaaattagtaagactcactatcgacagtgctactcgcatgaatcagtattcgtggaagacttgaagcatccaggacaggtagaagaaggtggtttcatagggaaggaaatggttctactaactggagtcactagtggccactatggatagctgtcctgcaatggttcaacacctctctctccaatggttcacttgcatact

SEQ ID NO: 645997 - DNA, 296 bp, Homo sapiens
  misc_feature (8)..(8): n is a, c, g, or t
  misc_feature (258)..(258): n is a, c, g, or t
  misc_feature (262)..(262): n is a, c, g, or t
ccttaacncctacaaaacaggaaaaggtacttgctggaagcatgtgattcctggttttgggcttgtttcccatttatattttagagagcaatactaggattaaaaacttttttattgttgttattattattttttgagacggagtctagctctgtcgctcaggctggagtgcagtggcgcgatctctgctcactgcaacctccgcctcccgggttcacgccattctcctacctcagcctccccagtagctgggactgntagngtgtgccaccacgccgagccctatgcaacattaa

SEQ ID NO: 645998 - DNA, 241 bp, Homo sapiens
caccccagttctctcgtaaggagcatggcccagtcctctcccacgtccacacaggagcagatgatcgcatgctttcgtgtacattatgtaatgcaaaatatattaatcttcgccttactacttatttattttgttttatattgactgctgagccttcgatgccccccctggactgattgctggaggatatctccttcacacgtctgaggcctggtcccaggaactggcaatctaacaggat

SEQ ID NO: 645999 - DNA, 336 bp, Homo sapiens
cccgttacagtaatccacgtggtgaagggcatgtccccgttaactaaggaaggactgcggtaacttcccctgcagggctgtaggttgcctgcaggcgctccaggcccccaccctgttgattccgatttttaggtttcattttcctttggtcccttttggcccctactttaaaagcttgcccaaagggatcccctccattttagtgggcagaggacatataatataatgccaatatttgcttttttttaaaacagtacaaaaataaaaatttaaagtggttgctgtggaggacaggggtcagtggtggaagtgagcccgaaatagactttgaagtaa

SEQ ID NO: 646000 - DNA, 164 bp, Homo sapiens
ctggccgatgtatgtttgctggtgtattactgtgaaacctttacaccttctttgctgtcactgtcttaaggacttctgattccctaacagtcagacttggttagggagagcagagtgatccgcagaggaggtgctggctgtgctaccttccaaaacagttcttt

SEQ ID NO: 646001 - DNA, 145 bp, Homo sapiens
catatctaacacattactctcatcttacttcacggagctgctgctctgctcctcttctgacttatcattcttcatctctactgctatgtgagcactgtacctatattcaatattaaatccaggattttccagagagcagaatcca

SEQ ID NO: 646002 - DNA, 669 bp, Homo sapiens
  misc_feature (112)..(112): n is a, c, g, or t
agcggtctcgtgtatcccttgaatgtactggattacatcttgcacaggaaaagtgtgaaagacgaggctccaagctcgacctgcttgggcgcgtgttcagggtcttcccaangtggcctttgtgtggcacgcagtctctctgatgaactgagaccacatggaatgccctctgactgcctatagtaacgagtgcggctcgaggtgttgaaacagggtgtccacttggaaaattttccccagaggaaaacaattttgtggaaaaggccccagttgcaaaattgaagcccccgctttaggaggtggtgaattaccaggagccttggaggaattgttaaagggggttggggctccaccttgccccgggttttgggaaaggaatgtcgcccaatagggctttgtcagataacttttgatatgataagatggagatggaagatgatatggaacgggtccatgggaggagatgagaagacgctaagggaggaaactttgaagggaaacttcagtggaaggttacagtcgtggcgacattcttatgaggggaaccgctcctcaaccatgaatcatcatgaatgaagtttggccttatgccctgaaatctggagaggtaatattcataaaatcccgtgcttctaaatccgcattttccgggttgtacctttactgtga

SEQ ID NO: 646003 - DNA, 266 bp, Homo sapiens
  misc_feature (35)..(35): n is a, c, g, or t
  misc_feature (70)..(70): n is a, c, g, or t
  misc_feature (122)..(122): n is a, c, g, or t
  misc_feature (124)..(124): n is a, c, g, or t
  misc_feature (137)..(137): n is a, c, g, or t
  misc_feature (147)..(148): n is a, c, g, or t
  misc_feature (158)..(158): n is a, c, g, or t
  misc_feature (170)..(170): n is a, c, g, or t
  misc_feature (177)..(177): n is a, c, g, or t
  misc_feature (189)..(189): n is a, c, g, or t
  misc_feature (229)..(229): n is a, c, g, or t
  misc_feature (257)..(257): n is a, c, g, or t
ttattaaaatagtgtttgcatcttgtgtatccttnaagtctaattcagccacagcagtggcaaaaggaanaagtttatcatggtgcagcagcagtcgtacaaggggcaaaagagcatcattntnatctcgacatatntcactcaaanntgtaagcagnctgaggcagatnggttgancatctggtgatnttagcagcaaagttttcaaaggaccatagtacttgaaggnagcacgtagtcttctgtataaatatttntaatcaagg

SEQ ID NO: 646004 - DNA, 167 bp, Homo sapiens
tgattcttaaaggaaaattttattacttggaaaaattttagcaggccaggtttttaaagtccaatattttttaagaaatttccaaaaagttagtattaaaagttgacttgtaacattgctccttgcctttgctttgagggcgacccgggcgcaaatttaattttttt

SEQ ID NO: 646005 - DNA, 129 bp, Homo sapiens
cggatgaatcgagctcgtgtaccacttaatatgagtagcttacacaagtagcctttatagtaaagatactctttacggactccacttatgactccctagagcctcatgtggggagtctctagagtcgac

SEQ ID NO: 646006 - DNA, 128 bp, Homo sapiens
accactatataagctggaaaggaccttaatgctcatcaggatcagtgcctccctgggcctagattgcccctgtacatgtaggttagcctgaccttgagatacataagccctataagtaccatacgcaa

SEQ ID NO: 646007 - DNA, 133 bp, Homo sapiens
agttggtatgatctggaacactactctgtgtggtgtttcagcacgaaagtcgagatattgcatgatcagggaacgaacactcaagctatgtcgcctttacggaaactaacgctgatcggtgatgccgaaagat

SEQ ID NO: 646008 - DNA, 358 bp, Homo sapiens
agttagttttttaacccttggtcccttccctcacccccaggagtccccagggtttactgggggcatctttatgtccatgaatacccaatgtttagctctcccatataggggggattttttaagggactaacgggtggaattaggcccaccctattgcttagcctgccatgattattcaaatccaaagttgacataaatagggctttaaggccctgaaccaggcttgtttaaggagtccctccttcagccttatgaaatgttcccttgtaattttttaaaaataataggaagtatgaataaaaatctggaccctttttgtgttttttcctaaaaacgttaataaaataatttagaagta

SEQ ID NO: 646009 - DNA, 136 bp, Homo sapiens
cagattacattaggggagaaaaggcactgtttcgagcatctgctgagtgatataactggtgttttcgaagtgaggttcacacattaacatgcctcacaattccctgaaatggtccttagaagtgcaggcaccaaga

SEQ ID NO: 646010 - DNA, 148 bp, Homo sapiens
tgcgccgctttttttctctcctacgtacatttttattaaagaacaaaaaggtgtacatttgtccataagtcgacatctccataaaaaaacactatcatacaatacatacctttgctttcgcagaatagctacatacatacacacatca

SEQ ID NO: 646011 - DNA, 333 bp, Homo sapiens
ttcctctcctcccacctccaggtggccaggtgcggtggctcacacctgtaatcccagcactttgggaggccgaggcgggcggatcacatgagcctgggaggtcgaggctgcagaggtggcaggatcacacgatcctgggaggtcgaggctgcagaggtgggaggagaggaatcctctcctcccacctccagagagatacagtcatgggggtcaggtgtggtatctggaatactgtgggaggctggattgaagtctgggccaggaacaatggtaattgtgggagactcaacaagaagtgagtacagctgaaggagccagggggtaccgagctcg

SEQ ID NO: 646012 - DNA, 705 bp, Homo sapiens
tcccagctacttgtgaggctgaggtgggaggatggtttgggccccggaggtagaggttgcagtgagctgagattgtgccactgtattccatcctgggcaacagagccagaccctgcctcaaaaaaaaaaaaaaaaaaaaaaagggcttggcagggggtcacgcttgtaatcccagatttggggaggtggggcgggcaaaacactttgacggtcagacgtttggagaccagcctgggccaacagtggttgaaaccccgttctttttaccaaaattaaaatataaaaatttatccaggcgttgggggcagtgtgccatatagccccagctactcaggaagctaaagcacgagaatttatgtgcactccgggaggtgaaggttgcagtgagccaagatcacaccactccactccagttttggacaacagtagttgagaacacctgttgttcaaaaaaaatacaaacaacggaaaaagaacggcaagagaaaaacgtgtgctttttgggccccaggtgcaggtgggctctcaccccttataatcttaccctctggggggaggcgctcagggccaggaaggatctggcctgggagcgcccacagagtttcaaaaacaggcgcgggccactctttgcaggaacccccactctacaaaaaaaggaaaaattaaccggacgcgggatgtggcctgtatcccgcaaccgggccg

SEQ ID NO: 646013 - DNA, 158 bp, Homo sapiens
tcgagctcggacccctccatatgtgtgcccaggctagagtgtagcggtccaatcagagctctctgcagccttgaattccagggttcaagccatcttccctcctcagcgtccccagctactcaggaggctgaggcaggagaatggtgtgaacccgggag

SEQ ID NO: 646014 - DNA, 810 bp, Homo sapiens
agcgggcgcgtgcggcggctgggcaccggcatttgggccggtggccgtgagaagcacgctgtgatggctgcaacgagtgaaggcgaagagctgatgtggactctgtgctccccgtccgcaaggggatcggttatcgtccagaagagcgtggatattctttcgcccagtttatggcagagcaagttaacgaggaattgctgatggtcgaagccagtgagcaaagtgtaaaccgtaagaaagtgtcgacaggagatgcaaaagagaggtggtcctggtagtgtcgaagtgggaaaattagtggcatagagggttacacacccagagcgaaaatacgcattggactgtccggaaacggtctttgtattgagttgtcggtactctgtattaaggaaatgccccattgggacgccgttatcaagttgtcaagtcgtaccaagcaacattggaaaaagaaaccaggacatcgatatcgtgccaatgccgttcaaacttcacaggtgtgccgtataccgtcgtccaggatgaagttcagggattagtgtggaactaatggtactggaacgtcaagatgctttaaaacatgtgagcaggaaaacaaaagccaaacctcggacagtacgatgatcctcctgactggcaggagatccgacttagctccgagggatctgacgttcacgaaaactcacctcgacgacacgactgctagcaaagatgacccaccaagccctcaacgaaacctcacatatgtagaccagactcctacggcgcgcacaggggccagcgggaccaaccacggcaccgacacgacga

SEQ ID NO: 646015 - DNA, 251 bp, Homo sapiens
  misc_feature (35)..(35): n is a, c, g, or t
  misc_feature (76)..(76): n is a, c, g, or t
  misc_feature (111)..(111): n is a, c, g, or t
  misc_feature (137)..(137): n is a, c, g, or t
  misc_feature (187)..(187): n is a, c, g, or t
  misc_feature (216)..(216): n is a, c, g, or t
ttaaaatcagattatttgggtttttttatgccatngagttgtttgagttcctgatatattctgattattaaacccntgtcaaatgaatagtttacaaataatttttctcantctgtaggtagtctcttcatattgtngattgtttcctttgctgtgcagaagctttttagattgatgtaatcccatnatgtccatttatctttggctgtgtattcnctttaggtcttactccgtaagtctctgcccagatg

SEQ ID NO: 646016 - DNA, 379 bp, Homo sapiens
ccagagtcaaacagtgcccctcttcccagctcctgctagcatcaccaacaactggtgtgtctagtttgtttgtttgtttgagatggagtctcactgtgttacccaggctggagtgtaatggtgcgatcttggctcactgcgacctctgcctcccaggttcaagtgattatcctgcctcagtctcccaagtagctgggattacaagcacccgccaccacacccagctaatttttgtatttttagtagagacgcagtttcaccatgttgtccaggctggactcgaactcctgacctcaggtgatccacccatcttggcctccaaaagtgctgggattacaggcgtgagccaccatgcccagccctggtgttgtgtctactt

SEQ ID NO: 646017 - DNA, 710 bp, Homo sapiens
tgagcggaggcgcagaaaagggggcggcgagactcggcttgttgtgttgctgcctgagtgccggagacggtcctgctgctgccagcagtcctgcgcagctgtcctgacgatgtcagtcccacctagtctgagccgcctgcgtcccctgcgacaacaacaacaacaactgcttaggaaaatgagcagtcatctgctccccgccggccggcctcaaacagtttcctggcgtggagctacccatgaacatggcatgcaatggcaatgatcatggcaatgggaaaactggtgggctgagaacacgtaccatcctcatcctccatccacaatggagacatggagaacgatacttttggatgcacaacattgaatcacggacagacgtagttccagatgcacgttctcactgtgacagcccttcgccacaagacagatgggccagatcatgtcctcgactgtggaaatgcacaccagccgggaccactagctctcagtcacgaagaagacgtcgtagaatgacgagaaggacagtctcaggctttgacagacaagtgccggactggcgaatcacgactggtccacggtagacccggaaccgcgtgccaccccaaggtagtttccacttcagcacaaccctacaccgctctgctgtctcgcagcactgaggaaaacgtgcacgcactgacgaaggggggtattacctccgccacact

SEQ ID NO: 646018 - DNA, 308 bp, Homo sapiens
  misc_feature (38)..(38): n is a, c, g, or t
gaagcaacgagtaactccgagatactgagatgaccaantccaaagcaactaaccacccgatgctttgaccaaacgtacgtcaaaaaattgtcgatttaatgacagtttagcacctgctataatctctccttctctgtcttccaaatctctcccaatatagtcaaagaagatgttaatctgctcagaaagagctcttactacgattcttgtagcaagggtcaaagaaacttacaaattcctcaaagtgcaagatttgtacgcttatcttcttcagtcagctcatgagggggagctttactatcattttc

SEQ ID NO: 646019 - DNA, 144 bp, Homo sapiens
tgtgtgcactatatcatgtatacacttaattgtatgtttaaggccagtggaatctatagctaattactcatttgggtcttgaaactgaacatgcaacattttattttatgttaaagaattaatgtgtattctacacaataccca

SEQ ID NO: 646020 - DNA, 375 bp, Homo sapiens
  misc_feature (83)..(83): n is a, c, g, or t
  misc_feature (291)..(291): n is a, c, g, or t
agcttttcccaagatcacagatcaagacttctctacaatcatgagactcttatcttaagaatctgtgcagctgctaacacttncagcatgtggagaaaacatggggtattataaagatttggttgtagggaattaacaaaaaaaaaccacttagttaagcaagtaaaccctttatctaatgcattctttaatctatttgatttttggtggtttgatttatggggaccctgagtaaggagcatataccacatcttggtgttatcccaatagtcataagagtctccctggtgnactgtacttactcaaatgtttcaagagtttgcatgcagccatctctaaaatgtcaaatggtgtctctttaactggaatggcaag

SEQ ID NO: 646021 - DNA, 1231 bp, Homo sapiens
accggctttttggggggccaggactttctttccgcaaaagatttatcgtggggggcccccctacctgggagtttttgggagtgtgcccccagagatgcccctcgagggtgtaatatacaacactttggaaagaaagtggaaagcgcgggcctccccttgggtagtttcctcctttgttccaagttctcgcccctctcttggtgggtgaagtgggtagagtccctccccgttcccgtccgtgaagcaccctatttcggggggggccccccacatggggggattgaccccccacggggttccgtcctttctgatggtaaacggaatctccacggttccattcggttatatcccccccgcgggaaggggatcccttttcctacgtgcgcccccctattctcggggggggtgcctcccttgtttgggagacacccctgggatgttaatttgaggggaaatgggagtaaaacatgggatttgaccgccttacaggggcctttcttggggggttcttcgcgcctgtcaccacacattcttgggggaatccccacggggggggccctccactggtcaccccctctccacgagacccacggaggattttcttgggaaatagccctgtgctgctactgcgaggatagacacatggtggtttcacacaacgggggtgtatactgcgcctcacacagaacccccccaccgtgttttcaacgtcaatggtctcccacacacttcaaacagggtctatgataataccacgccaaagatcggaggaaaataaatgtttctgtctggcgttcccccctccgctgagcctcgccctgggctctccgccctgcttctacacgcggagccacggtccaccacgggttcacaccactggggaaattttagcccgcccacctgcgggggaatgtctacacaacacccactgcctgggttatctcttctggcggccgtgctaagttgttggggggaatgtgttgtgggacacacgctgtggtggtgtgtgtgtgtgctgtgtgtgttctgtgaacctcctgtccccactggtaacgtcccaccccgtgtccccaagagtcccctaattccctccaccacaataaccagaaaacacactcccacgggaccttctggggaaaggctgaggacataatacctgctgtcactccagaggacattttttttagccaataaaattgagtgtcaactatttataaaaaaaataaaaaaa

SEQ ID NO: 646022 - DNA, 575 bp, Homo sapiens
  misc_feature (556)..(556): n is a, c, g, or t
ggccagcaaggctgctctcaggagaggccttcctcccctgtggagggcgagacatcctcatggggactcaattcagaacataacaggaaaaagcgagtgactccaaagacagccacaggtgtggagtctggaaatcaaaatcacagatactccactcctctttgtgtcttccagccccataatgtcaccccattatagtccaagacccttcctgtaccaggaggcccccccataggcctgcaaggtgtgtattaaactgatggtgacgttgtgactgcttgtccagatgggcccctgagtgaaatggggcactactgatagttccctggtggtcctgggaacactggggtatatggtcaccctaactgttgtgctggattgatagatagggttggtcacttgcccgaggccgatggctggtacatggcagagctgagatattcactgtgttctggctgtttccaccgtaccatgttgttcccagccctctgttttctttccaccccacttcccatgacttgcttcccctttgagacgtggtgctagtaaatcttanattcccttggcctgtactg

SEQ ID NO: 646023 - DNA, 227 bp, Homo sapiens
  misc_feature (147)..(147): n is a, c, g, or t
  misc_feature (180)..(180): n is a, c, g, or t
  misc_feature (226)..(226): n is a, c, g, or t
ggtgactctagaggatttcgcccaggtagattgcccaggtgatttttctttttttttctcagtagtgacagggtttctccatgtgggctaggcaggtctcgaattcctgacctcaggtgatccactggcctcatgtgctggggattnacaggtgtgagccactggcgcccggccttcttntttatttttggtataataatttcgtgtgtataaactctaccggggng

SEQ ID NO: 646024 - DNA, 919 bp, Homo sapiens
ccagtagccccgtgctgctgtgaataggagccggtggtgatgcggcttccggcccggagcctcagtactctgctatctcttcggcagaagtccaggttacaggcccctcctgttgtcgctgcaacttccctcacccacagcagtacctgaggtggttctggagagactgcagatgtagtccaaactgctgctaccaagcttcctgaactggggctggggtcatacaccccagtgggactgatccagaatctactgcaatctatgcattgttgatctgggcctaccttggtggggggccatagctgcactgtacagtctttgcccgctgcctgattcttcctctcatcgtgccgggccagcgacaggcagccacgctccacaatcacttgccagagatccacgaagctcacccagtcgaatcaacagaggccaagttagcacgagaccacatcgagtacttacacggctccctcgggagatggcgctctcaccacgaaacaacatggtattcaactctataaactctcattctccctgtgactcaggccccaatctacatctccttcttcattgctctgagagacattggccacccttcctgtgcccagctgcaagacaggtggctctggtggttcccgatctccccggcatccgatcccatcgtacatatacacctgcagacctggctccaagtgcgctgcctgaagctcagtggcgagcacaggcttcacacgtctgcctacccacgatgaactgggtccgaatcacccccaggtaacctggccatagcaccatatcccggcgcgcgcacaacaccgccctcccgaagctccctggccacacccggccggaccaccgagcccccaacccccgcctacacactcgcaccccgcagcccacgccacgcgaagcaaccccc

SEQ ID NO: 646025 - DNA, 252 bp, Homo sapiens
taactgcatctgcagtattgcatgtaagggataagtgcttattttaagagctgtggagttcttaatatttcataccatgcactttcttccttatccctttcccattggttatttcatgtgattgagaaatttttccattcgagcctttttataattgtaggactttttcctgtgggcttcacttaatggatagtacacttcactcagaggcatttgcatcttctaattatttcttaaaagcttctatagtga

SEQ ID NO: 646026 - DNA, 112 bp, Homo sapiens
aagagaggcggaccccccagctacggaaatagctcatgagaaggatcttagactctgccgagtttatcaaattcacggtcattagaccatttccaggactggtgattaataa

SEQ ID NO: 646027 - DNA, 119 bp, Homo sapiens
tgcacttactcatcccgtgacggtcctcacagccctaactcctccctgaccagtcctcctcccctaactcctccctgatcagtcctccagccctcactcctccctgaccagtcctcctg

SEQ ID NO: 646028 - DNA, 584 bp, Homo sapiens
  misc_feature (59)..(59): n is a, c, g, or t
  misc_feature (61)..(61): n is a, c, g, or t
cctgaccggcaaggtatgctgttactggttacagagtaaccccactcccaaaaatggancnggacaacaaaaactaaaactgcaggtccagatcaaacagaaatgactattgaaggcttgcagcccacagtggagtatgtgcttagtgtctatgctcagaatccaagcggagagagtcagcatctgcttcagactacagtaaccactattcctgcaccgactgacctgaagatcactcaggtcacaccctctatgcttgagcgcccagtggacaccatccaatgttcagctctacctggattatcgagctgcggctgacccccaaggagaagaccggacctatgaaagcaatcaaccttgctcctgacagcatcatccgtggttgtactcaggatttatggtggccaccaaatacgaagtgagtgtttatgctcctaaggacacttggaccagcagaccagctcagggagtagtcaccactctggagaatctcagcacaccaagaagggctacgtcgtgacagactgctaccatgagactcaccatcaccatgtagctggagaaccaagactgagacgatcatc

SEQ ID NO: 646029 - DNA, 421 bp, Homo sapiens
tcaccatgcatggctaaagctgagtaaacccgaagagaaggggaagaagcggatgaattttggtgaaggatgggggctggaggcatccggggtcctgtgagatacagtgtagctattttagacagttagtcacagagggactctaaggagggaaatacttgattcttctacaaagtccacattaaactaccgggtgaaggctgggcacgatgtgctaatcgcctgttatcccagtcatttttgggatggccaaggagggtatatcgcttgatgtcagtgaatttgagaccacgcctggtcaacatggcaaaaccccgtctctactacaactacaaaaattagctgagtgtggtggtgcacgcctgtaatcccatctaattgggaggctgaggcaggagaatcacttcaacctgggacgtga

SEQ ID NO: 646030 - DNA, 159 bp, Homo sapiens
cccccccccccctttccccccctagggttttttattggccccaataaaacccaggggggggggtttttttaaggggggggcccagggggggttttgggcactgaaggggtttgaacaggttttgggatttttttaaaataaatttttttttgcccccca

SEQ ID NO: 646031 - DNA, 293 bp, Homo sapiens
ttcttcccctccccactttatgtgtatcttccaagaatacttcctaacaatccttaacatggtccatcacagggtctacgaaacaaaataacaagagagacatagacggagagaaaacaggagcaggaggagaaggaagagcaggaagacgaggaggcggaggaggaagaagatggaaaattatctagatcacgcttgtccaacccactgtaatcaggccacatagtggcccaggatgggttggaatgcaaaccaacacacatttgtaaactttcttaaaacattatgagatt

SEQ ID NO: 646032 - DNA, 366 bp, Homo sapiens
tcaggacacagtgctggctacaggtgtgagcactgcacctactgtattacacccatactctcgctgcaaggtgtgttcctgtccctgctgcacttttactgggcactctgaagctgctgggcttggtgttctgctttcacactctagcgtggatatagggagttcagcggtgccaggaagaggagaataggtgcttagactagttttgatcttacttcagtaccagagagtgtacaggtagctactgctgtcctgtgtgtctgatttctttgagcggtggtaggcgtagtctccttgaaccagcgcacattcgaggttctatacgtgattatgtgcattgggggagggaacatggggtctgaccct

SEQ ID NO: 646033 - DNA, 446 bp, Homo sapiens
  misc_feature (50)..(50): n is a, c, g, or t
  misc_feature (413)..(413): n is a, c, g, or t
agccatggcaagtaagtggcctttggaaagttaccaaggtaagacatacntgatacgttcaagaaacaattccaaggttcaataaggccagaagttaaagggcaatgtaagccctggaaactgaggctagaaaggtagaaggatctctttttaccacacactgtgccgggcaccatgaagaatacaaaatagctagctattatggagcctacactttaatgtgtgtacatagatacatgtccatgttggaatttaactccttgagaggtcatgaattacttagtcccggaagcatttgaatttatactggaaagctatagtagagagttgacaaaatattttaaatgtagtaagaagaatttgacaatctattgtgtggtatgctagcaagccagttctccttcctccttttntcaccatcccaccacccctcacaaaaaaaaaaa

SEQ ID NO: 646034 - DNA, 397 bp, Homo sapiens
  misc_feature (41)..(41): n is a, c, g, or t
  misc_feature (44)..(44): n is a, c, g, or t
agctgctgtggtttcagtgatggtttcccctctacattttngtngaaactttctccccagtgcaacagtactgagaatagtggtctttgggaggagatttgaatcttaagggctctactctcatgaataggattggcactctttttttcttttttcttttgatatggagtttcgctctcgttgcccaggttggagtgcaatgtcgcgatctcggctcactgcaacctttgcctcctgggttcaagtgattctcctgcctcagcctcatgagttgctgggattacaggcatgtgcaaccacgcccggctaattttgtatttttagtaaagatagggttactccatgttggtcaggctggtctcaaactcacgacatcaggttgatccgccctccctca

SEQ ID NO: 646035 - DNA, 147 bp, Homo sapiens
aaacccccttttttcccaaaacccccgggggacccctccgggggcagcccctaaaaatcagggaatttggggccccccagggaaaccgggaaaatccccaggggttttttaaagaaaacgatttccccaggggggtttttttttcca

SEQ ID NO: 646036 - DNA, 115 bp, Homo sapiens
tagcagtgcgtcatcggctcctttggttcatgagtgaagtatgcacctttatgtctggcaaaatagcgcccccctagcaatatcaaccattaaccttccctctacacttatcatc

SEQ ID NO: 646037 - DNA, 609 bp, Homo sapiens
cggagtatcctgaggtattggatctcaccagaatccgtgatgcacgtttagccagccaatcggggaggatcactccagtgcccaggtcgcaggaagctctgtcttgtgcagtcactcatcggtccatgctctcagcctcgtctgtaggggcaggagttgcctgaagcatatccttgaagacaagaatgcaccctaacaagcagcgtagtaatatatcgacgaagaatggaaaaagatgtcccaatgctgccccaaagccagcagaagaaagatggggtgtccttcttgtgctgaacatgtccgtaggaatgccctgggcacttccatgctcaaatgaagaagaccaacccagggcctgtgggtgaaacacttcctgttgccagactgagctcatatgctaagacagagctggggtctcagacatccagaaagtagtcgccagtgaagccagccgaaatactcagatgaaggacagctggcagtgatggggagcaggaacccatactgtgaagatcagacatggagagtgtgaccctgacagtgaagcctgatacgccatagcacagtgatcaagaagatcccctaaaaaacatgctggtgtctaacacg

SEQ ID NO: 646038 - DNA, 113 bp, Homo sapiens
tccagtaaggtggcccatgctgggattcaggctctttgagctttcttccatagtggttagggctggagcaggactccactgtggcgggaggtattggggcacacattatggag

SEQ ID NO: 646039 - DNA, 188 bp, Homo sapiens
aggaagtatttagccagcctataaccccatgtatcttggaagtaactaactgttttgatcttataggctcataggcagaagagacttgccttgtatgagatgagacttgggactgtggacttttcagtttacgctggaatggaattgaatatagctgcgaacgggaatggtacgctggaatggaatgg

SEQ ID NO: 646040 - DNA, 126 bp, Homo sapiens
tcctatagaatcgagctgttaccagacgtcattcttgcattgcaccgttttccaatgagagagccacactgactagcagtggaccaccagcctcagggtgaccgggggttactggcagctgtgctt

SEQ ID NO: 646041 - DNA, 351 bp, Homo sapiens
taagacgggtaccattctgtcgcccaggccagagtgcagtagcgtgatcttggctcactgcaacctccgcctcccaagttcaagcaattctcttgcctcagcctcccgagtagctgggatgacaggcatgcaccaccgcgcccggctaacttctttgtatttttagtagagacagggtttcatcatgttggccaggatggtctcaaactcctgtcctcaggtgatccgtccgccttggcctcccaaagtgctgggattacaggcatgagccaccacgcccggctatgcccttttccatcttaggaacgttatgctatcacttatctttcttctcttttatatgtaacaatt

SEQ ID NO: 646042 - DNA, 116 bp, Homo sapiens
gtccggtcccctaatgccggcgctcttctcccgggcgggtccgggcgcggggatctgcttggggctgctgcgcggcggctccggcgacgtgggcgggatggactgccatgcggccg

SEQ ID NO: 646043 - DNA, 944 bp, Homo sapiens
ccatctcacttctaggaggtactagtatatcgcgtcacagcctcatatcctcccctactatgcctagaaggaataatactatcgctgttcattatagctactctcataaccctcaacacccactccctcttagccaatatgtgcctatggccatactagtcttggccgactgcgaagcagcggtgggccgtagccgcgtactagatctcagagtcgtccagacggacatatggcctagacgtacggtacataacctaaacctactccaatgctaagagtaagtcgtccgcaagcaagttatattgacgtaccacgtgacgatgacttgtccagaaagaacacataatttgaatcaacagaaccacccacgagctaattattaggatcatcccccctactattttttaaccaaagtcaagcaacgaacgctatttagcggttccccagacctttgtcctccgacccgctaacaggcgcgcctcataatactaactatcctgactcactacccctcacaatcatggcaagccagcgccacttatccaggtgaaacacttatcaggaaaaaaaatctactctctatactaatctcgctacaaatctccttaatgaataacatgtcacaggacacagaaggtaatcatatttatatcttcttgcgaaagcacaattatcgcccacctgggtatcatcaccgatgaggaacacagcagaagctgacgagcacataaaacatatcgaaagctagtgaggtccttcctagccacgaagaagcgcatcaaagacctaggtcattaacatataatatactctatgcagagtaaactggcacataagtgtacacagaagagactcgggacaaggccagcaggaacacggagggaaaagggagagcgaaacgaagaggaaggaaagaaaggaaaaaacacgaccccccctcgaga

SEQ ID NO: 646044 - DNA, 230 bp, Homo sapiens
atcaacaaccattgtaacatgagtctaatttacaggttttctatctattactactagttatctctgggttaagaatacattcacttcaccatctagtactaaaccccaacacaaaaatgattaggattaatagaccactttcaatttcaaaatgctccaccactggtatatctagccatatgcatatatttgctatgtcttatttctcctttaccttacaaacatgctga

SEQ ID NO: 646045 - DNA, 219 bp, Homo sapiens
catttgaaaactgagttgcttatcttttattgttgagttgtgagaattctttatatattttgatactagacccttatcagatatataatttgcgaacattctctcccactctgtgggtggggctgttattatttggttgtgtcctctgatgcacaaaagttgtggggggtattttttgttgttgatggtcgctggtgtttgaaacaacaactcactctg

SEQ ID NO: 646046 - DNA, 200 bp, Homo sapiens
gaggtggagcacgagcgcacgcttttaggacccgtaaagattggtgatctactgtcctggcgccgggcgaccgccagagcgaaactctgcgcagcgaggtccgtagcggctcctgcacgtgctaatccggtcgtccgcacctggtgtctaggcggcgacaacgcactacctcgcaacccatctacgtactctgcgcttct

SEQ ID NO: 646047 - DNA, 416 bp, Homo sapiens
ggattcccccgattcgattttgcgctctcgcgatgaaggcggcagctgttaccatcccagggcgctcaacatcccggtgtccgatttggatgagtgctctgcagtactgagccagctgccttccaggctttatattctgctgagacagccaacgctggacgatgagcatctcgttttcttctgtcacatgggcaatgcggggccctccaggccacgcagcttggcccggtagctcttgcgatcacgtgcggctcgcaactacgctggagcctattgagaatggttggagaaagagagttatgcaggaggcgagcttactgattgccaccccctggcccctttctggccaccttaactaagggtgtgaaccgcctgacttgttgaattgggcaactccttatagtgttgtgcgcaca

SEQ ID NO: 646048 - DNA, 488 bp, Homo sapiens
  misc_feature (25)..(25): n is a, c, g, or t
  misc_feature (32)..(32): n is a, c, g, or t
  misc_feature (50)..(50): n is a, c, g, or t
  misc_feature (59)..(59): n is a, c, g, or t
  misc_feature (79)..(79): n is a, c, g, or t
  misc_feature (97)..(97): n is a, c, g, or t
  misc_feature (111)..(111): n is a, c, g, or t
  misc_feature (138)..(138): n is a, c, g, or t
  misc_feature (158)..(158): n is a, c, g, or t
  misc_feature (183)..(183): n is a, c, g, or t
  misc_feature (231)..(231): n is a, c, g, or t
  misc_feature (250)..(250): n is a, c, g, or t
  misc_feature (253)..(253): n is a, c, g, or t
  misc_feature (259)..(259): n is a, c, g, or t
  misc_feature (263)..(263): n is a, c, g, or t
  misc_feature (266)..(266): n is a, c, g, or t
  misc_feature (271)..(271): n is a, c, g, or t
  misc_feature (279)..(279): n is a, c, g, or t
  misc_feature (303)..(303): n is a, c, g, or t
  misc_feature (309)..(309): n is a, c, g, or t
  misc_feature (311)..(311): n is a, c, g, or t
  misc_feature (348)..(348): n is a, c, g, or t
  misc_feature (367)..(367): n is a, c, g, or t
  misc_feature (370)..(370): n is a, c, g, or t
  misc_feature (386)..(386): n is a, c, g, or t
  misc_feature (446)..(446): n is a, c, g, or t
tgaaaattgtattttgtaggtcacnggacttntcacggattcttgtcttntaatagacnctcatacaaagggctcgatntgtacggagtttatgtgngacccacacatgtntgttatttaatatatgtttcacaaaanaagagaggaggccttttgcncatattttcattgttcgccccgttngttatttgtgacagagttattgattgaattcttagtcacttattgctntttacttggtatttttagnganaaaaanaganagnaactnagttctanggtttgtgttgcacattttgtgtncccatncnactatgggtgttgtgaagttatatttctgaaaaaagnactttttatatttcaaaanagnttcaccacatttttgngttgggcaaaatttgttaccacaaagggaggaaaaaatttccagtgggtttgcttgttgnagttctagggttacttccatatttattgaaagcccaggaatg

SEQ ID NO: 646049 - DNA, 409 bp, Homo sapiens
  misc_feature (166)..(167): n is a, c, g, or t
  misc_feature (188)..(188): n is a, c, g, or t
ccacgacgtcgggttgatgctggtggcaaggtgcacaacacacggggttaaaccccttccaaaaggcctttaaaaaaggcccccaagaaaggggggaaagcccccccaatttgccagtcccggcaaaccctgtccttgtcagcaggaactttgggcagggttattnncccgatctgccatgtattccnagaaaggccatgtacaacgacggaaagtactcaagcgcgcgtaaaagttccccaaagggggttttttggcagaacaaaaagggcacaacaccaccaagcaaaacggggcacggcacaacgggtttttccttccgaccaaaagcgttggttttaaccaaagagaacccaagtttttggggtggggttgaacaaaaggaacggggcggttaccccgggggtgg

SEQ ID NO: 646050 - DNA, 259 bp, Homo sapiens
gcgagacacccagaaccaagtgagacgcccctgattctaaaacggcgggacccacagcaagtcggaaaggttaccggaacacctggaactgtgacccggcacaaggcggcaaataacctccaaagcagcccggaacaaacacctcaccgcacaaaaacacccgcgacactatgtgcggggcgagacaacggacaaaactgcacatcggacctacgtgccggcccgctcgtggcacagggacatccggcgcccaagacgc

SEQ ID NO: 646051 - DNA, 146 bp, Homo sapiens
actttagtcctctcaaatgtgtattatctcccagatcacaagacttcttggggatatgaaatcattctacatttcctcctgctttatgtactttatattttcatattccgattgcatgaatcttcagaattgctttttccccttct

SEQ ID NO: 646052 - DNA, 395 bp, Homo sapiens
  misc_feature (19)..(19): n is a, c, g, or t
tgttatatttgattgggcnaaattataatcgtgtctcttagccttggttccctttgtggtaaaatatgaaacaagtataatatcctaccttatagaattttgttaaggattaaatgcaatccatggcccagacgcggtgactcatgccctgtaatcccagcactttgggaggctgaggcaggaagatcacttgagaccagcctggccaacatggtgaaattccatctctactaaaaatacaaaaatgagccaggcatggtggtgagcacctgtaatctcagctactcgggaggctgaggcacaagaatggcttgagcctgggaggtggaggttgcagtgagccaagatcgcacgactgcactccaacctaggcaacagagtgagattcagtctca

SEQ ID NO: 646053 - DNA, 841 bp, Homo sapiens
gagacgttcttcgccgagagtcgtcggggtttcctgcttcactaggtgctgtggacggaacccggcgctcgttccgccatgcccggtcgcggacagggctggagtagtctgcagcactcgtccagtcaccttcttgtttgactccgcgtctccttcgggaagcgtgcgccctagagagagcctctccagcgcgattcgcgtccctggcggcgcgacgcctagtcccgtcgggagtcgactttgtcccgggctggggttaatccgtcgcatcttaggttctgaccctgtggcagtgaaacagatcgcgggagttccaaaccttcggggaggcatgcggtgcctatgcaaaaaattttactctcagtcaatggggaaccttcgggtaagtggcaccgggtgaagtccaacaactctgggcaaggaatccaaatgcttgggggaggtcttcataacgggcttacgcttaacgtctcttgaccacgttgatcacggtgtatcgtgtacatagcatttctgagagctcgacttatcgtgacctggtggggcctgtctgagactgattgagcgttttctgacgcaaatggtagacgtctgtgctaatcaaaccacatggtcgtaccatttggaccgaggaccggatggcggggaacaatgggagaattggttcccgttgggatgggaagaacaattactttggacaccttggaacatgggaccccttggaaccacagaggggagcccccgaagggcgagaaatggggttatgggggccaccggaaagggtctcccggtttgccctgtatttcaccgcgttgaggtaaattccgagatgaaccttact

SEQ ID NO: 646054 - DNA, 311 bp, Homo sapiens
tattgaggtacgtagggtagacatacgcattcacttcagaaatgtgaattgaggcggcatgtgttcacgcttggatcccagcatttgggagctgagcgggcagtcacttgaggtcaggagttcaacacaacctggccaacatagcaaaaccccgtctctactttaaatacaaaaaaattagccgggtgtggtggtgcacgcctgtaatcccagctactcgggaggctgaggcaggagaattgcatgaacccaggaggcggaggttgcagcgagccaagacctcaccactgctctccagcctgggtgacaga

SEQ ID NO: 646055 - DNA, 224 bp, Homo sapiens
caggcccgaacaatcccgcaacctcatggttcctagtcggattcgttaactgcgccacgacgggaactcctattcttctagttctttatgtatttatatatacacacatgcattcataaagctattttcaagcagttaattttgggggggaggggggctgagcttgtggcagatagaagctcccaggccaggtatccaccattgttcggggcctggggtaccga

SEQ ID NO: 646056 - DNA, 351 bp, Homo sapiens
  misc_feature (331)..(331): n is a, c, g, or t
  misc_feature (351)..(351): n is a, c, g, or t
ccatatcactgatgtagaattagcaaaatgccagccactgttctacgggtttatcatgtattaattaaaatcctcacaacaatcttataatgaaaattatctccattttactatttatttactattatcttcattttactgacaagaaaccagaaccttagagatgttaagtaaattgctgaagatcacacagctaataagaatctacatccatttcactccaaaacctatggtctcaatgactatgctaatgtaataactgacttagtcttgtctttggagtctataaaatcttttctcaacctcactgttacttggattggaaatggancctaacttcggctcaccaan

SEQ ID NO: 646057 - DNA, 121 bp, Homo sapiens
gcttggtctttcactcctgacctcgtgatccccccgccttagccttggacaggttcttggatttacagactgtagccacccgtccccgcgcaaaattcactttatttcaatcaagggcggg

SEQ ID NO: 646058 - DNA, 754 bp, Homo sapiens
tatatcggcttcatccctgaaatctgtatcttagcgacagatccagaatttggcgtcctaggtgctgacacggctgtggtggatatctgtgattagtggactatgagtcctgctgaacaattgactgattagttgtaagagaaagccatgcactgtcgttgtttgtttatagattatcgggcagtaatcgtaggagaggatggaatatgtaagtgaagagcttgaataagttgacaatggtggcagttgccgtggttgcgagtttgagttagtgagaagaatatgtacactcaatgcaagagagtgtcagtgaagtgcatggcgcaagtgaggcatagtgtggaaatgacctatcaaaatttgttcattcttatagaaatatagtccctcatagaaaagtcgagtatataatacagaattccacacgcattttagatagagtctaccaatatttggggttcagacataattagatgactaagatttgagcgtaatactgggaaagaatgctacagaaattggtaattccagatttgaacaatgattatgtctgtttgaagatatttgactccaagacattgttccttaatgactggagctaggtgtaacaggtgactgggacactacggggtaaagaatgtcgtgagttaaatgcttcaactggggctcaaatgtagttaattgagtattgctacggaacatatgttcataggggacccagttgggatttttcgttaaacaatgaggctcaaca

SEQ ID NO: 646059 - DNA, 108 bp, Homo sapiens
  misc_feature (63)..(63): n is a, c, g, or t
ggttgtctccaggaagagatggcacaggatgcgtgtgtgtcatgtgtgtcatgtgtgtcatgngtgtcaggggtgtgtgtgtcgggcgggttcgcagatacttatggg

SEQ ID NO: 646060 - DNA, 343 bp, Homo sapiens
catatgtgctttgctgcctcaattaattttattctatgctgcccatttattctccttaccagaaagtgtatcaatagcattctttaagtcaccataagaggcgaactcaagcacgcccttcatttaatttaggtcgcgtgtgcatccgaaaacgttacttccccagtttgtctcatgaaatctttgagatcctgccagctgactccttgaggatgaattctcaactataacgacgagtttctgttcttacagagcggaacgatctcgtctatcatttcgaggtctgcgactactaaaacggtcagagtatcgtcctctacctcttccacctcgtgaccgagcc

SEQ ID NO: 646061 - DNA, 447 bp, Homo sapiens
gatcttgggccagctgagacagagtggccgtgtgccttgcttcgcgtctccactttcgctcatcgttccggaaagtgctgtctaagcgagggcacctggaacttctcgagactaccggacacttcgtattttgcgtgagcgaggtccttgtttcagtatgattaaactttgacatacgagttgagatgatgcacggatcctgaacgaggagttcactcatgggcgagaggcaggtgaatctgggacgtgaagtataaccgagtctccgaagcgctgagagtcgatcacccgactcctgtgagggggggacgccttggcttgtcgatttcctagtatcctagatcgtccatcaatggagtccgcgtgtcaccgtaacgtggtccgcgtatgatctcctcttccttcaggaagcgctgtgaacatcacaacattgaggggccatgtata

SEQ ID NO: 646062 - DNA, 375 bp, Homo sapiens
ttacagcggtctcgggaggcaggtctcgtaggaggcagggtctcaggagtgagtgtggggggtgagctggaaaggcacagatcagacagcactgtgggggctgggcccgagggcctcgtcttcccagtggggaaggggcttctcatggttagactgggacgagaggctgactgcgggccccccgctccccaggcaaggcccaccggtgcaggccatgtgctaagaaacaccatggtcccatctacaggacaggggttgggcccagcttgcccttgtgcacgctagggactgggcagtgcgggctacccttgggaagcacaggagggttgggctggggcccaggctttgggacccttccaatggcacctgtggctg

SEQ ID NO: 646063 - DNA, 924 bp, Homo sapiens
  misc_feature (149)..(149): n is a, c, g, or t
  misc_feature (214)..(214): n is a, c, g, or t
  misc_feature (262)..(262): n is a, c, g, or t
  misc_feature (284)..(284): n is a, c, g, or t
  misc_feature (376)..(376): n is a, c, g, or t
  misc_feature (543)..(544): n is a, c, g, or t
  misc_feature (547)..(550): n is a, c, g, or t
ggcagatgagccacccagcctggaccctgtgcagagcttctcccaggaggcagtggacacaggcagggtcctgtacctgcactcccgccctgaggcctggagcgatgccttctcgctggatgtggcctcaggcctgggtgctcccctcnagggcgtccttgtggagctggaggtgctgcccgctgccatcccactagaggcgcaaaacttcagngtccctgagggtggcagcctcaccctggcccctccactgctccgtgtntccgggccctacttccccactntcctgggcctcagcctgcaggtgctggagccaccccagcatggagccctgcagaaggaggacggacctcaagccaggaccctcagcgccttntcctggagaatggtggaagagcagctgatccgctacgtgcatgacgggagcgagacactgacagacagttttgtcctgatggctaatgcctccgagatggatcgccagagccatcctgtggcttcactgtcactgtcctgcctgtcaatgaccaaccccatcctcannacnnnncaggcctgcagatgtgggagggggcactgcgcccatccctgcggaggctctgaggagcacggacggcgactctgggtctgaggatcttggtctacaccatcgagcagccagcaacgggcgggtagtgctgcggggggcgcgggcactgagtgcgcagtttcacgcaagtccaggtgggacgggggggtccgtgctgtctcacaccgaaggacctcgggtggaaggtcggatcgctctcctgaaggggagagaaattcccggaaaatctttacggtgaagggcaaaacaggtggccttcgctgaagcgagcgacctggcggtgtgcagttcggaacaagaagcgagccagatggtctgagggattgccaactgta

SEQ ID NO: 646064 - DNA, 210 bp, Homo sapiens
tttgattttgtagaaaatagcttttgtctaggcaactaagtggtatactctgcaaataatgtaaatgaaattttacctttttgattttttgtaaattaaaaatgggtgcagataaaatgtccaaattaacaaaccagtgttttaaaagtgttactaacattttggttctaaaactgtcctttcccaaattgaataaaaaactctcacact

SEQ ID NO: 646065 - DNA, 590 bp, Homo sapiens
gctgtttgtctacttcctactgcttccccacgccggcggcgccatcatgagtggaaatcgtgcacttgcaggccgggcagttgctggaacgcaatagtcggagccaagtttgggaggtgaatcagcgatgagcagcggcatcgaccccacgggctacctaccacgggtgactagcgaccgtgtcagctggaacgcatcaacgtgtactacaatgaggccaccggcggcaaggtacgtgccccgcgccgtgctcgtggatctggagcccggacaccagtggatctccgatggccgctcggtggacccattcgggacagtatcttccggccggacaacttcgttttcggtcagtagtggtgctgggaaacaacatgggccaaggggcactacacagagaggcgcggagctggtggactcggtgctgggatgttgtgatgaaaggaggctgcacgagctgtgtacgtgcgctgcagggtttccatgctgacccactccctgtggtgagggcggactggtctctgggatgggtaccctcctcatcagcaagatccgggaggagtacccagacaggatctgaacacgttagtgtg

SEQ ID NO: 646066 - DNA, 796 bp, Homo sapiens
tggtggacaatccacacggccggcaacccctcccgcgagtgggggctccaacagggggcccccccaccgaatcacttttaatggggaggctccctcccaaatgaaatgtaaagggtgtgaaggagaggcttctctggcctcctttgtaggagccggcccacaggtgtgtgaccctggtgcacatcttgtgaagagagagttccattataagatggagagttggtggagacccccttgtgtgtccccgtgaccccctgaggagtctcctaccccccccaggatagattttacccccttagggaatttcccagaccactgtctcagaacccctggcacccacgttgtagaacatctcccagcccatgtgtggaaaaagaatgtatgttatgtacccagcggcaccaggaagatcccatggggcgtgcccaacattctcagaacgggacacccagagaagaacaccaggagaattttgtaagaaaaattctatggagtccacatcccggagagtggatttttccacaggcgtaaatttctcacgtagcgccccgtttgctgtcctcccctgagacatcgttggggctgtagcatgcaacaccaccccacatttcttttcccctcatctttcttcttgggaccttgtgggccctcacgggcttgtgggcaaggcaatgggaatgtgccccaggcacaacggttccgcgggcatcagagagaaaagagtgggttttgggaccttgttcctcccccattggcccactgtttacaaccatttaaacgattttccccagctcca

SEQ ID NO: 646067 - DNA, 324 bp, Homo sapiens
tgatctacaggatcttactaaccctaatcgcagtacgcttcacaatagcaaagtcatggaatcaacttaagtgcccatcagtgtgaacgggataaagaaagtgtggtatatctacaccatggagtattatgcagccataagaaagaatgaaatcatggttgcagctggaggccattatccgaagtgaattaacccagaaacagaaaatcaaatacttaacatctgctaaagatgggaacaatagacactagggactccaacagggaggaggaagggagaaaggcaaaggttgacaaaattctttttggggcgattagggttagt

SEQ ID NO: 646068 - DNA, 110 bp, Homo sapiens
gaacctgttctgactttagaagcacttcctgtgtatcgatgtgagggctcctgtcctcatcactatcttcacggacttgacttgtactcccaccaatcgttggcgtggca

SEQ ID NO: 646069 - DNA, 267 bp, Homo sapiens
gggcttccttccttaaaaccccccccccttttggggggggtgggggggggggttgggggcccctttccgccccccctttttttttttttttttccaaaggggccggggttggggggggccccttttgtgggggggggggccccctttttcccccccggccccccccctttttccacccccttggggtttttttaaaaacccccccccccccgggggggaaaaatttttttttcttttccccaaaaacccccttccccccccgggcca

SEQ ID NO: 646070 - DNA, 1426 bp, Homo sapiens
gggcgccggaacaccatgatgtggagacttaggatgtagtcaagtacctctagcgacggtctcaggagcagatggccgaccagtgaatcgtcgtgactgtagtaaggggctggtgacagtatgtctctcaagtcataaggggttgtccgtccatgttgatccgatgtatcatggtaccagactcatgcatagtagcggaaccaggcatcgcatgactcggtgattcactataactagtaactaccatcaagcagcatggttcatacaagatctctatgtgccaatgtgcaagtagcgaattggccctctccaattttcaaagttcttgatggtgccacaatagggcaagacacttgggttactcttcttttgaaagtcatggatcttgtccttccataaccaattattgattcaccaagcatcattcgcatcccaactttcaaatgcaggtagtcatcaacaatttcactatcccaacaacgtttgacatcctgcccaagtgggtaaaatcccagcatacaacagcagctcctacccaatatccacccaatataggaggcgcaagggcattgggaacggggaaatgtacattaaaaaagatagcgtcataattcgtcgtcagtaggagaaaattgggggatttaggaacacaaggtaaaagaggaagagtattatttgggggttagtaaattccattgggcttgtatcgcaaaggacgtttacaatatgggcccttccgaacgttaaatggtgtattgacgtagtggataaccaagggataataggtcgtcgttatataaaacaataccgagcaattacttataggacacactcgcgtatacatttcgggatcacaaccacgcgttccatcagttggtgggacctccattccaacaagaggacacggcctcggggcagttccatatccaagtagtatggacattctacgaggaactggaaggcggcaaacaacttaggttttcaacgaactagcttgtgacacacatctttatcctatagaacaaggcacattccaacacgcgtcaatggtcatacgcccagtacaggaagcgttgagcagaataccacacgctgttcctggccccagcgcgctttggcacacacacctggggtcaaccactggaggcatacaacactactggaagggtcctcacacatcgtgcaagcgcaccacctggggtactccaaacaacgggggcaaacacatataagccgacaggcgccgaacgaacgacacaacgaccagaaaagtcaacgctccacaccagcgtacacaccaactgcaggccacagcagaccaacactacacacaccacacaacaacaggcacaacgaccaagacaagaggcacaagaaagcaaacacacgacacgaacgagcaagcaaccaaaacacgagcgacagc

SEQ ID NO: 646071 - DNA, 472 bp, Homo sapiens
cgctcggtaccccttgcttgctcaggtctccctattctctgagacacaacaatattgaaattgggccatttaatcaccctacaatggcctctaaagtgctcaagtgaagggaagggtcgcaggctctcacttgaaatcaaaagccagaaatgtttaagcttactgaggaaatcatgttgaaagccgagctaggctgaaagctaggcctcttatgtcaaccagccaagttgtaaatgcaaaggaaaagttcatgaaggaaattaaaagtactactccactgaacacatgaatgataagaaaacaacacaacctctttggccgggtgtgatggctcacaggctgggcgcagtgactcacacctttgatcccagcattttgggaggccaaggtgggtggatcacctgaggtcaggagttctagatcagcctggccaacatggcaaaactctgtctctactaaaaatagaaaaatt

SEQ ID NO: 646072 - DNA, 312 bp, Homo sapiens
  misc_feature (37)..(37): n is a, c, g, or t
  misc_feature (41)..(42): n is a, c, g, or t
  misc_feature (47)..(49): n is a, c, g, or t
  misc_feature (72)..(73): n is a, c, g, or t
  misc_feature (76)..(77): n is a, c, g, or t
  misc_feature (84)..(87): n is a, c, g, or t
  misc_feature (132)..(133): n is a, c, g, or t
  misc_feature (140)..(140): n is a, c, g, or t
  misc_feature (152)..(152): n is a, c, g, or t
  misc_feature (160)..(160): n is a, c, g, or t
  misc_feature (165)..(165): n is a, c, g, or t
  misc_feature (180)..(180): n is a, c, g, or t
  misc_feature (213)..(213): n is a, c, g, or t
  misc_feature (311)..(311): n is a, c, g, or t
atggagcagcgccgcgtcaccgacttcttcgcgcgcngccnncccgnnngcccccgcatcgcgccgcccaanntgnnctgccgnnnncccagccccgccaggcccgcactccgcgccccggcctccgctacnngtggcanccgggagcgcgnccgcccgnccggngcccccggacgcganaggccaggccaccggcccgcaggagactgcggntgtcggtggacgaggtttccagccccagtacccccgaggccccagacatcccagcctgcccttctccgggccaagaagataaagaaatccactccggna

SEQ ID NO: 646073 - DNA, 109 bp, Homo sapiens
tcaacatttagctacaagcttcatatgacatccccctatgaagcttgatttcttggagttatctttacaaaaaacttctgtcaggtgattaatttcaagcatggtggat

SEQ ID NO: 646074 - DNA, 137 bp, Homo sapiens
aacgatctacaggggaggggacctggtgggagtgtggtctcacctcccttgtgtccaagccccacatttggtgtgttaacgtggggaaaagagtctgatttcacttagaaggcaggctgccagcagggcagccctgg

SEQ ID NO: 646075 - DNA, 389 bp, Homo sapiens
gcgcctctagagtcaccccacgccgaccctcccctcttctctagacttatttccatccttcccgcttttaccctccccacccctccctgggctccaggcgcggccctcctcatcctggaccggccttctcgggcccctcttccttaacgggagagtgcgaatgcagccggctgcccccccgctttccatcagtcggtcgccaccgggcaacggagcccgtcgcagggaccgaggtggggagggagaaacgtccgcaggggcacatccgctgacgacacaatcgatgagcggcacacacgcaagcaggcatggcgctacccatcggccaactgcacaccaaaagggaaccagccagggagtggggatcatagagcgagcgcgagtggaaa

SEQ ID NO: 646076 - DNA, 212 bp, Homo sapiens
ttctgcagtctggaaactctgctctggggcagtgacaccttagtgctctgtggccatacttcgtggctcgtgcctgtaatcccagtgctttgggaggctaaggcaggaggatcgcttgaggccgggagtttgagaccagtctgggcaacatagcaagacccccttctgtacaaaaaaaattagccggtcaacacctgtagtccagctgcttg

SEQ ID NO: 646077 - DNA, 464 bp, Homo sapiens
gggctgtaggaattttgcacgagagatcacacaacctctaacaagataacccccaacctgtgtgagatcgccttcagactatacacgccagatgtgacacacagtgcaacagcgccaatatcttcttctccccagtgagcataggtacaggctttggaaaggtctccctggggaacaaaggtgacactcacaaagaaatactggagggcccgaatttcaacctcaccgagaatcccgaggctcagaaccatgaaaggtttcaagaacttctccatataccttaacaagcagacaggcaggttcaggtgagcaccggcaatgggctgttcctcaacgagggcccgaagctagtggataaatttttggaggaaggtaggtggaccactcagaagactttactgtgaactctggggacaccgaagagggccagaaacagatcaacgctttcgcggaggggactcggg

SEQ ID NO: 646078 - DNA, 137 bp, Homo sapiens
aatggcctcggtccattggcttgggccgcaacgctaactaactatggtgactgctcctatgtctcaaactagcttacaacaaaaacctagtgtatgaagacgacaaaaggtaacgacttccgcaccaaacaccaaga

SEQ ID NO: 646079 - DNA, 432 bp, Homo sapiens
agacactgtccccactttcagttctaaaagcttctgggtctaaaatcttaagttgacagatgtctcaaggtgctttctgctctcactaaaactttagtcattataaaaccttgagggggatccttatcttgctagaacacctaagaaactcaagagatcaccatacgtgtacccttcagactattgctttttgcactgtaaggagcatacaaagtgcctggggatctctttaaaatgcagataccaatttagaagatttgaggtagggccaggtaatctgcattttttaaaaagctgacgccaaggctactgatcagaaaccacactttgaacagggcttcagactctaaaatttagagaaatgaagccacactgagtggttggcatagttggcttgttcctaatttcaagatgccagggggcacagagccc

SEQ ID NO: 646080 - DNA, 390 bp, Homo sapiens
  misc_feature (3)..(3): n is a, c, g, or t
  misc_feature (20)..(20): n is a, c, g, or t
  misc_feature (28)..(28): n is a, c, g, or t
  misc_feature (77)..(77): n is a, c, g, or t
  misc_feature (275)..(275): n is a, c, g, or t
  misc_feature (293)..(293): n is a, c, g, or t
ttnaaatatttgtgaagaanttggcccngtccatggtggcctcgggcccgggggcccccaagtagctgggacccacnggcacacacccacccatgcccggcctaattttttaatttattttttgtagagacagagtcctcactgcgttgcctaggctgctcttgaactccctgggctcaagtgatccacctgctttggcctcccaaagtgttgggcttataggtgtgagccactgcacctggctgtgaacttagtatgtgtatatatgtatatgnagttatatatatatatanaattatatatataaaattactcagaagccatagtatattccttttataggttaagcatttatagaaattataagggaaacattaaaaccctagcaga

SEQ ID NO: 646081 - DNA, 288 bp, Homo sapiens
tcaacagtgctgggcccactcagtgtgaacaaaagcctttgcatcttggtgccatggcatgttattaagtggaaaataattccagcatgacacagaagtgagactttatacacaaagcaagttatttaggtccagattattcatgtcatcccattcagtattgtatcaactacaggcaaagctctatggtagatgccattgggcttaaaaatacaaatgttgcatgatcctctgtaagcagtttatctccaacttaggaaagtcagatatggatcgcactggactctg

SEQ ID NO: 646082 - DNA, 205 bp, Homo sapiens
ctgagccggccagcaaattcaatgcgccacccacacgcttcacagcctctccatgctgagtcagcgcatctcgtgtcgtgtccagtatgggatggtagacgaactggcctgtagccagcaaagtttgctgctcagccgtataggcttggccttctgtctgcatggcagacagcttggcgtattgcggatcatccttgggcgcgcc

SEQ ID NO: 646083 - DNA, 155 bp, Homo sapiens
ggagggtttcaccatgttggccaagctcggtctcgaatttcctgacctcaaggtgaatattgcctcccttggcctcccaaagtgctgggattatagggtttaggccaaccacaacccgacctgcaattttatttttatttttttaattacaattt

SEQ ID NO: 646084 - DNA, 155 bp, Homo sapiens
  misc_feature (6)..(6): n is a, c, g, or t
  misc_feature (30)..(30): n is a, c, g, or t
  misc_feature (128)..(128): n is a, c, g, or t
ggcttngcccttttctgaggcccatggggncttttctgtttgaatggtcgccttcctcatcctcttcgcccatgtgaggctccatggggggtcaccggacctgttgctactgcaactccacaccattncttggtgactggggtgtgttaagcttt

SEQ ID NO: 646085 - DNA, 1064 bp, Homo sapiens
gcccggatggccagcatgcgtgtggtcatggcttcgtggtgcgtactatcctatgcatcacctgcacacatagctgccggtaattaggctgttgatactgcattagcgagtcataccagagctagtccctgagcgcacaatgacctgtgcctagttttccaaaaccgtagatagatgactacagcctgttagggctctgccctgcttgccctgagagcccagactaacgaactacccatcatacagcccgtgacggcgtctacacgtgtaaagtgctggctgtcccaactgttgtcgctgacaattggtgcgagcctgacctgtagctaccacccgtgttgatgcgctagtggctctctgaataaggagagcgttccgtgaataccctcaataagggaactgtattgcactcgcatgggtgcatggggatcatcgtgaggtgattgctgggctgtaagactctacgtgcagctcctggatccttcaggccaccgtatcaagaaccgcgaacgcagagcgagtgtccatctcgagaaggagctccattgatggacataatgccgatgctagtgggatcctatgggcacttgaggtagtgatgacagaaagtgcttacaaatgaatgggtcaagtgaccgtcatgtcacctctgcgtcatgaggaatcctgggggcagcagtgccgtcatcttccttcagggcaagggccctctgatgacgcccctgtctgggtcccccttgcctgggacgcagtctgttgagttccaagcatgctgctacttgcacgagtttgaggctgcccccctcaccgtggcgtagccgaagagggctgcagggatccccagcatggaagaagggaagtgcctacacaccaaaaggcaaaacagaccaccaactccctggagtttccgtcaacatcaacccagaagcgtatggccatccaaacgataagaacttagaccaatgggacacgaccacaagtcccagacacccaaggcgaacggttactaaaccgaagcaccgacaaccccaacacaacagcgggcacagaaaaagggaaaccgc

SEQ ID NO: 646086 - DNA, 326 bp, Homo sapiens
tcgcaatcatcggcaccttgtttcataatccaattcccgctgtaccctgaataaggtggtgatcaatgatgttaacaaaacgaatttaatgtactcccaagattattgcagataggaaaacacatccgctcacaatggatgtgccggtcagcaccattcagcgatgtttttaaacctgctgccacggagcgtgatttgcccaccttcctcccagagttggcccttagctaacctcatccattgaaagctcgctggctctgttctgggcctgcatgggcagcctgcagtccggtatggcttcctggtggggtgccgatgaatagcga

SEQ ID NO: 646087 - DNA, 178 bp, Homo sapiens
ctaagtgttgccttaggccaagacatgctcgattaccctccacctgagcaatggctcttggtgcctcctcctgtactcacagctctaaaggctctctctgtggtgacaattcccagtctccaagctgggccactgccggtgacttgctcatccatatcgcccaccagcgtttccatga

SEQ ID NO: 646088 - DNA, 104 bp, Homo sapiens
agtgcacagcctgggcaatatggtgagaccccatttataaacatttaaaaattagccatgcatggtggtatgcatgtatagtcccagctacttggctgaagtgg

SEQ ID NO: 646089 - DNA, 118 bp, Homo sapiens
gtaatgttttatctacgttattggtagtgacatgtgaacatggccaagacctccacactcccctgagaagaacagtcagtgagaattagatacatctaaatgtgtggcacatgtgaca

SEQ ID NO: 646090 - DNA, 146 bp, Homo sapiens
ccctgtcagcctgccctcatcccatccacgtccacacctgtcagccctgggcgctcgatccacccacgtccacacctgtcggccctgattcctcacccatccatgtccacagacccatgtacatccccacacctgtcatttagatt

SEQ ID NO: 646091 - DNA, 1029 bp, Homo sapiens
gggaatgcaataaatgtagcatcgtgaataaatataacttttataatccgtaaagtggtcttttctttccatttctttaattgttttctcaatttttattcattttttcctttaggacacatttcccttaattggatatctttcccttaaatttctattagttgttttcatctgcccacatgtaattgaagatttaaaaaaaaaattctgatacctgcagtattactaatactgcttaatttcttgaaatgtggaattgctgctgttaatgtcaagcaaaacgcagtatttatggcaaattgtaaagtaatttgaatttagtgctacctcaaaattaactttttaaatactatgttagattcttaacagttaaaggtctaatacatgcatgaggaatggttacttatgaaaggaaaaagaatttgtaagagttatcacctcagtttggaagaaattgaacaaaatgtaaggctgaagaaaacttacggaggtcacaaaagtgatgttttcaagaggaagagaaactgggagggagatacacagtggaaatgcaaaatgaatcaagtatagtggtagccctgagagcttagggactcaaatggaaactgtgtgaagggaaactcacttgaaaaaaaagcatgaaccagttaggccctgacacactgtgtttggccaaagttcacaaatcctgttttaaccctgtcgcttccctgtcacttctctggctttacctctcctgactaagctttttgtttccttggcagtaatttaagatctttctggtacattgcccacaagttaacaactgctaactggaactggcttaaccacttactgctactggaaactgacttagcccaccttgcataatcggagattagggaaaagtatatggcctgtagcaacaatagggccaaaagcttttgctccaaagttacgtccattcatggtccacaattgacaactgctgttagtcacatggacaatcattgagttaaacgctcaaaatcgtcagataatacacactta

SEQ ID NO: 646092 - DNA, 396 bp, Homo sapiens
  misc_feature (396)..(396): n is a, c, g, or t
gatctctctatgaggcccaggctggtcttgtactcctaacctcaagcaatccccctacctgagcctcccaaaaagctgagattacaggtatgacccaagtcccctcgcctctagcattttttttttaactattaaatgggcctcttggtctaaggcaatgctaggtatgatgccataaccatataccagatacttcatatacttttagatactgttgtttgctgagacactagagtcaggaaagtcaaagtcataccttgaataaacattaaatatattaatagtagggatggattgtgttttctctaggatataaggaacgtacaattaacttgttaccaagtagatgttgtatcacatcgacacagcattagtcttggctgctcattggtgggn

SEQ ID NO: 646093 - DNA, 523 bp, Homo sapiens
aagctgttcggtctcggaagtaagtcatcgcggcgtgacgtctgatccaccctcgaggttcctgtggaataactacccttctgaaacatggtttcacccgtatccttctctagaacgggtcgggccgctaccactgtcctggcccggaggggaactgttttctccggaagtgacaacacgctgactaggaaaaggaggaggcggggcagatggggccttcggacggcgactatggaagtgagcctgcatacatgttttggtcgtttgagaagggcggagtgtacctgcaccaccagctgctacgaagtatcaggaccgagactactctcatcgctggtgtcactccgtgttcgagcgacacaagggacacagtgaacgatccttccatgccactgtggcatcatgttagagggagtgcagcacaattaccaaaccaaatccatctttcatccaagaacagtacatccatatgggcacgtgactcaatgtgcattcatgagcgaggaaccaacactatagagcc

SEQ ID NO: 646094 - DNA, 206 bp, Homo sapiens
ttcaactacgccaatgagaagctgcagcagcattatgtggctcactacctaagggcccagcagggtgagaggatggggtgagcaggaggcaggtccttctattgggatcctcaatcccttcctgaccttccagccccaagttccaggttctgattagaagccttttgttccttctcattttatatttacattgacaaagtaatcat

SEQ ID NO: 646095 - DNA, 250 bp, Homo sapiens
caccacctcccacccctagactaggtacgaggcctgcgtgtttaatcgcgtcgaggatacaagcggcagtttagactccgcctggcaggagatgctgaactcacgccactcagcagggtcatggatggcggagcagaccaagatccagtgagctgatgctggtgcataatggagacggcagccaggtacaatgccgccatggtgccgcatgcgacagctggatgaatgaaactcaagagagccatcaaca

SEQ ID NO: 646096 - DNA, 118 bp, Homo sapiens
gtctcggtcattatgctgattcactttggagcctcagttcctttcctcttcactcctgtgtcctagtgattccgagtcattttggtcactgattgttaccgggtatcgagctcgattt

SEQ ID NO: 646097 - DNA, 106 bp, Homo sapiens
tccagccccacattgcacttagtattcgacgtcgaaagaatttacttttaaactttcccagatacctgagctctgtggttctgttgctatggaagtggggaagagg

SEQ ID NO: 646098 - DNA, 877 bp, Homo sapiens
  misc_feature (178)..(178): n is a, c, g, or t
  misc_feature (788)..(788): n is a, c, g, or t
agcgggtctgtccgttggggccgggccgggcgggagtgcaggtgacgtgagggcgcaagggccgggacagtggtggcccgcccagtccaccggcgtgtctcagcggtcgtaagattcggcgcccggcgcctatcccgcctggtgccgcctgacttgctgcctacataatatgcgtagncatgacgttctgacgactgacttgactagtcccagtccccatctggagtagttcctgagatcgtggatgggggagaactcacacgggactgctgggtcgaaggtccctgagggtgtcaggctcacagaggtggtcgtggacatagtgcgggcgtcgctaatcgttcaccgggacctgtcgacaacgggtaggtatggggaaaccaagaccaccaaaggcggacatacatcagacgcgctagttctcgcgagagatccgcgtcacgccccggctgttgacgtggggaagtatcgttgcctaggaacagtaattgtagtcgccgagttacgcttgcaagaatttggcaacaagtggatggaagcgagggactaactggccatggcccaattcacctcggtgggtatgcgccgtgggtagccgaggggagttttcccactgtgagaagtcgtgggatgctgtagcagctctcgaagcacacccaaacgcggatactaaggtgggctatagggtagcgccgctttatccagtcattgctcggtgccctgtagggatggatacctttatggcgcgaatgcttgacgggcctcactggaccttggggatcgcgatnatgagagggagccaatggccgaagggttgcatttggcgatcccatgggaccgcctggcaaatgtggatacgcaaattagctccactaag

SEQ ID NO: 646099 - DNA, 897 bp, Homo sapiens
cccgcgccgcacgccacgacggccctgctggggtgctgggccttcctgccctgcgctcctgcctgacccttcgcgcgctcgcgctcacgcacgtcctgcacgcactgcacacgcttgactgtgcgactgcgctacacgctacgaacgagcgcactcctggcgctacacaacgctagacgcaagcgactcacacggaccgcgactgcactgacacgctagctaccacgagcagaggaagcaagctacttcagctctgcgcactgcgactttaaactggccatcaccacacactaaacgcagcaaccctctagcagcagcacacgctcgcgcaaaaagcctttgccccttcccaacggcccccgcacagctctaacccacgcacactgactgcaacaccctctatcactcaactctcacttggctactaacacacactaacaggagcactttttccctgcagagaacctgactttcaaactgcttctgactgcctttagcatacacgataacggctaatatcactgacctgactgaaacatgctctttctggaaactgaggaactaacagctcaacaacttaacgtgtgataaggagaagaacctgctgcatgtcacagacaccggtgtaggaatgaccagagaagagttggttaaagaaccttggtacccatagccaaactctgggacaacgcgaagtttcttaaaccaacaatgactgaagcacaggaagatggccagtcaaacttcctgaattgacttgggccagttgagtgtcggatatcatattaccagccttccttggtagccagaataaggtaattggccccctccaaacccaaaaaggatttccaggcacaattggggaggcttgactcaataaaatttctggtcattgcg

SEQ ID NO: 646100 - DNA, 830 bp, Homo sapiens
aggagagagatcggtggtgagtcagccaatggtggactcccaggcccagcacccgccgcctccccagactgctgtcctaattctgctgagctgtccctgtgatccagggtctgcccctgaaggagtgaggagatatttgctcatgatgcctgtgaatgtgatgacccaccatctggtgtgcctctgaagtgccctgtgacatgaacttgcttcatggagtgccctgctgagtgatgggtgcccagatgatggtgctacactgccatgtgatcttgatcctggaaccccactgctatgccacgccctccctgagactgtgaccatgaaatcatctgcataggttgcccatcaccttgccactgggccactgatgcctgtgtggacatgtggcctcttgacaaacatgcctgtcaacccctaactgtgggtcatgttggtgtgtgcaatgtgcaccgcaatattgcatgtccaatggaacttggcgttgaaaccacgcggcacatcgagcataagaagaccatcggcacgaggacaatcgcgcagatggaccgcgaaccacaagacgacaacatagagcgagccacaacgaccgggcccaccaaggcgaaacacatgacgccaaaagacaacaaccgcacgccccacgcaacaacacacagaacatcccagcacaggagaaacaaacacagagcacaccaagagacagccgcgcagaggagaagcaggagcacgccagaccagctagccgacagaagcagacagacacacgcaaacaacaacgctccagaagccgaacccagagagacaacacacaacaagacaccaacccg

SEQ ID NO: 646101 - DNA, 1413 bp, Homo sapiens
  misc_feature (879)..(879): n is a, c, g, or t
  misc_feature (926)..(926): n is a, c, g, or t
cttgtaataagtaaatacacgtcgactggtgagtatacgtcacgcgtgtggtgtaattttaactactcgatagtatggttgatgataacaacaacttgccgtctcacgtgaggtgataaaattcttgttgtcgcactccataaagcatccacctggggtttgacatacccagttgtcttatatcgcccatgtgtgtgcggggaagatttgtcttccccgccctttgtagtatagcccctcattatgggtgactgctacccacggggtgtgtgcgaccttggggggagttccacacacgcttttcttttggggggtaaatactccccgccttgggttatgacaaagggggttaattcccactcccagaatgggccaatgttgccccttttcaagggctccctggcggatgtggaaacccctcgcgccctttttgtggatttctaacacaccgggggcgacacacacaccagaggcgcaatttgttggggcccaaataccccaaagagaattgtgcttgcagatgttgcgcctttcttccctcttgacaaaaccccgtgcaagagatgtgttcttctggaattctccgcaggattttataccccttccatagctttatggggaattaaccccctgggggttgttgttggcccaaataaaccactggtgccccagggatgtgagagcccccctccagggagttgggtttcttttgtggtcccgcctttctctgccccctacagccaggcgacaccccctattcactcgttctcctcgtgggctggggagcaaacttggtccaaaggtattggaaacctcggctataaactggcacaagctgagaagagccccacccacacacttggccacacacacacaggnctatatttgagaacacacggtggaaactcgttcttctcccacagatnggaattccctctctcgtggctcttctcgggaaggccaacaggagttgcgccacaggcccacttgttaatgggagttcttcacaccgagaaggcacaaacaccctcttaacacacgctaagattggtggggaacatcatcaaacgccctcgtgcgttcaagccctataccgctaactggcttgtggtgctggccacacacaggccccacagcactcacaagattctgggagatttatagagagggagaaagaatcacttgtaagatgaaactgagagcaaagaagttattcacgtaccacgcacgcaaaggcagaaccacccccacgtgcaccctccctggcctggtttgctgagtggccacgagactctgtttgctgggtatacaccggagacacaacctggtgcgagtgtggcaggtgacccttggcacacgctagaagatttatggcagagctttaccaaataaaaaaaaaactggcttttttga

SEQ ID NO: 646102 - DNA, 254 bp, Homo sapiens
cggaccagacttctgtcaccaggaatagcgaaaacaaattataacatgctaattttttaaaaaagtaagtatctggccaggcggggtggctcatgcctgtaatcccagcactctgggaggccgaggtgggcggatcatgggatcaggagatcgagaccatcctggctaacacggtgaaaccccgtctctactaaaaatacaaaaaattagccaggcgtggtggtgggtgcctgtagtcccagctacttgagggg

SEQ ID NO: 646103 - DNA, 1121 bp, Homo sapiens
tcatctacgtgtgttgctagtcggtttttagaattcgtccctactcgtggcaccgtggcaaaaacagtggtgaacaccatttgtgcggcaaccacgggcttttataaatgtctccaccgtgcctagaggcacgtgcaaaacaaatgtggtttttggaaaaacctaatagaattctaaaaagggttttacaggaaggcgttttacagatgttataactgggttctcccgcgtcaacacaaacagggggttttaatcaggccagctcacacaggaagttctgggagattccccccagttctatgccccgaccaccatcacgcatctttgggtgaaaaccgtgatgaattgactctggaaggcttcaaccaatttttccggaccactggagaggaaagagggaaattgacactctggtgtgacctttcggacacactggaccatcactcagcggtcatcttctcgaacccccaaagaaaggtggactggctgacggagaaaatgagggaatccaacttcacctgtatcctcaaagcatggagacatgcccccgaaagaccgggagtccatcatgaaggagtgccggtcgggcgccaaccgagtgcttaattctacagaagttctgggcccaggggttggaagtccctccacggtgtccctcatcattaactatgatctccctaatcaccacgagaattgtaacaaaacaccagaattgggagatccacggttcgataccgcgcccgcgaagggtttggcccacttaaactttgtaaagaatgacgaccattctcgcattcctccacgagatattcgaccacgtactattccacactcacgattgaatgagatgccgcatgaacgcttgctgatcttaatctgaagcacgcacgatcacgtgggatgagggagactgttcacacctgctgtgtaactcctgtttggaagtatttagatccagattcctacttaatggggtttatcatggactttctttcttcataaatggcctgccgtctcccttcctttgaagaggatatggggattctgctctctttttcttatttacactgtaaataatacattgttctaagtctttttcattaaaaatttaaaacctttta

SEQ ID NO: 646104 - DNA, 125 bp, Homo sapiens
  misc_feature (1)..(1): n is a, c, g, or t
ngcatactagggtgtgtggatatgatgaggtatctttaaaatgtatgtatttaacaaatacttaagtgtattaaggtcatgtagcaaggatttgataaagtttaaataatttactctctaaaaaa

SEQ ID NO: 646105 - DNA, 348 bp, Homo sapiens
ctcctgcccatgtagctgggattcaggcgcatgcaccaggctggtaattttgtattcttagtagaaacggggtttcctatgttggcaggctggtctctaactcccgacttgtgatctgccaccttggctcccgaagcgctgggattacaggcgtgagccaccgaacctggcctgcctgttttaccttttaagatgtgacttagacgccagaggaaagtctaccttcttcctgtcccttaggaatggcttaagtaacaggatgatagggttaagcgttaatacaagcagcatggctcacacatttcctacccctttactaactgcttcagtggataccatattttactt

SEQ ID NO: 646106 - DNA, 584 bp, Homo sapiens
  misc_feature (26)..(26): n is a, c, g, or t
  misc_feature (86)..(86): n is a, c, g, or t
  misc_feature (106)..(106): n is a, c, g, or t
  misc_feature (118)..(118): n is a, c, g, or t
  misc_feature (121)..(122): n is a, c, g, or t
  misc_feature (140)..(140): n is a, c, g, or t
  misc_feature (143)..(143): n is a, c, g, or t
  misc_feature (155)..(155): n is a, c, g, or t
  misc_feature (161)..(161): n is a, c, g, or t
  misc_feature (165)..(165): n is a, c, g, or t
  misc_feature (176)..(176): n is a, c, g, or t
  misc_feature (180)..(181): n is a, c, g, or t
  misc_feature (185)..(186): n is a, c, g, or t
  misc_feature (230)..(230): n is a, c, g, or t
  misc_feature (268)..(268): n is a, c, g, or t
  misc_feature (271)..(271): n is a, c, g, or t
  misc_feature (275)..(275): n is a, c, g, or t
  misc_feature (283)..(283): n is a, c, g, or t
  misc_feature (298)..(298): n is a, c, g, or t
  misc_feature (303)..(303): n is a, c, g, or t
  misc_feature (308)..(308): n is a, c, g, or t
  misc_feature (310)..(320): n is a, c, g, or t
  misc_feature (335)..(335): n is a, c, g, or t
  misc_feature (342)..(342): n is a, c, g, or t
  misc_feature (345)..(345): n is a, c, g, or t
  misc_feature (358)..(358): n is a, c, g, or t
  misc_feature (368)..(368): n is a, c, g, or t
gagctctccgtagctcagtggttgtnccaataagacatcagggattcttcagaagccagccttcagacctctcactgtgttttganaaaattattatcaatttggntttaaaaaccanggnncctgtcaaacccttcccnccntcctcatctcangcctcncgcntgccacttgcntaanncccnntggttcacaaggtcactgcccccagaagcaggcactggaaaganacaggcagctcttcattatcccaagcagaacctctgtnaanttgnccattgangggttcgatttgggnggggntgggntnnnnnnnnnnnagtttcacctttacnggagttntanttcatagtttggngttgcagttngtggggcaacttttcactgtgcttgcacctgggctggggcaggatcctgaacctctcgggggcgtagcgcggaacgtggtcggcttgttggtgaaggggtgccactggccctggatgctagggttgtcggtgtggaagggcttgcggatgcggatcacgtccaagcccgactggtcggccagcttctgcaccagcgtcgagatctcctcgaccgac

SEQ ID NO: 646107 - DNA, 725 bp, Homo sapiens
caatgtgaaggacaggtgcagcaggcccgcgccaggtggaggactccaggccacgttttcctacgcatccactccttccaggacctgtccagcagcattctggcccagagccgtgagcgtgtcgccagcgcccgcgaggccctggaccacatggtggaatatgtggcccagaacacacctgtgcacgtggtctcgtgggaccctttgcccctggaatctactgagaaagccccgcgtaggagaagaagtcagggggagagggagagggactcgatgctgtggccccgtctcttatacattgcatgctcgtgctctggagtcctcaatccggggctctatttcaacacttcattttcttagccgaactcctcccagctcttctgtgctcgtccatttggtgaagctaaaggctctcaaaacgggcaatcacccagttgagccatctctcagcctctctgagtcttggaagaagcctgttctgagcctcaccctatcagtcatgtagagatgagatgtccagaacacctaaatatcttgtcaggaaagttctcccctgcagaatttcttcgtccttgttaaatatcaggaatataggccgggtgcggtggctcacacctgttatcccagcactttgggaggctgatgcgggcggaacacctgaggtcaggtgttcgagaccagtcaggccaagatggtgaaagcccgatctctactaatggatagaa

SEQ ID NO: 646108 - DNA, 442 bp, Homo sapiens
actgcactccagcctgggcgacagagcgagattccatctaaaaaaaaaaaaataaaaaaaaaataataataataataattttttttcctccaaaaagcactttgcagagaacctcagcaaggctgaaaaaaataaaaataaaataaaaataggccgggcgcagtggctcacgcctgtaatcccagcactttggggggccaaggtgggcggatcacctgaggttgggggttcaagaccagcctggccaacctggtgaaccatcatctctgctgaaaataaaaaaattagccaggcatggtgacgggtgcctgtggtcccagcctctcgggaggctgaggcaggagaatggcttgaactcgggaggcagaggttgcagtgagccgagaccataccactgcacttcagcctgggtgacagagcgagactctctctcaaaaaaaaa

SEQ ID NO: 646109 - DNA, 412 bp, Homo sapiens
tcgaggataggtagacaggaagtgagggttgcgtgacgagagcagccgatatgagcctattgtcgtgggccaggatcaggttatgctgggtctattatgctatgtgatacattccagatgttatcctgtgccatgatataccattgtaggtttaagtgtaatagatcactctgactgtagattatgtactgtcacaactagcagaaattggtcgactatttctagttctcccacatctatttgtgagactgcgtggtagtcctcctagtatatgcgattactatacgggatggataaggagtatactagattgtctcggtaggttgggataaattgaatgattgattgtttgatcagtggatcgattgttgggtggaaatataatcggaacttctcctatattcctagcctt

SEQ ID NO: 646110 - DNA, 542 bp, Homo sapiens
ggatcttcagggacagcggttcgatacaaggtcaatatcagcaacaagttctacaactccagtgctgatatcagatacaatgcttcaaggacaacttcttatcggaaggcttattccagttacgtgaggctagcatgaggtgtgtgcattttgccaggggaacatttctattctcaaattaacccatagcagcaaatgctacgcatatgttgagtccgtatagaagcatttgcggtggacgatggaggggcccgactcgtcgtactcctgcttgctaatccacatctgctggaaggtggacacgtgaggccaggatggagccaccgatccaaaccgagtacttgcgctcttgggggtgcgatgatcttgatcttcatggtgctgggcgccaggacggagatctccttctgcatcctgtcggcaatgcccggatacatggtggtgccgaccgacagcaccgtgttggcgtacaggtctttgcggatgtcacgtcacacttcatgatggagttgacgttgttctcgtggatgccgcaagattcc

SEQ ID NO: 646111 - DNA, 150 bp, Homo sapiens
gcaggataatcggttcagcaacaaacagaaggaaactactgaagcagctgaaatttgcagaatgcctagaaaaaaggtggacatgagcaaagtaaatttggaggttataaagccttcggataacaaaagggtaacggaaatcctgggttt

SEQ ID NO: 646112 - DNA, 237 bp, Homo sapiens
cccgcacggcgtaagcgttgcaaccagtgccgggggtaaggctcgtcacctcggtttaccctaagtcgttgatcgacaaatagttttgatctgacaaggacttagaccgagccgactgtgtacttttgatgtgtacttccggggttcgctcatgacaaaagtgagcgaagcgatgaagagagcccccggggttcaccagcggccaggatcgagcatctggcattacgccgatgcggg

SEQ ID NO: 646113 - DNA, 338 bp, Homo sapiens
ttgtcttagaggaccccgtttcgtctcatcactggacacggtttacatgtactgaaactttggagggactcctgcactatcagtacatcacccattactgttctttttttgttattttgagatggagtttcacgcttgttgcccaggctggagtacaatggcacgatcttggctcactgcaacctctgcctcctgggttcaagcgattctcctgcctcagccttccaaatagctgggattacaggcatgcgccaccacacccggctaattttgtatttttaatagagatggggtttctccatgcctcaggtgatcccagcctcaaggtgatcgacttg

SEQ ID NO: 646114 - DNA, 149 bp, Homo sapiens
gagactttacatgggttctgaatgctggtaactagtaaagaaagatcaactgaaatacgacagccagtatgttgtggcaatattcgagacaacacactgtaaaaaaatctttacagtttaaaactgcttcacattgtatacataactta

SEQ ID NO: 646115 - DNA, 129 bp, Homo sapiens
ataggcaggaaacctgtacggttgtgctaaagacaaatccatgctgacctacagtaaaacattgaggtgtttgtatgtatactagtttatgcttttatttattaaaggctactgctatcaatatgaagg

SEQ ID NO: 646116 - DNA, 903 bp, Homo sapiens
ctgcagtgtgaatgtgagtatgaatgtgtgtggtagtgcgacagctgtgtgtgtacgtcgggtgcgtgtgtgcgtgtgtcgtgttagcgtgtgtgccgtgagttagagcctgagtgtcccctgcgtgggttagtgtgtgcgcccgcccggtgccctccgtcttgggagtctgggctgctgctccgctgggctctggatgcctggctgctccccacgagccgggactctccgccgcgcccgggagctgcgcaatcgggctgccaagacgccggctgccacctggctgggccctgttctcccctctcttttctacatgtcttacccgcagctgacagggttcgaaagagcatgaaacggaggagacgttacagcaacgtgtcagctgaaatgatgggcgtagacgcacgtcagcggctggaaatggttctatcaaacatgaaacgtgttaggagattttcctcaagtttcaaatgacgtgcgaatcccgttttccgcgatgccgcagcgcgcgggttttaaccgcagggtcacgcggaacgccggccgggcgatgtgcctcggtctcttgcgcccggccctccctccgggtccgcgaggaggaggaaggcccgtcggtgtgcggaggtcaagcggcgctggatcccaccaaggcgaagagggtcacgggacgccttgaaccgaggtcaccgaggccacggggcccgggaggcccttccaggcaagaagcccggggtgactcccgaacccatcaaagggccgtcccaggaaagaaaccagcagcaaggagcccagggcgcccacagggaagcccccgaaagatgtgtgcgcgaacgtccagagcagtccaaggccctcgaaaggaaacggcctcccagggggggatccaagtgggcgcctaagccg

SEQ ID NO: 646117 - DNA, 154 bp, Homo sapiens
tccattatttgaaatatctctaaaataacaacgaaagaactgttacaaaaatcgctctccaaatcgtcatctctattcgttttccagttgttttctcgcctcagccaaccctttttggtcttcttcagaaagtttcgggaatttcagtttcatt

SEQ ID NO: 646118 - DNA, 1346 bp, Homo sapiens
agcgggtccacgcctccctataagacaaagcgcggccgacgggctccgagcgcggcccctgggttcgaacacggcacccgcactgcgcgtcatggtgcaggcctggtatatggacgacgccccgggcgacccgcggcaaccccaccgccccgaccccggccgcccagtgggcctggagcagctgcggcggctcggggtgctctactggaagctggatgctgacaaatatgagaatgatccagaattagaaaagatccgaagagagaggaactactcctggatggacatcataaccatatgcaaagataaactaccaaattatgaagaaaagattaagatgttctacgaggagcatttgcacttggacgatgagatccgctacatcctggatggcagtgggtacttcgatgtgagggacaaggaggaccagtggatccggatcttcatggagaagggagacatggtgacgctccccgcggggatctatcaccgcttcacggtggacgagaagaactacacgaaggccatgcggctgtttgtgggagaaccggtgtggacagcgtacaaccggcccgctgaccattttgaagcccgcgggcagtacgtgaaatttctggcacagaccgcctcgcctgccgtgtaagaaggtgcaatcctagataacacagctagccagatagaagacacttttttctccaaaatgatgccttggggtggggagtggtagggggaagagctcccaccctaaggggcacacactgagttgcttatgccacttccttgttcaaaataaagtaactgccttaatcttatactcatggcttggagttaccttatattcaggtatatgtgatattttgcctggtttgttaaaattgccccatttagattccttctataattgttcttatagataagtaatttatatatgagctgtgttagtattttttcagtgtgagatctctggattctttcacaataaagctgttgaattttaacaggagtattagtacataaattttctactcaacaattccgagataggattatgcctagtttgtcatatcacagaaaaactccaagttaacttcatgttttggaagggcaggtcgtttttaaagtatttctttttttaactggatgaaaaatcttcatgttaggattaattttcttaatcacctccacactgtacagaggaaactcaagccttaaatgtttaagtaaactctgtctcagttttaggattaaaatacccaccggtggtgtgatgatgccatataccgcagggcttgcttctgtcaagtgtgactctatctcagtaattaaaataagtgctgatctactga

SEQ ID NO: 646119 - DNA, 781 bp, Homo sapiens
gagtattcaaaatgcgcaacacaggaagccatgaaaaagtccttgggctctgtggggttccccacgctcacggctccttgctcccagactcactgacctccgtagccgtgcagccgcatagtatgttgatgcctaaaaagaaccggattgccgatgtatgaactccctgtttttatacggatgggagatcgaagtgtgtggacgacaggaaggatgtcctacatgcactatagtcgcccggtagcctgggagcacaagaatgtgccgcatagccttcaatggtcatgaaggccatgcagtctctctaagtcccgaggtgtacgtgaaggaacagtttgcctggagacatttctactggtaccttaccaatgagggtatccagtatctccgatgattaccgttcatcgtgcccccggagattgtgccatgccaccctacgccgtagtccgtcccagatgacttggcaggtccgtcggtgctaaaggtctggagggtgagcgatctgcgagaatcacaagaggggaagctgacaagagatacctacaggacggagtgctgtgctcactctggtgccgacaagaaagtcgagggtggggctgggtgaagataggcgaattccagtttagaggggattggtcggtggacgtggtcagacactcagtaaaattggatgaggattcttttgcattgaatatagcttgaaggcgaagagagctttataaaacagagctgttggttgacatatatggggggattaaggggtgggggaaaaagccattaa

SEQ ID NO: 646120 - DNA, 209 bp, Homo sapiens
aggggggaaggcaggtggaacaggaggtcattcttaatgccatgtattctcaccagcatttaacagcagagttacagccaaattcatacttagatgacagatcaaaatatattccaaaaagtcataatcttcaagtattctgtcattttggactatccagagccaaagtgaagataaaaccaagatttgaatgtagactccttgatgga

SEQ ID NO: 646121 - DNA, 142 bp, Homo sapiens
acccttttccccaaaaaaggggaaccaagtttgggttttttataccctgtcctttggggggttttttttttctttgttgcctttaaattccatcccaaaaagttgtttgccgtagggggaataaagtttattccaattttta

SEQ ID NO: 646122 - DNA, 338 bp, Homo sapiens
tatgtgccaactcggacagctcctgactctgggtagagaggaagcaactttgtcattgataagagaattcaagtaggactcctttgaataagtgttcaatactatagaatctttacacacttgcgattacatttcctagaatacataactacttactagttgtccttgtatagtagccatctgggacgctgaatttccaggtcagtctccaatgcacgttacgtctagtggtgggacaagatgagttatttcttgatattataaagattgatattttcctgatatttaaggatattaaatttaaattgatattaaagatatttaaatatcttattgag

SEQ ID NO: 646123 - DNA, 84 bp, Homo sapiens
tgtggccgaatttctctaactgggattcgcggtagaggttactttgacttctggggccagggaaccgtggtcactgtctcctca

SEQ ID NO: 646124 - DNA, 109 bp, Homo sapiens
atcccagtgttcctgggtccagatgttctccagccttcctccccagactgggccctcccttgcactccgtcttctctgatccttccttctcctctactcccaggggtca

SEQ ID NO: 646125 - DNA, 474 bp, Homo sapiens
catgagacttactatcgcatcctgctgggcaccatcacgctgatcacggatctctgcgaacgaagccctgcagtcctcaggcacttccgaaaggtggtaccccaactggtacacatcctccggactctggtgaccatgggatactccatagaacacatcatatctggagtccgcgatcccttcctgcatgtccagatacttcgtctgtcttcggatcctgggccggaaccaccaggagagcagtgagaccatgaatgacttgctggccctggtggccacgaatcacggacaccagccgatactgccgtgacatgcggtcctgctctgagacagtactcaccatcatggatgtccgctctgcagctcgcctacgggttcttgctttcgacattcttggtcgcttcctactccaccgtgactcgaacatttggtatctagcccttacatcactgcttccacaggcgccctccgtga

SEQ ID NO: 646126 - DNA, 197 bp, Homo sapiens
gatctcattattagcatattcttggtggtcttggagttctcacaggtgtacgtgtatagtgtgtgtgtgtgtgtgtgtgtgtgtgtgtgtgtgtgtgtggtgttttttccccccaagtccaagtatattcttagagtcacacttgcataacaaagatacggagagagtataaatccctaacaaatctagcgtgagga

SEQ ID NO: 646127 - DNA, 442 bp, Homo sapiens
ttgaaatttttctccccccttagggatttttagttgttcggttgccaaggatccctgatcccattttcctttggggccccccctccccccataggagttaaaagttagggtttaggcctccttttgaaaaagctgcccctttttcagggctgtgattgagggggggcctgggtaaaaatttttctttaaaaaaaggatgacccattttttttttttttccggttatatcccatagtaaaggtggctttttttttttttttttggtcataggggggggatttgttcccctgggccccctggggttttgtaatgcccgggctaaaaaaaaaaagcctttttttttttgatttgtttctgtcccccttgcccttgggggctcttgcttttaacgttttttgtaatttagtttgtggccccttaaaaaaatgggcctagtttttta

SEQ ID NO: 646128 - DNA, 517 bp, Homo sapiens
taggctgtctgcttctgcctctgagggatgtacagattggctgcggagctgagtgcatacaagtaaagtgaggacagtaccgagaaacagtgcagggcaaaggcaggaaagagatctgagctgcctggagatcatctggggtgcggagtacaaagctttgcaagggtgtggttttggaatgtcgctactgtgaaagtcctgacgacagataaaaaggttggaagttgcacactgtacactgttaagaagtagagcttttatcttagaggcagcagacggtttggagccacggaatgaaatgatgaggcgtccttcaggtaatgaacttcagctgcagtgtgaaaggggcaggaagactggcagctgtcaaaactggaacagtccagtgagtatgtgcaggcccgggcttgggcagtgaagagggcagggagcacacatcaatttctgcggtaaaaccttctagaggaagaccagacagagggtcaacagagttgacaggagaacataattgaggatc

SEQ ID NO: 646129 - DNA, 154 bp, Homo sapiens
ccagaaccaaacatatagaactggcgggacctgagaaactcccattgtgtttgtactccagtcgcggctcccccaggatcagccttgaactcctggagtcaagcaatcctcctgccttagcctcctcagtagctgagactacgggcacacaggt

SEQ ID NO: 646130 - DNA, 238 bp, Homo sapiens
gcccccccccccccggggggacaaaaaggcaatttttaggggggcttttgttccaaaggggcctttttggggcccccgaattttttcttttaaggaaaattttttttgggggtttcggggggcccccccggggtttcttttttttttttggggggggtttttttttcccccccccagggggttttttttgggggcccccgtttttggtttccccccaaaagaaaaaatttccccccca

SEQ ID NO: 646131 - DNA, 150 bp, Homo sapiens
atgacctttgatgagatcagcatacacaaatacaaaagtctgagtttttttttatcaggagggataaacaccatgaaataaacttgaataaactgaaaatggaccttttttttttaatggcataggcatgggcgttcccgtttggacaat

SEQ ID NO: 646132 - DNA, 90 bp, Homo sapiens
caccataaagttttagtttcacactttgaatatcaacaaagcagtaattcctaaaatcatgaaaacatgataaagtatcaaaaaaaaaaa

SEQ ID NO: 646133 - DNA, 308 bp, Homo sapiens
tagaggatcactaacgatacagtcagatcgttcttctatctggttgatctaagacttataaaaagggtgatactgaactctgctcctatggttgtgtggttgtctacttctaccttcagtttagtcaatgttgtttcatacacaggttgaatatgccttatcccaaatgcttcggaacagaagtatttcattttcagacttttgtttggatgtttgaatatttgtatatccataatgacatatctgggagatgggaccaaatctaaacacaaaatatatttgtttcatatataccaaatacacatggc

SEQ ID NO: 646134 - DNA, 467 bp, Homo sapiens
  misc_feature (200)..(200): n is a, c, g, or t
ctgggtgatgcatgtgtgagagaggagagcatgctccatgggggagtgtgagtaggtgtatgtgtgatgctcaaaaatgtgggaggctttttgacaaacacgcatgagttcttggcctcataactacgttgaaaaggaggatttcttccaaaattcagcagattgcttggagggtaattgtggcttgctggtgggggagnaccagccctgcaggtgagttagttcagcttctcaatctcactctggaattttataaatgcccctggggggttggcagaaggaaaagggcttccgtgaaatggtgaggcatttcccagagcctctgatccctcactcctgaaagcatctctgctgaccaccattcatccctctgagatggagaagttctgggccttagggagtcttcccatgaaatggatggaggtctgtccctgagccaaggctgggaaacaaagggcagtgagaat

SEQ ID NO: 646135 - DNA, 118 bp, Homo sapiens
gcaagctgtatgcttgataggtagatctctagcaggatcccccgttccaaatcatgaaaatcattaatattactgctgttagagaaatgaagtgagcctacagatgataggatgtttc

SEQ ID NO: 646136 - DNA, 113 bp, Homo sapiens
atcttagttaccgcgtagggtgtactcaaggctttagctacatcaacggtccgattcgtgacctgttgctgggcaaggaccgctggaccagaaaaccccttggcacacaatga

SEQ ID NO: 646137 - DNA, 1008 bp, Homo sapiens
gagccaaatagggtgcaacatgctctgagaggattttctgtataccatgatggatacgcatgttcctacacatccatggacgaccgcttctgagagggatagaggaagaggaccgttcactccgacgttccagctcagcgatgatagacgcccaactttgtattggttacggcatttgctgtgtccaaggaactgtgaacattacaattggtgatgacatggttatctggttgagagttggacaagtgattagttgaagaaattatgtagatcgagtgtgtggctcgtaaacggggcacgtgttagtgataacactttgcgtccttgaggatatctctatatctattattatgatgagtgcaacaataaatgatcacgtaatagggatttgtgtggtatctatcttgttgaagctaaataagaagtggcgtattgagttttgaaaaatcattgagtttacttgaagccaccccacgtactcaggagtacgctagcgccccgtcgagatacgttactaaagatgatacgtagcgacttgatgttggctcgcggttattgcgtaggcagcgaatagataccgaggaaattgttacgccggttggcagcgcaggtatccattgttttcacgcaagaagtcgctcacacgcggcaagtcgcctgtggcaggtggtggactctgtccaccagacataggattaggtgaggaggaggctaattgggagggtattaaatcatgccgatgatcggatattgctggaaattgtaagctccccagcgggctagaagaggttggggatagcctgcatctgttatgcagtaagttcactcctgtggcggaccagtttattatgaacccttactgttatttatcagaattttacttgtgtagctctagaactcccgttacataccagctgtgattctccctgaatttttttacggaggccaaggccaacaaataaagcatacgcctggccaaaaggtgagaacaatgggctggaaaccccg

SEQ ID NO: 646138 - DNA, 379 bp, Homo sapiens
  misc_feature (291)..(292): n is a, c, g, or t
gaaggcactccaggtcgcatcatatcctcttcgcgaggagtccaagctctactcccactaataggtttttgatgacttctagcaagcctcgctaacctcgccttaccccccactattaacctactgggggagctctttgggctagtaaccacgttttcctgatcaaatatccctctcctacttacggggctcaacaaactagtcgcagccctatactccctttacatatttaccccaacacaatgggggtccctcaccccccccattaacaacataaaaccctcattcacnngaggaaaacaccctcaggtgtcatacacctatcccccattctcctcctatccctcaacccgggcatcattacggggttttcctctta

SEQ ID NO: 646139 - DNA, 1582 bp, Homo sapiens
  misc_feature (433)..(433): n is a, c, g, or t
  misc_feature (1202)..(1202): n is a, c, g, or t
  misc_feature (1414)..(1414): n is a, c, g, or t
  misc_feature (1423)..(1423): n is a, c, g, or t
  misc_feature (1427)..(1427): n is a, c, g, or t
caccactgcactccagcctggacaacagaataataccctgtctcaaaaaaaaaaaaaaaaaaaggaaaaaaaaaaaaagaaaaagattttgcctttgagttcaagaacttttacccttttatcccctttggctaagaattggattgttaggaaggttgacatgtggtctacaaaattgcttgcagccagaagcgttggtgttattgttgcctggaaagaagggagtttgcactagggccaggtgattgtgacattcttctgtgtcccaggattattttggcttatacctttccctgtgttggggccccttcccttattaggaggcgcatttattattcgcctcatttcccttactttacaatatagggtttgggcatattagggactttggcttgggcgcccgggtggcgacaatattaggggctagagcganagagcggcgaaatatttatcgggcgcggggcgccgccagaattgggcggtttcccccaccgtttgtttatctcccccagaggcccacttttttgtgcgccgcgagggctagttgaagcgcgaggggttcggacactcacagcttttgagaagcgttcccgcgttgcgatttctcgtggagacaccccagttttcttgttgtggccccaaaccgtgtgttgtgtgtagagaaaccccctgttgtgtctctctatatctatagcacaagggcgcctacccacaacaaatgtttagcgcccaaggtgccattgttgggtttggcgccacggggggcggccctgttgataaacttctcccaaaggcttttgtctgtgggcgaaaaaaggcgccctggaagggcgccacggggaaagacatctcccacctttttgaaaaccccccccgtgcgtgagaatagtggcgacgggacgaatggttgttttgcctaatttgtgatgcggcccccaagagattttctatttttgctgccatgtttttggaacgcttctcccccaggtgctcgtctgggacacgaacaaagcatgtgtgttgagagacctctctccgcgggttctttgccaagaaacgagaagcaatccagcatcagatgatcagcatgacaaaaagctcttggcgcgagagacgactcattatatatattcggcgcgcgcggcaggcgcgcagagaacacaaagcagcgggtgattcttcagtgaacgaacttcggcgcncgcattgtgtggccaccacataagcgctgtgtttgtccctgtagagaccccaccaggggttttttcttttgtgtgttcaccacaggggtgtggtggacacaaactatcgacggggggggagacgccccaacaaaataagagaggagagcggcgcgccgataacataattctatgtagcatagcacgacgcagcgagacgtgtatgacttatnttaggaggngacnacacgtcagacgacgcaccactgactcgacacgtactgtaggcagatcagacgctagatagaccgaccatcgactgcactactgcatgccgaccaacagtcgagcatactccgatagtacgaactccagcagtcagcagtacgtacgctgacgat

SEQ ID NO: 646140 - DNA, 228 bp, Homo sapiens
ttagttgaggacagtatggctgaggtggtattaatttgcagagttctggagcaaatgtagattagttagtgcagggaggttatcaacaaggatctgacatgagatagtcggtgtttgtatgaacttgagcacatctgttaaaactttctaggtccacgtttcctcactctgtaaacacttggggccgaggtgacagtggctcaccgccttgtaactcccacgcacctt

SEQ ID NO: 646141 - DNA, 509 bp, Homo sapiens
  misc_feature (434)..(434): n is a, c, g, or t
  misc_feature (490)..(490): n is a, c, g, or t
tcggggctaatatctcagaaaatatcacttacattgaaaggctggacaaataatttacataccatttcgacacagcattcggtcacaccaggtataatctggatattatcaagtaacggtggatacatttaaggtggaacttacaatttaatacttaaaagccatggttccggtccattaatggctggaagggataaataaaaggtggtacacactcatacaaggaaacatcatttagccataaaagggaaggcagtacggatacatgccacaacagggatgagccttgagaacatgatgctaagtgaaagccaaagacaaaagggcacaaattatggcataattccatttaattgaaaggtccaaaacaggcaaaatcacagagacagaaagtacattacgggtttccaggggccgaggaagggaagactggngagtgatggctaataggcatgtggagttcctttgtgaggtgacagaaatgctctgnaattagacagcggtgatgc

SEQ ID NO: 646142 - DNA, 370 bp, Homo sapiens
  misc_feature (280)..(280): n is a, c, g, or t
  misc_feature (282)..(282): n is a, c, g, or t
  misc_feature (362)..(362): n is a, c, g, or t
gtttcaaaaagaaaaagacaaaagggccaggcacaatgggtcctgcctgtaatcccagcactttggagggccgaggtgggtagatcacttgagatccggcgttcaagaccagcctgggaaacatggcaaaagcccgtctctaccaaaaaataggaaaaattagccaggcatgatggcacacagctgtagtcccagctcctcgggaggcttgaggtgggaggatcactttaagcccagggaggcagaggttacagttgagccaagatcacaccacttgcantnccagcctggggttgacagagcgagatgccattttcaacaccttttttaaaacaaacaagacaaggttgattcccgggttncaccaggt

SEQ ID NO: 646143 - DNA, 362 bp, Homo sapiens
  misc_feature (362)..(362): n is a, c, g, or t
agcagcaccatggctcaacagaagaaccttgaaggctatttgggatttgccaatctcccaaatcagtatacagaaaatcggtgaagaaggttttgaattcacgcttatggtagtgggtgaatctggattgggaaagtcgacattaatcacctcattattcctcacagatttgtattctccagagtatccaggtccttctcatagaattaaagggactgtacagggggaacaatccaaagttttattcaaaggggggggtgttcagtgctgctcacaatagtttatacccaggatttggggaggcgtggctacatgatgtaattgggggctcctaagtcgagtccggttacacgtcatgcctn

SEQ ID NO: 646144 - DNA, 962 bp, Homo sapiens
ggactagttctacaacgcttatgcgtgcacgagcccatgcattggtaataatcttcttcatagtaatacccatcataatcggaggctgggcaatgtgactagttcccctaataatcggtgcccccgatatggcgtttccccgtataaacaacataagcttctgactcttacccccctctctcctactcgtgctcgtatctgctatagtggaggccggaacgaaggaacgagggttgaacgagttataccctcccttagcaggggaactactcccacctcgtggagcctccgtagatctaaccatcttctccttacatctagcagggtgtctcttctatccttagggggcatcaatttcatcacaacaattatcaatataaaacccctgtgcataacccaataccaaagcgcccctcttcgtcgtgatccgtcctaatcacagcgagtcctacttctcctatctctcccagtcctagcgtggtggtatcactatactactaacagagcgaatctcaacaacatcttcttcgaccccggcggaggaggagaccccattctataccaacactattcgtgattttgcggtcaccctgaagtttatattcttatcctaccaggttcggaataatctcccatattgtaatttactactccggaaaaaagagaccccttgggcactcctaggtaggcgtgagctaagatactcaggtgggcttcgaggggttactcggtgtgagcccccccattattttccggtgcggattccgctttacccgggcgccattttccctccggatccatattctttggtttccccgggggcttagtttttgggggtcgcccccggggacactattaagcttttgggtggggctgcccagagacacttctccccggggccgggggtgttaaacccctcaacgcacacgcttgtgccccatgtgtcagggcgtcacggcgct

SEQ ID NO: 646145 - DNA, 158 bp, Homo sapiens
  misc_feature (106)..(106): n is a, c, g, or t
  misc_feature (127)..(127): n is a, c, g, or t
  misc_feature (148)..(148): n is a, c, g, or t
gtcatttattgcatcgaatcaggaaaaaggaaccgcataagcttttgtataatataatataatgttgaagtggataaacggtgggctctcagcagtcactggtatngctgagctgaatatgggaagnttacattcatagtgttgctgntagggtaaaa

SEQ ID NO: 646146 - DNA, 104 bp, Homo sapiens
tactggttcaggggtagtccttgctactggttgcagcggtactggtttgcagcggtactggtttgcagcggtactggtttgcagcgccctcacaagaccctggc

SEQ ID NO: 646147 - DNA, 318 bp, Homo sapiens
  misc_feature (41)..(41): n is a, c, g, or t
gtgaccttggtgaggcactcactctagcagagctctgttcncccacccaatccccatcccatgccattccccaccgtgcacacacggcacaggctggcctgattgaacactggtgacgtaggggcagccattggtttaactcacctctccttaccctttctaccccatcttggtggaggaagtctttcttcaaccccaagcctcttcctaggattgttttgtgtgtttctttaacccaaccatcaaccacaaaccagacttgaaggctcctccagggcacacctgtgagggaaggaggggtggtgagtcccttcctcc

SEQ ID NO: 646148 - DNA, 408 bp, Homo sapiens
  misc_feature (123)..(123): n is a, c, g, or t
tgtgcggctgatgttaatcagcatggccaatgatttgaaagaagtttggatctcagaacaacctttcttgttagtaacatatttgtggcaatacatgccaacctgggcctggtggataaccancaagatggggaagaaaaggattgagaactttaagagtggtgtggatgcagactcttcttattttaaaatctttaagacaaaacatgactgaaaagagcccctgtacttttcaagccaccggagcgagaaatggaaaacatcacaacagcaatcctcttatgcctctgcatcatcaaagactaatctctgcttctactttttaatagctctgcctctgctcccaacatgcactgcaacaaaacataaatactcaacgactgccctgaaaaaacacaacaacaaaac

SEQ ID NO: 646149 - DNA, 773 bp, Homo sapiens
gcgcacgtctattaacactcacggtagatgaatctgccgcagcgtagaaatgctcaagaaccagggggaccacgaagaggagtgcttgtccacgtccattgctcagctcaaagtggtacagaccaagtatgtggaagccaaggactgtcttgaacggtgctgaacaagagcaactgagggtatggggtaggcgggtgagggtaacgctacagtggagaacctgcttctctcgtccacacgcgtcctaacccagttttacttacctgaaacgagaaaatccattgacatatcgtataccgcgttcagtagaaccctttgcatgttagcctgcctagaattgaaaagtacaggacattcctctgctgcctattagcccctgtgatccgttctttgtcacactgatctgtagggtgctgtgccctgattggaactctcgtttaacgtcattacgttggagccgactaaaccttaccccgagggtgtggtctatcacttgctcttcacatgggaaagaattactcgtcccactgacgaagtactgtatcctttccacaggaacggctacctgctgccttctccctttctccattcactcaccccaaagaagcggggagggggaatgctatgattacttcagattaccctgtcctcacaatgatatcgaggatacccttacccatgacttacttatagggagacggaatttcgctctgtcgcccaagcgtgtagcgcaatggttgagaatcttggcgtaactggaagctccggcatcc

SEQ ID NO: 646150 - DNA, 603 bp, Homo sapiens
  misc_feature (188)..(188): n is a, c, g, or t
  misc_feature (208)..(208): n is a, c, g, or t
atggaagccattcctcctggctctttgccctgctccacaagattggacgtttgttgatcgaaaaggttcttggtgagctcaagcaggaagacctggcaacggataacgtcatggttttggacactgggaccaggtttttgtttgggttggaaaggattttcaaaaagaagaaaaaacaaaagccttgncttttgttaaacggtacatngaaagggacccaaccaattgggattgggggacgcccatccccgtggtgaaacaagggtttgagcctccctcctttgtggggtggttccttgggtgggaaaaaaaataatggtttgtggaccccttggacagggccaaggtttaattggttgccttaggaggggcagggcccccccatgttcccgggcagggccttttggaaatgtccttccctcaaaaaggccttaaagggaacaaaacagcttttctaaaaggggggggggggggggggggtgtttttttttttttttttacaggatccaaaaaaagccccgcaaaaattcaaagtccttgcaaaattgtttaaaaagtcagggtttgggaaattaaatccaaaaaaaacatttttaagggtga

SEQ ID NO: 646151 - DNA, 139 bp, Homo sapiens
acccttctgcctgctgaatgagagaagcaacagccagatggggctcgaatcccatgaaatgcaaatgtctaacacaggctttctctatcatacttcacgtatacatatatgcacctataaagaagtgaacactagctgg

SEQ ID NO: 646152 - DNA, 600 bp, Homo sapiens
ctgggagtggtgcttcaggcgctcacctgtcaccatcctcctcaatgccatagccgctcctctgcccctctcccagtggcccgtttacctgaagggctggggggctgcggaccactctcaaggaccccaaatcccgtccgcaggccctcctggaagtagcccttgtacacctcgtcggtgctgtacctggggagggccatcaacaacgagctctgcctcatggagctcagcccagaggatggcccagcccatgaaccccccagccagggtcacttactcacagatgccgtagccacacatgctgccttctcgccagtgacacttgtaacagttgaacttgtcctcagaggcctggggcagcaggcggatgccgaagctgacagcatggttgtgggggtggggatcagccctgacctgagacgcccattacacctactccatgccacccaggagtatccctgcccccaaggagccttccagacaacagggagactctcagaggccctcagccttcctatccttcaaagggcccctctcaggacccctccctccagcctggtcccgagcaccttggagcaccttttggcctgtaccactccc

SEQ ID NO: 646153 - DNA, 212 bp, Homo sapiens
ataatcgcaaccacttgggaggctgaggcaggagaaccgcttgaacttggaaggtagaggttgcagtgagctgagatcgcgccactgcactccagcctgggtgacagaacgactctgtctcaaaaaaaaaaaagaacaatggcggcttctcaaaaccatgggggggtgggtaaaacctggattccccggcgggggggggaacggcggggtgc

SEQ ID NO: 646154 - DNA, 652 bp, Homo sapiens
gaaactgatcacaggcaagtgcctatgctttgttccactggctgtggattttatggaaaccctcgtacaaatggcatgtgtgtcgagtatgctataaagaacatcttcaagaggagcaggaatcagtaggtaatggtagaatgaaagcccacctgcaacctctgtcaggtgaggtctgtctgaatctgttaccagttcaatgcacagatggcagtgtgccaagaagcccagtcagcattagactctacatcttcatctatgcagtccagtccctgtatcaatatcagtgcacttttgatgccagaatctagtagcatcttctcaatgggacagtacatgtgtggacgaagcagtacctgaaacagaagatgtagcaggcttgcagtgatcggagacacagcacagaagtgcatctgaagagctagaagcaagtctcttgaaagaatgggaaacaaaaaaagaatcgctgtgtcatgtgcaggaagaaagtgggacttactgggtttgaatgcggtgtggaaatgtttactgtggtgtacaccgttactcagatgtacacaattgtcttacaattacaaggcgatgctgtgagagaatcagaggagaaaaccgagtagtcgtgggggaaagatccgagatatgaatcctgtgg

SEQ ID NO: 646155 - DNA, 1209 bp, Homo sapiens
  misc_feature (659)..(659): n is a, c, g, or t
  misc_feature (911)..(911): n is a, c, g, or t
ttggcgacatgcactctcttcgttgttcttattatagtagtcgtgcgtccgtgtgtgagatcttcgccctccgtccgtgagatggggcgtctactcttgttggtgtgttcgcctgtggcgcacacccttgtgttttttcctcgtcctctggggtatgcttcctatcgcgcctattgtcctgttactgcttccccgagcgcctatttggccacctgtttgggccacccctctcggacccggtataccctctgtggggtgccaccgccccctggttctcgtgggggttgcccgcggggaagatcccacagtgttaagagggcacccccatcaaggtgtggccagccctatccggttgacacatgtcaacatggcccaaacccttcccatagtccccctttcacgtcaagctcttttctgggacaccccggaagtgaggtctttttggtgaggaaggttgaaggtgattatctggattgactggaccagtgctctgttaaggggcccctactggttgagagattgtgagttccggttcaaacaactctgtcccctgaggtactgctgtctgtcacaggagaaccatatggtcgacctatcagtgggccaaaagaggtccatggcatggccccagccacagtcaggaccactactggcaagcncctggaaggcatctttcatgaagccccgtgacgttctttgaaaggcacgaagtcccacccactgcaagaagcctgctgaatttctagaggcttctgagcccacctcgcttaacgccacccaatgttcaccagaacattctgttgactgcctcacccttgggagtccctgccacccagttccctctgggcacgtggccacatgtcacccacttgaggatgaaagaatataccacaccacgaaaatatgtgccntgtgtttggagagcttcacgccctgcaccacatttgaaactatgtcaccttctcccacgacttgcgctgggtcacgttctctttctgagtagaggacttgactggtaaaggggcacgatgctttttattagtacctgatataaacccaatctgaggggaacactcccttctttgcctgggacaacttttactcttcacggagcttggcatcatggactgttaatagtatgtgattttccccctattttctctctcccaaactgactaaacaccataattttaaaaataataataaaaa

SEQ ID NO: 646156 - DNA, 1300 bp, Homo sapiens
tgggtgccgtggggcccgtgcgtagggtgtggtcgccggcgcgcgtggtgtgggtggtggcgggggggggtgggggggtctcgctggagaggtgtttgtgctcgggggcgcgcatgagggttggggggaatgtgcggtgtggggggctgtggtcgcgcgtgcgcagggggggagtggcgcgtgcccgcggggcatttgtggctgctggttagtggggggtgtgagttcgcggcggtgttccgcaggggggcgcgcggtgtgggggtgctcgattgccccgctggggagcgcggggggagcctgcgtgggaagagggagtggaagggggcgtttcccgtggagaggggggtgttcggtggggcgttttgggggagtcgcccggggtgccgccgggggggcagaggccaagacggttgcgagaggaggacccgggatgcagggccgcgagagcgtggtgagcaccgcgggcggcacaagatctgcgttgcctgagtcctgcgcaaggaaacaccgggacccaagaatgggggagagaggcctttcaccggaggggcccaagagggggtaaaatgggaggtgtcgctataagaagaaaggcgttgtgtagaaattatgcgcagagtccgggggcccatggagacccgcgttctgcgtaccacaaggtcccacgctctgttgtagataggagagaatgtccgtgagacccacgagtatttagtgctaatgtgttgtaggtgagagaagggagaagaatgaatgcgcggtgagacccacattgcacagcgtttgtataacccacggcttattccccagaagagtgttcgaggagaagagcctcccgcgagattctgtgagatgcccacggtgagaggagaaccacgaggcacgaattaacgcacaacactttgtcactaagcaccacctggaggcactcttgcgccttgcgcgcgggaaatcacccacgaaattccgagggggcccaatttattgaaggtctcaatcctttaaaaaagggaatagctcacccactactcctttccacatggacacatccacgtgagggttttaattacgctaggtttcccttccactagagttgtgcctttcacgaaaatgctgaggtaggtttcccacatttcttacctgtgaatgtgttttacccacgcacacctccggacacctcacccttcacggagcccttaaataaaaattaattcacacttggtaaagtgttcaagtctttctgagtcacccccagtagcatgactgatctgccaatttaaaattcctgtgatctgta

SEQ ID NO: 646157 - DNA, 1163 bp, Homo sapiens
caacaacgacctatttagcatgtgcctccgaaccgttttcctcctgacgctcgcctaacaattcacctcctcgctagatagctaagcgtacctgacgtcctaccacctcacaatgcatggtcaagccagcgccacttatccagtgaaccattatcacgaaaaacaactctacctctctatactaagtctccctacgaattcatccttaattataacagttcacgagccgacagaactaatcatattggtatatcattcttcgaataccagcactttatcgcccacgcattggcatatcgatcaccctgatgaggcgaaccaagccgagaacgcctgaacagcaggcacgatagcttccatatatctagaccctagtaggctccgcttccccttactcgatcggcagctaagtttacacgtcagcaaacaccctaggctcactaaggcattgctagctgactgcactctcgagctggccaagaagctatcagaactcctagaactgaagaagttaagtattgactaggcttacgacaatagctttgatacgtagcagatacctcttgacggactccacttatgactcccgtaaagcgcatgtcgaaagcccccatcgttggggtcatagtacttgccgagtactcttgaaagctaggcggctatggtataagtacgacttacaatcattatcaagccacctgagaaacaaataggctaaccttcctggtactattcctatgaaggataattgtcacaagggccttcggccagaacacacggcctctaatcggcaaggaatccttcaaacggacatatgcctccggaaaaagcggtctaattctaacacctgtagagactaccgaggcgagaaatacataaataggcgcgcgaaaataaccaaaaaatagggcagaaacaaaataaagagcaacgagacaaaaactctaggggaacacccccacatatagtcaagaacacaacttcaccgaggacgagagagaggacgcatacgaagaggagatgaagaggagagccggagccatccgcctcataccaccacacaggtggtgagtctcagctgcaaagagggagatgagacaaaagaatagcaacaaaaaacagaaagaatcagaaaaaaacgaagaaaaagaaagaaagcaaac

SEQ ID NO: 646158 - DNA, 657 bp, Homo sapiens
agtggtggctcacacctctaatctaagcactttgagattacactttgggaggccgaggcaagcagatcacttgaggtcaggagttcgagaccagcctggccatcatggtgaaaccccgtctctactaaaaatacaaaaattagtggagtgtggtggtgcacgcttgtaatcccagctacttgggaggctgaggcaggagaatcacttgaactcgggaggcggaggttgcagtgagccgagattgtgccactgtactccagcctgggcgacagagaggacaccatcccaaaaaaaaaaaaaaaaaaaaaaaaaaaatttttgggcccgcacttgggcccctccgaaaaagagttttctaagaaccactgctccgtatggagcgccgcggggcccccagttgggctcagtcggcacagtgtggccataagcggtgttccccagggaagaaccgcgggccatgcaccaagggcgttgagcttttctccacgccattatgaaaagaaaggcccgaggtcgggaaacacgcgaaggttttgcggaaacaaattccccacaatagggaattcttagggaaggccctacacggggacctctatccacacgcggagttcccaaggggaagccccatatcacaaattaagcccccgggccgcgagg

SEQ ID NO: 646159 - DNA, 163 bp, Homo sapiens
gttagcattttttgtttgcttatagacaaaatttctctcctctatccaaatcagtgggccataggcatttattttaagacaaacttttgagtataaacgcctttgtgcttttaccatacacaaatgcacacatattatagggttttgggccagactccacacc

SEQ ID NO: 646160 - DNA, 635 bp, Homo sapiens
cacgccgtctgggaagtgaggagcgtctctgcttggctcctcatatccagacgatgggtggccaagcagagacgctcctcgtctgggatatgaggagcccctctgcctggctgcccagtgtgagaaagtgaggagcgtcgtctgccgcggccgccatcccatctaggcaagcgagaagcgcctcttgccccgacgccatcccatctaggaagtgaggagcgtctctgcccggccgcccatcgtctgagatgtggggagcacctctgccccaccggcctgtctgggatgtgaggagcgcctctgctgggccgcaagcctgtctgggaggtgaggagtgtctctgcccggacgctccgtctgagaagtgaggaaaccctctgcccggccacgaacccgtctgggaggtgtgcccagcggctcattggggatgggccatgatgacaatggcggtatttgtggaatagaaaggcgggaagggtggggaaaaaattgagaaatcggatggttgccgggtctgtgtggatacgaagtagacatgggagactttgcatattggtgactgtactaagaaaaattcttctgccttgggatcctgttgatctgtgacttatccccaaccctgtgctctctgaaac

SEQ ID NO: 646161 - DNA, 312 bp, Homo sapiens
gtaaagcaagactacatctctacctcaaatttatttatttattcatttttgttcctatttatatttttagacagagtcttgctctgtcttaggctggagtgagctatgatcgcaccagcctggcccacatggtgaaatcccgtctctactaaaagtacaaaaaattagctgggcatggtggcaggcgcctgtaatcccagctacttgggaggctgaggcgggagaatcacttgaacccgggaggcagaggttgcagtgagctatgatcgcaccactgcactccaccctgggccacagattgacactgtcttc

SEQ ID NO: 646162 - DNA, 139 bp, Homo sapiens
  misc_feature (134)..(134): n is a, c, g, or t
tggtatcagtactgatcagctgaggaggaggatgaggacgaggaggatgggaatagcggctgaccttcctggtggggctcattcagaagcaccgacggcggcagaggaagattgcgcgaggaacatgcacacancatcg

SEQ ID NO: 646163 - DNA, 685 bp, Homo sapiens
  misc_feature (187)..(187): n is a, c, g, or t
ctgttgctgccgggcagtgaggcccagcccagcgccccgtccaccccgcggcagctcctcgcctcagtccgcacggcccgtgggaggaaggccaggctcgggggagcctcctccagcccggccgacccggactcccggtcacctgacccctcagcaagaacagcctgcctggtggccttctggggcnaggacccctggtgggcaacgtagccacaggaacaggccccgtccaccgcctccacgccgcacctggaggcctcctcgcaggcccgtgccccgcctccctggccgcgccgcctccgtgtagtcttggcctcctcaggctgcctcccgtcctctcgtctcacccgcgcctcccttgcctcatctggggcggctgtgggctctggcgctcctctctggctgaggtggaaacagagacaccctgtggcaccagagccttcccagcaggccaggccgctgggctgggatcagtgttatttatttgccgttttaatttatggattctccgcacctctgttcagggaagggcggcggccacatcccctgccgtctgcgcgtctcaggcagtgggggggctggggccagggcgccctctgaggacagagctggtggggcgcgggggggctggcgagctactgtaaactttaaagaattcctgcaagatatttttataaacttttaa

SEQ ID NO: 646164 - DNA, 111 bp, Homo sapiens
ctcaccaagaccctgcctttctcatccttcccagcactcaagagacagccttcaaaagcacttctagatgaagagcagccctgctttcccgtcccatcactctgttattat

SEQ ID NO: 646165 - DNA, 495 bp, Homo sapiens
gttcttataatattctatatatcctatctaagatgtgttgtcattcaagtttaaatgtgtgcatgtacagtccccatcagataggcgtatagaacatcccactctcctttactacatgtagagaaaatgcctttgttgtcatgctccaaatcccacactgggctgccacctgggagtgctggataccgagaaaggtgtccttacccagaggttctgctgtctgccatcagacgacggtatgagcgtgctgtgaggatgggaagaatgggttcaagatcatcatcattcatcacaaggggacactaaatagaagccttaacctgttgtacttgccaaaattgagaatcagagatgtgtaaatgcagcaaattaattataatgtccgttgagattcgctttttgccaagtcgccagagtctgtatccacatcaggtcactgtaactaatgtcattatcttgtaccaactctatgtcataggctagggaagctcatag

SEQ ID NO: 646166 - DNA, 342 bp, Homo sapiens
aagtcttctgatctcttccttctccttcctcaggctgaaggagtctctccctgcactgaactgcctggtggtggggaaagagtgaatgtgaacactcctgtgattactgcatgcaggtcttgcactggtttgtatctcaatgcccacttgcctcagagaccaatgccgtaccacggcttttccaaggtacaacattctctgtagcctgactgacattcaaacttatttagagccccaggacactttcatcagcctgtgcatattaggactcaaataccttcctctgaggtggaacgttcccctctgccccaaggctgttataaatgctaccctccaggaaac

SEQ ID NO: 646167 - DNA, 240 bp, Homo sapiens
  misc_feature (1)..(1): n is a, c, g, or t
ngggttcctctcccttctcccttctccttcttcttccttcgtcaccgtcttctccttcttcttactttcttcttccttctccttccttcgtcttcttctccttctcctcctccttccttctccttcgttcttcttctccttcttttctttttcttccttcttcttcttcctcctctccttcttcgtcttttctttcttcttctccttctttcttcttccctctcctcctccttcttcttc

SEQ ID NO: 646168 - DNA, 1198 bp, Homo sapiens
gtggagagggggcgtgttgagctggaggtctccatgcctcgttggggagcacggagctcacgtacccacagcagcagttgcgtgatgacgacgatgggcgagctctggacgaccaggtggacgtggggagctgcagctgctggtgtcctctacgactggatgtcgatgcggacccagatgatcgcgacatggtgccaaaagcaggagaacggtagccacgtcctggagcctgcacggctgtgcccacagctggcgtgcccatgatggcatccatccgacggtgctcagcaggctgccacgtgaaccacgtacgctgctcagtacattgtgcagctgaatcctactgacgtctgctgcatccatcccatgcaagaccagggtatcaacggcaaacaggctctagcggaacccccagccaggactatctgcaccatacaccacggagcaccgctctcagggctatcgcacaccctacagcaaccctccacacctgcatctgattcccatcacgcttacccgcagaaagagtcccgccgcagggccttgcgcacggaactcgacgtgtcgctattcaccacacgcggtttggccgtgtcgatgtgccaaatagcacggtccagaacccaaggggttcagctctccacagtggaacaagcacggttccacagtaccagaagacgcgcaacagcagggaacagcgctggctgtgcccagtgttagctcagtcggattgcacagaaacactcgcatgcacgatgattgggcgcccaagagatacaaggccatggacccaaggctggcgcaactggcaccacacgggagcggaacaggcgacgggacacacagccctgcgccagcaccaccgcaaacacaaagccagacacaccacaccccacaaagacccatccgcgaggaccatcagggaactccacatcgagcgacaccaaaacattaacccaacagaacacgccatccccatgtatcccacccaaaccgccccttgcaccgaccatgacacaccctaacgtccgctcattctacccactccaaccccctcgtacgaccctcacccaccacactgcccacaatcccacccacactcactaccaactcaccccctccacaatatctggccccacccccactccccccacatgaatcaaccactccaaactcaaatcacatccacaactactcc

SEQ ID NO: 646169 - DNA, 137 bp, Homo sapiens
gcacaggaggcggtttcagcgcttcggagagttgcaggtcacttttattaggaccagcttcagcttccagtgttgaaaacttgatttctccaacagattctaccccagctcttctctctgccattgtcagccctttc

SEQ ID NO: 646170 - DNA, 101 bp, Homo sapiens
actgaagaaggagagtgaggctgtgccagtggcagcataaggcccatatcgtacaggacagactatggagtaagacccgtgctgagactggagactgccat

SEQ ID NO: 646171 - DNA, 762 bp, Homo sapiens
  misc_feature (56)..(56): n is a, c, g, or t
  misc_feature (77)..(77): n is a, c, g, or t
  misc_feature (88)..(88): n is a, c, g, or t
  misc_feature (90)..(90): n is a, c, g, or t
  misc_feature (105)..(105): n is a, c, g, or t
  misc_feature (107)..(107): n is a, c, g, or t
  misc_feature (115)..(116): n is a, c, g, or t
  misc_feature (123)..(123): n is a, c, g, or t
  misc_feature (126)..(126): n is a, c, g, or t
  misc_feature (130)..(130): n is a, c, g, or t
  misc_feature (132)..(132): n is a, c, g, or t
  misc_feature (138)..(138): n is a, c, g, or t
  misc_feature (145)..(145): n is a, c, g, or t
  misc_feature (147)..(147): n is a, c, g, or t
  misc_feature (150)..(150): n is a, c, g, or t
  misc_feature (153)..(153): n is a, c, g, or t
  misc_feature (157)..(157): n is a, c, g, or t
  misc_feature (161)..(162): n is a, c, g, or t
  misc_feature (168)..(168): n is a, c, g, or t
  misc_feature (196)..(196): n is a, c, g, or t
  misc_feature (205)..(206): n is a, c, g, or t
  misc_feature (219)..(219): n is a, c, g, or t
  misc_feature (280)..(280): n is a, c, g, or t
  misc_feature (510)..(510): n is a, c, g, or t
  misc_feature (521)..(521): n is a, c, g, or t
  misc_feature (528)..(528): n is a, c, g, or t
  misc_feature (540)..(540): n is a, c, g, or t
  misc_feature (664)..(664): n is a, c, g, or t
  misc_feature (666)..(666): n is a, c, g, or t
  misc_feature (732)..(732): n is a, c, g, or t
acaagtttttgtttttatagttcctggtacacagctaagtttatcacgaaagatanaaatccttttaaacaaatccngcagggaattngngaggcaccggctcgngnggagacannggagggntgngatngngcaatncatctgngnganggnttcnatcnnaatggncatcattttttccatttaagtatatttnacagaactnnaataaggcaaganaaatttgtgaaaaaagatgtagatacaaaaatgatgtaaactaataatttatattaaaaanccccaaagggataacagtggagatgggacagctcaaacaatgcctttttttaacctaaaacagaattgtgcacaagctgaagatgacaaacaacttctagactctgcacagttttggtttttttttttaacatctttatattacatgttttaaatcatatcaggaatgcaaactagaactgcacactacttcagtggaaaaaagttcaataaagtgcaatttaaaaaaantaatagttaanagtggcngcaatccctgcntttgtgtttgaaacaaggatctgagaaactttatcaaaaaggtaatgaaggcaaaaattggcagacatccagcatcttgtttctttttaaaacaatgtggatgataagtaatttcatgattaanantgaatcttttaaataaatacattgtatctgacatttgcactgactgatttgataaatctttaagtnaacaacggctttactacactccctgtagcc

SEQ ID NO: 646172 - DNA, 549 bp, Homo sapiens
  misc_feature (429)..(429): n is a, c, g, or t
ggatacacaggccagcaatcataggaactcttgcacgaccgcactccaactctgcgaggacggtgcggagcatgactaggagagctgctgagcgttgcaataccagcgaatccgttcacacagtgcatgcatacgtagacacgctgtgcagcctggaccaaacacagggacggcatgtgcctgctcatgactttttggacagaacgtgttgtctagacgacatggaagccttactcagtcgactggggctggacatagagaatggtctaaactgatgtggtcatgttcacaagcatactcagttaacataggaagcaactagaagcattgtggaatcaagccactgagctaactggaagaccttacagaacgatctgggagcgatgatctgaagagtagctaacagacacatgtagggctcacataatnttgtgtgaagcgagcctagttcagagccaattggtcataaccaaacgaggactggttgtactgtatcgctgcgctaaggaacagttagtagtgcggtcatctcacatagacttgtttgtg

SEQ ID NO: 646173 - DNA, 1045 bp, Homo sapiens
gtgctgccagccctgcgccccgcattgcttgctgcctggggccaggcctgtggagctgggcttcgccgagtcggcgcctggctgtgggactgcgcagcgagcagttccccagcaaggtgggctgggcggccgggcattgctggtgctgcggccgggctgccggtggccccaggccctgtgcctgcgagctgtgcgtgcgccctgatctccttcctgctgcaggtgtatgcgccgctgcctggccgcccggacgccttccaccggtgcatcttcctcttctgctgccgcgagcatccgtgctgtgccggcctgcggagtatacaggaatcaactacccaggaaaaacgatttacactcatatgagccaccttctgagaatcctcccccagaaacaggagaatcagtgtgtctccagcttaagtctggtgctcatctctgcagggtatgaggctgttataggccccaaaacgtgctccagattgccacaaaagcatattactgcacgcacggcagcatcagaccctagacttggagattgggacataagcaggcttgtgcacaaccaggatcatcgtggaaccatattcaattccacgagcacaatcttcctttaaccagaattttgcaacattgtaaatagcacaccagaagcatgagattcatgcgtgaggttgtggcaacagtgaaagaatacgactccaagcagcactaaataggcgaacgaccaagcagtcaaacaatacaagatcaagaacacaaaacaacacaagatgaccaagacacacacaagagaggaaagtctaatattagagagaaagcctaacaaggataaacctcacaacataaggggaacgacttcaacacagctaacactactacaaaacggcacaagaaaaaacagaaataaacaaccaaccaaagaagaccagatggagacagaaaagataagacaatagcacagacacaacattgagcatgacaaaggacggacgacaggaactaaatacacaatgacctacacacgaccaaaaacaagaaacacaac

SEQ ID NO: 646174 - DNA, 277 bp, Homo sapiens
tggagttgacctggtcttcctggcttgctctaggtctacttcaaggggaaaaagtcttgactagacataaaacctttgcgctgcgatagagcgttaaagtatacaatgaaatgctatacaagttgaatgctggccgagcgcagtggctcacgcctgctatcccagcactttgggaagctggggcaggtggatcacctgaggtcaggagtttgagaccagtcctggcctacgtggcgaaaccccatcgctacaccaactagacctgcagcaagccagg

SEQ ID NO: 646175 - DNA, 615 bp, Homo sapiens
  misc_feature (239)..(239): n is a, c, g, or t
  misc_feature (258)..(258): n is a, c, g, or t
gtcaattgtttggatcagagaaatttcctgacaaggtatatttgttttctagtgacagaaaggcaaaggaacaagtcctagttgtgtgttgtgttgaatactaaatttaagatatgtcagctgctttcaatgagcctgggcttctgttatgcttgagcattggaactcgagcttccagagaaattgaggtcctcgcttgtctctgccttcaagaaacaatgacctgattctgtctttanaaaaaaaaatctcagaatncttttttggttggttttttttttttttttggagacgagagttctcattctggtttgcccaggttggtggagttgcaggggcgccatctcggctcacttggaacctccgcctcccaggttcaggcaattctccgtgcctcagcctccccgagggtagctgccacttacggggtgcgtgccaccaccacgccgggcataatttggggtattttacagtaggcagcacggggtttcaccatattagccagggtgggtcttggaactccgtaacctgtgatccacccggcctcggccctcccaaagttgcgtgggaattgcagggttgagccacaccttgccgggcacaaaattctcagat

SEQ ID NO: 646176 - DNA, 295 bp, Homo sapiens
  misc_feature (12)..(12): n is a, c, g, or t
cttagctacctnacatgtgcttagtacacttacattactttatagtggagcaaatcatctaacacaaagccagttttataataaagtgctgaatatctcatgtcatttagtgaatactatattgaagtgaaaaacagcatggctgtgacaggtactcaaagtatggtttcaacttaatgtgtatcacttttgtgccatcataaagtagaaaaatcataagctgaaccattgtaatcggggaccatctgtattaactttgaaaactgatgtaaatgcaaaattatcttctgtatat

SEQ ID NO: 646177 - DNA, 361 bp, Homo sapiens
caaatccatcagacgtagaaatgataaatgaatattaaaaatcaatatggtggccaggcacagtggctcacacctattatcccagtactttgagaggccagagtaggaggatcactgtgaggccgaggagtgtgagaccagcctgggcaacataacaagacgttgccatctcgtacataaattaaaaaatgtgaagggatgtgctaaaacttactttctgtctcccaggatgatcagtcttgtgtctccgctagggtgtcgtgtcgctcccgcatctctgtggatgaccagcgtgcctaaggcgggaattccctagatcccagttatatacaccgccacccaccctgttggacttacttcc

SEQ ID NO: 646178 - DNA, 179 bp, Homo sapiens
tccatttctaaactgtgtgctgctttgtgatgacggagatcataaaaaacctatcagagacaagagctgtttgcatatgttcccatgcaatagttgtttcccagtttaaagcagctttctatatgagagatgcaaattattaagttgttccaatacaataaaaaaagcatctgtttttc

SEQ ID NO: 646179 - DNA, 150 bp, Homo sapiens
gatacacacatacatacagatacacagatagacatatagacttagatagagatacccagacatagacatatagcatagactagagatagagttagagagccaagacagaggcacacttaccccaagaaaagagaaatagacttagcaaaa

SEQ ID NO: 646180 - DNA, 150 bp, Homo sapiens
tgatacgaatcgagctcgtgtacccctagttttagaagtttcaatagcagatttctaagatagagacctattatcgtatgaagtaggagaggagtaggttcaaatttgtggtcatgtgaagagtagagacgcgggttttgcaggttcctg

SEQ ID NO: 646181 - DNA, 393 bp, Homo sapiens
  misc_feature (244)..(244): n is a, c, g, or t
  misc_feature (303)..(303): n is a, c, g, or t
tatgggatgtttataatgaattttttttggaggcgggtacacctacaagtttccctttttactttgccttacgaagaatactgtctgatagaatgaaaaatgatttttacatttcagaaaacccataacagactttgcctttgccctgaggcaagggtttatgtaccccctaggaattactgttctgtccaacatagtagccattagtcatatgtggctatttaaattatgaaaacatattgtntatgttttaaattataaattgtagtcatgtgctgcatatgccaggggtctcaaaagatngtaaattgcttttattttttatttttatttttcgagatggagtcttgctccttcgctaggctggagtgcagtggcacgttggactctggg

SEQ ID NO: 646182 - DNA, 121 bp, Homo sapiens
ctaacgatgtaaattagaattgcgggcatttacagccaactcaatgatgaacagatatttccttgatgcctggtacccgaagctctgacattccgtaatcactgggtcctacgctgatttc

SEQ ID NO: 646183 - DNA, 122 bp, Homo sapiens
aacaaaaaaaaaacaaacaacaacacactacctggccgatgattatgtgtgtgtgtgtgtgtgtctgtgtgtgttgtgtctctctctctatgttgcccaggtgtgtgctgtgtgtgcatgtg

SEQ ID NO: 646184 - DNA, 111 bp, Homo sapiens
gtaacggtgtcggcgcacacgaggtcttgagtcagacaagtcagctcagcacttactagccatcgggaacttggacaaaatagctgatccctccaagtcgtaatctcatcc

SEQ ID NO: 646185 - DNA, 109 bp, Homo sapiens
taatggtaaagcttaacacaccccagcaccaagaatggtgtggagttgcagtaaaaacaggccggtgaccccccatggagcctcacataaaaaagaggatgaggaaggc

SEQ ID NO: 646186 - DNA, 815 bp, Homo sapiens
ggagtggttttctgaaaagatcaacaaaatagatagaccactagcaagactaataaagaagaaatagagaagaataaaatagacgcaataaaaaatgataaaggggatatcaccactgatcccacagaaatacaaactaccatcagagaataactgatgaatagacccgaatagacctgaataaacacctgaatagaccaataacaggttctgaaattgaggaaataattaatagcctaccaaccaaaaaaagtccaggaccagacggattcacagccaaattctaccagaggtacaaagaggagcaggtaccattccttctgaaactattccaatcaatagaaaaagagggaatcctccctaactcattttctgagtccagcatcatcctgataccaaagcctggcagagacacaatgaaaaagagaattttagaccaatatccctgatgaacatcaatgcaaaaatcctcaataaaatactggcaagatgaatccagcaggacatcaaaaagcttatccaccacaatcaagttgtcttcatccctgggatgtaaggtggttcaacataggcaaatcaataaatgtaagccatcacataaacagaaccaacacaaaaaccacatgattatctcaatagatgcagaaaacggtcttcaccaaaaattcaacagccttcatggtgaaaatctcaataaataggtattgacggaaggatctaaaattataaaagtattattgacagaaccaaggcatatctatgaatgggcaaaacggaagattcctttgaaacgaagagaaaggatggcttttaac

SEQ ID NO: 646187 - DNA, 291 bp, Homo sapiens
  misc_feature (199)..(199): n is a, c, g, or t
gctctgcgggtttgtagggctgtgttgacatcaaggatctaccagtgtctgagcagcaggagagagcttcacgctggggctagcaggacttcttggcgagggagtatttaactcttggagaactcctcatgcaccctgtgcttggagtccctgagggaatacttgaccggcagtggctgatttgacacccgtctatgcncttcaacaagtggcaacgtagaagcggttccatgactctgcaagactgcctggggccaagcagccctgatttcagcaagctaagtgaaggct

SEQ ID NO: 646188 - DNA, 189 bp, Homo sapiens
  misc_feature (76)..(76): n is a, c, g, or t
gacttagaggatcccggctcttctggaccttaactgggtactgtgcctgggcaatgcgtctcgctggagctttgcntccttctactgggcttccacaagccccaggacatcctaacttccccttaatcttgcttcatcgcacactccgttaccacacgtggtccttggcatttggagccctctgtctga

SEQ ID NO: 646189 - DNA, 628 bp, Homo sapiens
  misc_feature (307)..(307): n is a, c, g, or t
  misc_feature (389)..(389): n is a, c, g, or t
gctatgtgcttggctctggacgctcccgctgtctgctttctgcccagagagaagattctctaccagtatcacctttccctttgtccgttgagtttgtgctcgacatgccccaacacctatctctctttcccttcttgggtgtctttgactgggagggggcatgtgttgggtgagcccctcccgggttctcacactcgcctggtactttaactcacaccctggtttcgtcgtagccgcccatgtctcgtcgttctcgtgctatagtgtgctcgtgtatagatcatgtgcgtacagtccctctcccaanttggcttgaccagaatggccttatcggtgctgttcgtgcacgtcctatagttgtgatacttgtggaagagcggtgcacgtcnttggtgtccttctgaacatctcctcactattctgtgggtctacagtcttggtgcatagcagagcaacagtatgcggtgcagaggatagccctaggaagcgactactatgtaatccaagcatagcacgaggcaacggggtgtcaacgtgatttcgatattcaccaaccttgataggtgatgcttggaccaccaatccactattcgcattcgtaacccataatgtgaactctactttattc

SEQ ID NO: 646190 - DNA, 303 bp, Homo sapiens
cttaaaagcccccccctttttttttaaggggaagggcccagtcttttcccaagtccacacagggggggggaaagcattgtttttgtgtaaattatgaaaggccaaatttttttaattttggcccaaaaactttttttttttggtttttttttgaaagaggggccttggggcccccccttcccccttttttgtcccccaatttgaaaggtatgaagggttttggtttccctgggggggggggggggcagccggggtttccttgtaccttgatttgagaccagttgaataaaagggcccccctta

SEQ ID NO: 646191 - DNA, 864 bp, Homo sapiens
  misc_feature (691)..(691): n is a, c, g, or t
gacgcgagttcccctaatgatagaagagcttattcacctttcatgatcacgccctcataatcattgtcgcttatctgcttcctagtcctgtgtgccctttgcctaacactcacaacaaaactaactaatactaagcatcttcagacgctcaggaaatagaaaccgtctgaagctatcctgcccgccatcatcctagtcctcatcgccctcccatccctacgcatcctttacataacagagcgaggtcaacgatccgtcccttaccatcaaatcaatggtcagcattggtgactgaacctacgagttacaccgactgacggcggactaatcttcaacgtcctacatacttcccccgattattgctagaaccaggcgactgtgactcgttgaacgttgacaatcgagtagtactcgcgatctgaagcccccattcgtgatagataattacatgcacaagacgtcttgcactcatgagctgtgccccacattaggcttaagaacagagtgcaatgcccggacgtctaaaccaaacacttacaccggtgcacgagcgggggtatactaggtcagagctctgaactcgtgtggagcaatcaggagtgttcattgcccagtcgtccttatgaatgtatttgcccctacatggaagttctgttgaaagtagcgggcccgtatttagcccttatgaggnatcgccctcgtaccctcgtgctaagaagcaaaatgtgaccaagtaactaatctaattaaaagaaaaacggggcgtgcatggggggcggaggaagacacgggaacacacaggggcaggggagaactcggtggccaggccccttattgtgaaggggggaagtgtgcggtcgcata

SEQ ID NO: 646192 - DNA, 304 bp, Homo sapiens
ggtcctcagaggttggggagagccccgaagttgagaacaagtaagtgaacagttatagtatgaacgattgttagagacagctaatcacaaacaacctgcgggcacaatgacctcattccacacgtagcacccttcagcaggaccctataaaactttcctccagcccttgcctctttgcaggtagccccttctctgctgagctgcccactgcaacatattttcacaatttctctaataaatctgcccttctttacctacaactatcttggtaaatggctttaccacctgcaaaactgaccctagg

SEQ ID NO: 646193 - DNA, 349 bp, Homo sapiens
ataaagcagtgtcggctgctcacactggagtgaaaaattaatgatgtatccggagaatatccgcacagcacaaacaggacagtcgcaccatgaaagtcacaagagtagtacatacttgccgtggattctgcctctgggcatataattcacaggacatcttcaacacttcttccttttgagtcagtcttttctgatttttctaccaacatcttttaactaacaagttttgtaaatcagtgcttatccaaagtataagtcatttgtagcgacaatttggcaagggcatctcaccaaccatcttggccattgcacatagtgacctgactaatggtacacgttgtaagcaaaa

SEQ ID NO: 646194 - DNA, 196 bp, Homo sapiens
accggatggccgaggcataaatgcagcatgggtcgatctcaaatatagcacaacaggctcatgcacatagtatcctttcggagacactccaaaacatgaacgcaacgtctatattgtactagatttgtttatataacagacagtaattgcattggacacccgactccgagtgaggttgtcaccacaaaaggagagg

SEQ ID NO: 646195 - DNA, 224 bp, Homo sapiens
atgaagttcaacgttgatgcattcaagagattcaataaatatatcaacaccgattgcaaagttccagggtatttcctgaagcagattcaacagcttccttgggtggacttccaacattgcttggtgcgcttgttgttcacttctgttccctggaccgatttgaaaaccaggtggatattgaaagttgccgaggtacttttttgattgccgcctgctcgcctaca

SEQ ID NO: 646196 - DNA, 345 bp, Homo sapiens
ccccccccccccggattttatttccgggtttcccccagagggccccggggtttattttaagttttcccccccctgcgccttttcctttttttcccccaggcccttttttaaagtgggatggtaaaggatgggaccggccgtttttttaccaaaaattgttcccccccccccccgggggtttaaattgggaaaaccgggtctggtttggtttccccctaaacccccgcccggctttttgttaaaggcccctaattttttgtttgggtttaggttgttttcccccaacctgggttttttttttttttttttaatttggggtttaaaattaaaccccccccgggttta

SEQ ID NO: 646197 - DNA, 110 bp, Homo sapiens
tcgaatacgacggtttctcaacagaagtggacatggcaaccgggattcaatccaagctcagcctttgaactattcgaactgaatcttacccaagctctactggtaagtaa

SEQ ID NO: 646198 - DNA, 775 bp, Homo sapiens
  misc_feature (713)..(713): n is a, c, g, or t
acggttcccgcctaaaaccgaaggcctgtgctagtgggccccaaaccgaaggcccggtccaaacaccccaagggttgctggaaacgctgccatgcgacttgctatcgaggagacagcactggtggagtggtcgcccccccctgcaggcactgagggagacctgggcaccacacctgaaaagtggaaagaaaccgttccccacagagggcacaccacacataggaaagacgccgggagaatgatgtgggggtcacacattccccacacacagcactaaatgctgtgagagtatcctgctgcgtttttataccccacttcacatcacatttgttaccaccactattttgttaaatgggaaaattccacatgtttgtccctctattatgtgcatgtgctgagatgtgcaaaccaccagcctgtatcaaatactgtttctggctttaaacaacgattatttgggctcgcgttcccccggtgcttaattaaccataaattctacacccacctcttggggaccccctctacgctcccacgaaatattcttcctgaggcccccccacatgttacgaccccaccctaggccaccccgcaagaactgtttttgccccgaaatgccaccaaaacaccctcaattcatgtttatacaataattatgcgatccgtactataatagacctctattacaaatattctgtacgaatagacttctcccnagaggatatttaactacccactaggtattctctattcgggggtgctgagacccatgcccccc

SEQ ID NO: 646199 - DNA, 170 bp, Homo sapiens
  misc_feature (43)..(43): n is a, c, g, or t
gcgtcagctcgccgggcaccgcggcctcgccctcgccctccgnccctgcgcctggaccgcgtagaccgaccccgtgtgtgtgacgtcgtctacagccttgctctcttgcgctcaacaaagaaaacgtgattttgtgcacgttataattggagaatacacaaacagaagcc

SEQ ID NO: 646200 - DNA, 411 bp, Homo sapiens
acccacacatgttgtgccatcaccccatccttgtccctggagaaagggctattggccatcgtgacggggagcctctcagctgcgactgggccctgggagccatggagtcttctggccgcctctcctggacaccaaccaggaacccgcagccccaggcccacggttgcatctgctgtgccatcctgtggacaaatggacgatccaatccagacggcactgcaggggactgaacggggctctgaaacccggccggagctgccatcaggccaccatcatcaccttgagccattcacatgatccgtcaactgtgtcaagactgggtgccaccaggaaacatcattacagctctactgcaagcagacacacgtgttcaagggcataagacgaaatccaccatggaagaacactatc

SEQ ID NO: 646201 - DNA, 912 bp, Homo sapiens
caaaattaggctgagacaggagaattgcttgaacccaggaagcagaggttgcaatgagctgagattgcatcactgctactccagcatgggcaacaaagcaagactccgtcacagaaaaaaaaaaaaaaaaagagagagagcttagaggagggttggccagcccttgtggtgggtgggatgctcagagacactttcccagataagggtaagagtttaaccctgcacctcaggttgtgatagtgggagtcagtggtatgtgatccaggctggggagccagatggggatgcaggtgccaagttccacatccttctcctgtttctagggccctctcctcccttgatcggttttagggcggggaagctcagccttcgatgtgagagggacgagagcacagagctcttcctcctggtggcctcttgaccccttgacggccttgtggattcctcccttagtccccttttgcccatccatccctcttgttccaagttctccacttgctcccagcatgatctggggcatctgggcttcgggttcctttaatgatgtattattattatcaagttatggtattcctggtccttcacttttataccgtccttagttcctgaaagtaaacaaagacagaacaaaaacgaaaaaacaaagaacacttgggttcctgatggcttgctgaacccagccctgacctagtggttcacaagctgacggctgagatgaggttagaatgactgggcccggttgaactttccaaatgggattcaccatcgtgctgagcaaaggttcagcgaaaggcaaagtggccagggtcacgaaaggctcccaggcccaggtttcacagggcctcagctggtcctggtttcgagcccaagacgtggagatcggggagaactgaggcgaaaacagggccccga

SEQ ID NO: 646202 - DNA, 337 bp, Homo sapiens
tcttacgctgaattacaaacaatattaaagtaggccaattaacaaccctacagtggcctctacatattcaaatgaatgatagtcacacatctcacacttaaaatcaaaagttagaaatgagctcagtgaagaaggcatatcaagagccaagatacgacaaaaactaagcctcttgtgccaaacagccaagttgtagatgcaaaggaaaagttctggaaggagattaaaagtgctaacccagcaaacacatgaataataagaaagctaaacagtcttattgctgatatggagaaatcttaatggtgtcaaaagaagaccaaactagtcacaacatttc

SEQ ID NO: 646203 - DNA, 1043 bp, Homo sapiens
cgggtagggacaggacatgagagacgcctctaggggcagaggccctgggaggcaaagaccccgcagtgagagatttacccaccccagactggaaatggcgcggctcagagtcggacgaggggagactgtcagaggacaactgcgacccgtagtgtctcctgtggagacccctgaagctgacccctgtgtggtgcagccctggtgcctgtgtccagggctgatgtgtgtgaccatatcacttggtttgagcatgcgactggtgtgacatcaatgcccttgcacggcgcttccgtcgttgtctccatcttccgtcgcactggcttgcttgcatgccctgctgttgggtgccctctgggcttgggatgccctgcacatggtccatggcctgtcgctgacaatggctttccaatggttgaactggtgtgcctgacctacctctggcgggccatcccatgaaagcccatgcagccatggtgcaccatggtagcctggtgtagctggtggcactgcacccaggttggccccttctttacatcgggcgaccccaacgagcctgccatgctatctctatgcatgctttaccaatgcagatgccgccccaagctggaaccctccgcaaacctgggccccggccatggggagcgccattgacgtgtgggactgcctaccgaatacccgttctccctaggccccggttaaaactcccgcaaccggaatcgcgggactgcaacctctgattgacccaatgcacccgccttgggtactggccgatcacctgtcttgggtgccctttgggtaagcaacccacggtaaagtggctcaggtggggccaacatccctataccactggggtaccgtgccccattacacacatggctacgtaaccacattaaacccgcgcgttacgctttggctatccacccaaaattgtgcctctacggggcacctacacccctgtgtgcgacaatttgccactatacgagatggaagagccctaccacagtagtgtcggccacactcccttccgcaaaggtaccgcttcc

SEQ ID NO: 646204 - DNA, 582 bp, Homo sapiens
  misc_feature (35)..(35): n is a, c, g, or t
  misc_feature (37)..(38): n is a, c, g, or t
  misc_feature (125)..(125): n is a, c, g, or t
  misc_feature (175)..(175): n is a, c, g, or t
  misc_feature (201)..(201): n is a, c, g, or t
  misc_feature (292)..(292): n is a, c, g, or t
  misc_feature (329)..(329): n is a, c, g, or t
  misc_feature (446)..(446): n is a, c, g, or t
ccaaattctcgcagaaaagcctcggagtgaacggngnnctcctccggattcgtctcttctcctgctagatttcgcacagacgaggccggagaaatcccattttcctcgttaaaggcaatttgaanctgcctgcgcctattggtttcatcgatcgcctgtttcatcgccggagtcnccgcgtcggcgtacaagatcgccttnccgttttcattccgagcgactcgacctatcatctgaatgagagcatgggccgaacgcaagaatcctgcacggtctgcatcgagaatagcanccaatgatgcctctggaatatccagcccttcgcgcanaagactaatcccaatcaaaacatcgaactctcctgcgcgcaggccattgatgatctcaacacgatcctccgcttttatgtccgaatgcatgtagcgcgctcgaatcccgttgtccgncaagaaatccagtagctcttctgcactgacctttcgcagcgtagtcacgagcacgcgatttttcttcttcacgcactttgatatttcggcaagcagggcatctatgtatccggccgctttccgctcctttagccct

SEQ ID NO: 646205 - DNA, 746 bp, Homo sapiens
aaaattaaaaagagaaaagaggaaaaaaaaaaaaaaaaaaaaaaaaaaaaaaaaaaaaaaaaaaaaaaaaaaaaaaaaaaaaaaaaaaaaaaaaaaaaaaaaaaaaaaaaaaaaataaaaaaaaaaaaaaaaaaacctttggggccccttggccccattcctttttttttttggggggggtttttctggggccccctttttgggcccttttgccccttttcccctttggggggggtttttaccttttcggggccgggtttttaccccggggggggggggaaaccccggggggtcccccctttttgcggtttgggacacttcccctttttgccggggggggttttggggagggggccccccccgttccccttttccaccggttggccccccctgtttggggtagggtttttgggggccttttttttttcgaaaaatccggtgttatttttttgtaaccccgcccttttttaccccaatgggcccgaatgggaaaatccctttttatctcaaaagtttgccccgcgctggggtggggggttgtccccttttggcacaaagtcccttttttaagggggggggtcctcccccgcaaagggggcaaaccccgttttttgggggggggcccccctcttgggcccctcccccttaagagtttttttgcgggggggggccccctaagcctttactgcgcacctctttggggcgccccgtttttgctttgtcggacaaccgcccacccgcgggtc

SEQ ID NO: 646206 - DNA, 230 bp, Homo sapiens
cttccggcgcttgttggccgcgctctcccctaggactgggtcgctatgtgcgcagctgccgcgtctgcgcttcgcgtcagtcgcgaggcgcctcgtctcgcggcgcccgggcgttcgtggcgcgggcgtgtgatcgacttcgcccgacggaatccagtggtcgtcatctatgtccactcgcgtccgtgctgcgtgccccgcgtagttggccgaataccttaactggggct

SEQ ID NO: 646207 - DNA, 1056 bp, Homo sapiens
aagatactatcgttcgactcacccctaaaatttttatgattctgtactagatgagcaagattcagaaattattggtgaggacacatctctttaataactgcatatagagaagttgggccggtataaatagttgaagaatcttgcgtatgctttgccccagtaagtaagcagcagagagcatgaattattagttccacgtgcacgtcaaagcagtgccaggtagaacatattaagaatgtccatttaagaaatggttctagctggtaactaataacatcctcatcaagaacttttgctgtgagcctgtaaagaaacagagtttttctcatacaacaagtttaattctctcccatgtggctttatctgactccatattttccatcctaccagcacccccaaccctctcgcacacagaggttaacaggagtacctaattacagaaagagatcccccaggcgattatagaaagagtggttgcgttctttacctcgacagcaatactgagaactaccatcattacaagtggcagaccagcacttataatgatacactcagcaaacatgttggtaatgttaacaacggtatatcagcgccggtgaaaatcatcttatgtcacgtcacgctacatcttcggtagctactactcatacattataatatactacctaatactcaggcccactcgttacacaccaatcatcttgatgcaccgcacatactgcgtactaccatgatataaaatactagtacgagacaaaacaagagacaacacaaacacaagaagacacaagcccgcgcagcacaacgagcgacaggaaccacaagactaccacgacaaaggaaccagacgagaaacaagcgcccgaaacgccaagtcacgaggagcacgcaagacgcgagagggcagaggcggcgagcgacgcagaccaggacggcgagccaagaacaccgagaacggccaaccaacacagacgcaacaagcagagaagacgagacgcggaggcacgaaagacaccacagcgcacggcgcgccaccgaccggagcaggacagaaac

SEQ ID NO: 646208 - DNA, 209 bp, Homo sapiens
tgagtccacagccggacgtccattataccagtcccacatcttcctaccccttccccatcactagtcctacagagagacgctagtaagacagctaccttgagagtgattctctcaggctatagttgtagttctactgctgtcaagtctgagctgactctctcttccggattctgctttcctcacctgcgaccgacctggattcgcgaccg

SEQ ID NO: 646209 - DNA, 115 bp, Homo sapiens
cccccactgcagcctggtccactgaagcctccattcagactgctattacataataccttagactggtagcttataagagaaagtgttgtttctcattcaggctctcagcgcctga

SEQ ID NO: 646210 - DNA, 430 bp, Homo sapiens
ctagagagatcccgcgcctccttggttgccttgggaaatgcgtttcccactatcacccatctcagccccgagggaactggggtatgtggcggtggaaacagcgctgtgctagtgggtcatggcagacaggttctctcctgtttctgcctaggactggtcgcagtaataagtcacttctccattctcagcctcagtgtttctttttcagatgaggggaacccgggtgtccctgccgcctctgtcttgcctatcagcttctgtgtatctcactgcaggagttaatgagtgagtgaatgagccagtatgagtacttggcaaaggctgatctggggcagggagagagaagaggaaagacgactagctcatgactgatcatccacttggggcaggcgcacccttgccatcacctacgttcaaccaagtgggagga

SEQ ID NO: 646211 - DNA, 534 bp, Homo sapiens
  misc_feature (40)..(40): n is a, c, g, or t
  misc_feature (62)..(62): n is a, c, g, or t
  misc_feature (115)..(115): n is a, c, g, or t
  misc_feature (206)..(206): n is a, c, g, or t
  misc_feature (219)..(219): n is a, c, g, or t
  misc_feature (259)..(259): n is a, c, g, or t
  misc_feature (262)..(262): n is a, c, g, or t
  misc_feature (307)..(307): n is a, c, g, or t
  misc_feature (363)..(363): n is a, c, g, or t
  misc_feature (373)..(373): n is a, c, g, or t
  misc_feature (391)..(391): n is a, c, g, or t
  misc_feature (413)..(413): n is a, c, g, or t
  misc_feature (456)..(456): n is a, c, g, or t
  misc_feature (469)..(469): n is a, c, g, or t
  misc_feature (485)..(485): n is a, c, g, or t
  misc_feature (527)..(527): n is a, c, g, or t
ggaggatgaaagttcgtgtacaaagaagagcattcgttcnagaaagcgccgctctgagggcnaagaaagatctaaagaaatcccggacccgggtgccggtgatagtagaaaaagnttccaaagcttggataggagacctggacaaaaagaaatacctggtgccttctgacttacaggtgggcaggtctacttctttgatccggagntaaatcatttccnagctgaggatgcttggtttcttggcacaatgtcattcacnacnagtgcacaatgggtaacttgaccaggacaccatgaagaagacttnttctctacattgctacagtgactgtgtctacggctgtgaagttgtgcctgactganggggtctatntcgagaggtggccccttntgactctctcttagctaacacnacttcttattaggaccggacttttaagttgggttttcagcttntaagagggaatgnggagtggatttgactntcttctcttcttcccttcttggccgctttccctgtgagactnttgatgc

SEQ ID NO: 646212 - DNA, 378 bp, Homo sapiens
gtgaagcgcacagaagcacagtgaaccgcaatatccacagagagtgttgaaggagaaagaagcatatgtggctttatatcctctgtgcctcggtttcctgaagtcaccacacatataggagagaggatccttgctgtccaagttccctggcacaaggacagaataattctcaagtctggccctacacatctctatgctgagcagctctcaagaacggctttcacttgtgcacggagcaccaataagagaagctggctgtataggattctaccttcaggttctcacaagccctttgaatccattgaccaaggccatgtgacttacaactgggatgaagttgatcctgatcctaaccagcttagatggccatttgagtcc

SEQ ID NO: 646213 - DNA, 725 bp, Homo sapiens
agcggaaaatgagtttcttcacatgctgagagcagtgctcctcagacagtaacatgcacacgaaatatgtgaggatcctgttaaagcacagattctgattcagcaggtctggggtggggtctgaaaaactatgtttcttacaagcttctgggttattccagtggtgctgatccaaggaccatactttgtgtagcaaggacttagaagcctgcctcacttagtgaatgttacatgtggtagctataattatatgtgtttagtaattgatgagcaaaattgagctgaagtttttacagtctgataacagtatattcagggttttcatatctctcattttctttaatcctcataattcaacaccgtagggattcatgtccccatttacaagtaagagatttgaggctcagggggtaactcagagtgaccaactgtccaagtttgcttgggattttcctgggtctagcactggaagtcttgcatcccaagaatcccctcaggcccagacaaactaaaaggggttggtcaccctagaactaataagtactctactggaattcaaagccagatctctgaattccaaagatgtattcttatcctggagactagcactgcctcgaggctaaacagaggagggatatatgctcatacactgtaagagatcgtctccaaaggtgccaccatcagaccccaatgaataatgcctctcagaacttatgtattaatat

SEQ ID NO: 646214 - DNA, 178 bp, Homo sapiens
tacgttgtctctcagtctctgccagcttatatatacatatgatactctgtgtgatagaaccaagagagcgcctgcccctgccttctactagaaccgcagcgtgtatacaccatatggacagggtgtgacagtgtgcacacagaagatcttctacttggaggctgtcttctttatttca

SEQ ID NO: 646215 - DNA, 270 bp, Homo sapiens
aaaaggccccaagtggggtttttttttggtcagagagatgaaaaagttaatccccaggccaaatttgttgtttgtttgaagaggggacccgttttacccagccaataaaatgcctttttttttttcccccgttcccattatagatcctaatcttgcaaatccctgtcccccaatgcccccccttttgggaatgatggtaaaattgtatgcctgaaaaaatcctaaatattttagctatattgtttttttaataaattggggccttcccga

SEQ ID NO: 646216 - DNA, 374 bp, Homo sapiens
cgacgtttggtagcttcacaaaaaatgctaatatcctggtagcttcccaatagaattagtcatttaataagatctctatagttgcttcactaatattgtgattaggcccagagtgcctgagggatctgctgtgatgcaattcatcctctgttatttctgagtgttccattacaccatgtcagagagaggagacagataaacacaggtttctaacagcccccctgccagaaagtccaatatgagactcaccagacagatactctatgagaatcatgttggaataaaagtttgatatcttttaggattccattcatgtgttagtttgaaagtttctcaagagatcagggcatcaatatctatcttggtgtcgacgc

SEQ ID NO: 646217 - DNA, 86 bp, Homo sapiens
aaaaaatcatctcaccttgagcccacccccaccccattgtctatctggtagaagctaataaataatcatccctccttgcctagcat

SEQ ID NO: 646218 - DNA, 826 bp, Homo sapiens
gatcgacggatagttatattatagatacagatatacatatacatatacatatatatcaatatagagatataggcttatgcatgtatatatagagagatttatatatatatacatatatatatatcaatatctgcctatatcattagtaacagataaatcacagtctgcatttaggtaaattatgtacttatttgcctatttaacattctatttcttgccataaaattgcaagttccacaaggacagaaaattggcctggcttgttattgttctattgtcaatgcctaaaacagtgtccggaacacagtaggtattcaatacatttttttaaattaatgagtgaacgaattgttgatgcacaataagtacatagcttctctctgagtttcatgcagacacagaattttttcttctgttctccagctgtgacttattggatgagaattgcataatcacactaattgacttcataacaaatttatgatttcccatctcagccagactctaagtgtttctcgataatcctttaacatgggtctactcaattcgctttcatttatccaaggaagctacttctaacatcaccttttcccttgacttcttcagtcctccagttcacttgcccttctacccatctacagagaaaagtaaaagtctaagagatcactcagccttttttctcctcctgtctcctttagaccttgtcccaactgtctcccatctcctactttcagtttctcatcttccactcactctataggataataccctccgataatctctgatagaattcctcaaagacattaacacttactggcttgtcgac

SEQ ID NO: 646219 - DNA, 715 bp, Homo sapiens
  misc_feature (38)..(38): n is a, c, g, or t
  misc_feature (41)..(41): n is a, c, g, or t
  misc_feature (65)..(65): n is a, c, g, or t
  misc_feature (67)..(67): n is a, c, g, or t
  misc_feature (71)..(71): n is a, c, g, or t
  misc_feature (95)..(95): n is a, c, g, or t
  misc_feature (125)..(125): n is a, c, g, or t
  misc_feature (129)..(129): n is a, c, g, or t
  misc_feature (158)..(158): n is a, c, g, or t
  misc_feature (162)..(162): n is a, c, g, or t
  misc_feature (179)..(179): n is a, c, g, or t
  misc_feature (183)..(183): n is a, c, g, or t
  misc_feature (189)..(189): n is a, c, g, or t
  misc_feature (193)..(193): n is a, c, g, or t
  misc_feature (222)..(222): n is a, c, g, or t
  misc_feature (224)..(224): n is a, c, g, or t
  misc_feature (229)..(229): n is a, c, g, or t
  misc_feature (268)..(268): n is a, c, g, or t
  misc_feature (276)..(276): n is a, c, g, or t
  misc_feature (290)..(290): n is a, c, g, or t
  misc_feature (342)..(342): n is a, c, g, or t
  misc_feature (355)..(355): n is a, c, g, or t
  misc_feature (357)..(357): n is a, c, g, or t
  misc_feature (376)..(376): n is a, c, g, or t
  misc_feature (404)..(404): n is a, c, g, or t
  misc_feature (422)..(422): n is a, c, g, or t
  misc_feature (436)..(436): n is a, c, g, or t
  misc_feature (519)..(519): n is a, c, g, or t
tgttcttcttcacgggctgggccgtccctgggatgggntcnggggggaccatgcgccccctcctnancagntggttcagacttaggtgcagggtnaggggttggtaatggggaaggggacccggnggcnctggacatgtacctggccaccagcacatnggcngcagatggggagatggnatgntccagnaggncaggcttcaggtagacacttgccggctcntnggttnccaagtgcaccagagcggccgggaagaggttcgcttganagagggtntgcgtgtggtcgtncaggattgtttttggaggggtgatgaacaggtaaaatgacagttcggggttncccaggtggttcntnacgaagtttcgcaagtttnccattgtttcgttggggcggaagaagcnctgtaggatgtagtggtnggggaacaggaccntcagagccacctttgggtagcgttccagttttttctttatttgcgcttccttgaaggttttggttattaagggggtttttttnaggcgcttccgctcactcttgagctgggccaagcgtcttctcacgtcgtccaccgtcagctcaaagaactcatcaggcagctccgctggccaggcctgcagccgctcctccaggtcggggtggcacacaccggctcccggtccacgggctcccggtccacgggccgctcccgctcctgctcctgctggggatcccg

SEQ ID NO: 646220 - DNA, 211 bp, Homo sapiens
  misc_feature (1)..(1): n is a, c, g, or t
  misc_feature (6)..(6): n is a, c, g, or t
ntctanacgatccccttcgcggtatcataaccaaaggagtgctgacctggtcttcgtcaggaaggtttgcacaactgttgcaatactctggatgaaagagcatgccgtttcatactgcttctcccggaagggacaaacccaaccacactccatagggctgtaaagaacacctacaggcccaaggctctatgtgtatctgtggtatccacca

SEQ ID NO: 646221 - DNA, 264 bp, Homo sapiens
cagtcttacctgtgacacacagggataccctcacccacgaggtggggggtgtagatgttgaagatataatctgatggtcacttgtggtagaatcgcgggttctggctgtgttggatgaacggggagcctgatgtgccagtgttggctggtagctgcaaaggctgactttcctgctggctgcatctgcccagggagctgggtgggaagcaaggagtcgaggggctgaatgcagagcctgggggtgcatggggggcagagaggatg

SEQ ID NO: 646222 - DNA, 1259 bp, Homo sapiens
cctgattgctgggcacggtggctcatgcctgtgaatcccagcactttgggaggcggaggcaggtggatcaccaggagttcgagaccagcctgaccaacatggagaaaccctgtctctactaaaatacaaaaaattagccgggcatggtggcgcatgcctgtaatcccagccacttgggaggctgaggcatgagaatcgcgccactgcactccagcctgggcaacagagcaagactcagtctcaaacaaaaaacaaagaaaagaaaataagctactaccacttttaattgtctctcataaataatttgatgtaggagtgaattcaaaatcatttagaagaatataatatgacaatgacaaattatacacaccgtaatatacaggatacttttggatctgtactcagagtataactcctaattttaaatactaatgtatattgtcttaaaaacaaagagcctaattaactaggtattcaaacctaaattttaaaaagaccacaacatgaacacatgcacacatatacacaaacacatacaaacacaactaaagtaagcaggaggaattaggaaatattaaactaaaaatttgttgaacagagaatgaaaatgtaaaggctgattttttttttggtaaaaataattagtaaacagataaaccactaacttaaaaaataaaggataaagtgcaattaaaataggacatgttaatcagaggtaattagagctaaaaagacactaaagaaatgggaaataaatccttgttatacctgagggaaatgtacttgaaaatatgaaacaaaatttaacagtttcaacataaatataaatttccaaacatcaatccagaagacaaatctaaacgaacctattactaacaacaacaaaaaaagaagttgtctaaaattcacttactccctactccacacagaaagaaacagaagacattatcccctgaaatttacttaaacatttaattaaatatattgcaatgctgtataaaccatttcttagtccatttgagctactgttaaaaaatatcataaactaggtggcttataagcaacataaatttatttctcacagttctggaggctgagaggtttaagagcatggcaccggcagcttggttcatagatgaccatcttcttagtgtcctcacatagtggaaggcactaccaacctcgttgggacccctttaattgtgctgttttaatgtacaataaaatgtattaaaaactaaataattacataaaaaaaa

SEQ ID NO: 646223 - DNA, 400 bp, Homo sapiens
tcgtggacctctgtagcattatctctagtgagagactcgacacgggaattgaccatctctaggaaacccaacgtgtcgagaaaagtatgacgacaccatgtcccaggtagccagcaacaatggcttagaggaggcagtcaggaagttaacatcaatcgtccgtccagaatgacaagatgcggactggaaaccttccagccaagctgaagaataaccgtgtttgaccgatcattccagtatgaagttcaacagagtgatcattccagttaaggcggggcaaacagaatacagactatttgaacgcatccgtcattgattgctaccggcagaaggactcctatatcgccagccagggccctcttctccacagcattgaggacttctggcgaatgatctggga

SEQ ID NO: 646224 - DNA, 155 bp, Homo sapiens
tcacggggatacaccatatatttccattacatttaacattattaacaaatacgttatattttttgtcataatgtaaaaatatgtacatattataaaagtacacattagaagaatcacagtatttaattccagtagcaaagcccactatttatttc

SEQ ID NO: 646225 - DNA, 229 bp, Homo sapiens
cagccaccgttacaccacaattactatggggctcagtcacccaccacattaacaacagtgataccctcattcacacgagaaaacaccctcatgttcacacaccaaccccacggttgcgttggcccaggggctctaacgcaccgttgattgggccaacgcaccgtccagttcgtccctttccagttttacagtgaattgctgccgggcgggagcacggtgcgttggccaa

SEQ ID NO: 646226 - DNA, 470 bp, Homo sapiens
agcaggtgctcctggcccgggcctcctggatgcccagctaggctgcggggctgaatggagctgctagaacaatgctgaggcgggtgagtgtgaggagcagaccctcgcggaagtcccgacagacgtgtctggaacatggtgatttggagtgagccggagacccaggcacctgtgcgcatccttcccctcgcctctgccaggccccgcgcccctaaaaggtgggaaaaccatgtgctgaacaatttcagtgacatcgtcaagcaatggctacgtgaagatgaagagcaggaagctcgggatctacctggagtgtgcctggctggtgttccggaaatcctccagcaaggtggcccacagcggctggagaagtactccagcatgagaacgtcggtgtgcctccgtgggctgccccaatggtgactgagatcagcaactgtcaagtgtgttacgcgtgctccccaaggagacca

SEQ ID NO: 646227 - DNA, 107 bp, Homo sapiens
tttcacatttgtctttactctcgtctgaactgagtttaagtgaaacagttatgatgttagaaattcaacttaacatttttcatattcaaagtgattgttccccgcgt

SEQ ID NO: 646228 - DNA, 1090 bp, Homo sapiens
gcgagtttaattcggacaaacttgacaattgactcaatatttaaacttaccattctcctcttgtctccgatcttttgccttctacatatgttataatcgatttcatccttagttagtcctactcatactatctctcaccactatcatagcgaattactgcattcaatggaaacttatcgggctgtttacctcctaggttgctccactctgtcgagctaaacacgcaacccaaacgacacttctgcacgcgtacttgctccaacagtggacggctttaccgttataacgttcttctcgaggctgaggcacgtttgcacgcaacatttcctcccgctgcagttacctaccaaaccggtttcacggacctaaaacttacgaccttctcacaccgcttaaccgaacaccatctagcttcttgtatcacacctacggtgacggcgagttagacctatccgcgaattcctttaatctactccaacattcgaggggcgcttaaacccaacgatggggttaatctcaacccgggtggccccttttatggctggacgtttgcaaactttgcggatcttcgctcccaccccagaccgacaagaacctttccttgttaagcaaaatacagatttccaacctccatactctctatatagcacaggcataacccaggcttaattttaccaacgctttgctttatcaaccgcctcacaataacatcatcccttaagcacctccaagataaccccacccccataaacagactccccgtaaaattcacggaaaactcgcttataagctatatcattttggaccacattacatctcacaccacgtggactcactcccattgagtcaggcacacctgaggcagattacccaaacgccctaaaggagaagtaacataaggcataatacggtagacactgaccaccgtcacatgttgcaacatccacacacgactgccacaaaggcgaacacacgcgacaacccgccactagcgtcaacatgttggaacggcatagaaacaccggacacacggcatatacaatggcatacagagtgtacgtagacacgtgctaaagtaggtgtacaccag

SEQ ID NO: 646229 - DNA, 1031 bp, Homo sapiens
  misc_feature (704)..(704): n is a, c, g, or t
ggccagctccgggcgtggggtgaaatctcttgattcctagctctctcggatatggcacctccgctgcagctctttgcgcgacggttcctgtcaggtcccagacctgtcctggctcttcgaagctctagctgcgcgacttcagggtaggatccgggactccccgtctaaggtcgaaccgtgggtagtgggagcatatcgcacggatgacgtgccatccctgggttttgcctggtagtgaagaaagtggagcagaaggattgctaagtgacgaatagcctaaatcacgacgtagtctagccaactcctggtgcctggcgtgagttccggagctgtgcttcatcgtcttgcccttggggatgatcagccctagcgacatcaaggagaagcgggtaggaggtgtgcaattctttggggggaacaggtgcacgttcgaataggagctgatttacttagcagcgtcgggtacaatggagactaaagaacaagagcaagatcgctgtgctatgtgtcctgcagcgaagtctgggagaatcgacaatgctagttgtttatccgcatgctgggtttcccaggacagttcggtcctatcgctactgggatgcagagaagaagacggattggatgctccggggcttcctgagatggtctggagagagtgatcctgagttctcgcatggttggcctccaaggcctgtgcgcatggnctcaactgggatggaccctagatccggagcaggtggaagccagatgctgctgtcgtgacggaccgggttgctgtaccccgttctttgactcagactatcagggcttcggtctggaaacctggaggagagatgcgtggggcccttcgctaattggtggtctgaaggcctcgaagttcatcttgggccccagtcctttcttccaagagactttcggggtctacaatgacaaacgtcgggatcttggctggtggttggacaagagctgagaagattctgggaagcatttcccaagatggggaaaacgggcggctaattgggccaatcccc

SEQ ID NO: 646230 - DNA, 308 bp, Homo sapiens
ggaggtggggggggtcagccccccgcccggccagccgccccgtccgggagcgtagaccatccctcccagaactgttactcccagcccacttcgagcctgatgaagtgaagacacagtggtccagtactggctaaaggtgtcaaaacgttctacacagctgagggctctgctatcactccagcgacccccctgcaaccgagtatatccacctaaacaaaagaagaaaaggtagtaatgaaaatctactgttctacatctaaacatttagtataactactatataacaagaaataaatggtttagaaatt

SEQ ID NO: 646231 - DNA, 1296 bp, Homo sapiens
ggcggccgcagccatgagtatgctcaggcttcagaaagaggctcgcactctagtgtcctccgctgtgagtcaatgaagataggtctggttaagaccccaatgaggaccaatgaaatctgccaattgccaacatcccgtcagcatcaatcgcggatcgcatcagtcttaggagatcatgtggtcgtgatcatccagtcaaggtcgctgtgatccggtgccaattcccagtggctcggattgccgtaagaaatcagcacttggcccggccggatagggcaggcacaatgcggacactagggatacattgcgagcaaggggttatcatgctcgaaatgtcaccgatagtgacccacaacgaaggtgtcaccaattggtagtttaggggacgaagtgaagtgcacttttgtggcgcccctgctgactcatgaaagactaccgagatcatctaacgaaacatcgtactcgtccggagaatcgattattcatccatgagcgcaaggctaagcacttggaacatgggttgggaaatggtggggatactgggttgctttgcgagagaaaaagcgaaagaacgggaaatttggcgtgccatcgaggaaagaggcaccaatttccaccacaaggaagtgggacacgggcccgaaaaaaaccatgagggattctccccgtcccacatggatacgccttgcgcatgtgtgtcgtggaacccgagagaccggtgggacgtggccaccgcagacaaggcgttcgttaaaacggaatgcccaattgcgggaacggggccacctggtccaacaaggccggccgcaggctggaaaagggacagagccgtcccgatccccaatgggggccgcacaacagagaaaaggcgggacgggggaggcaaatctaagtcgacaaacggaaaccttttttaatttcccttaaaggggcacagggaaagatgtaacggagacgcacaaggggaaaagtagttaacacataagcactttcggcccaatctttatttgattcttaggtaataccagttagcgttggtggggcgcctttcccttgttttggaacttctccacccaattaatggcaagttccaacgtgccccacttctcatgacaaaggttaatacaagaacaaaacgcgccccttatttacatatggaccacaaaacaacacaaaatcacattacacacagagagtaaaacccacattctcccaaggaagggagggagcgaattaatcataaatggtaatatacagcgagagggtagtagcgctcggaagaggagaacgaccatg

SEQ ID NO: 646232 - DNA, 237 bp, Homo sapiens
atggcaaataggaagaagctcagtatcctcctcccaccataaccccactctccactgcctcctggaccatagtttcctccactatacggtccccccatgttcctgctaccaccaaagtttccactctttatcgaaccgtattagaaggtcgctggttataatttccaaaatatgtaatttccacttccaaatcctttatagttgtcataaccacctccgtagcccccaccctgttgc

SEQ ID NO: 646233 - DNA, 464 bp, Homo sapiens
  misc_feature (197)..(197): n is a, c, g, or t
  misc_feature (204)..(204): n is a, c, g, or t
ttaaacgctttattgtgcccataaaaaaggcccatggaatgaatggaagagcccgcagccctgagcccgagcgattgttttcgcgcacccaaatgcaaggagggtggggatctgggaaaggtattggcggcctctcgtccccgcgcgcctgtgcccggccaactcagcgatcctccgcggtgggcatgcgcgtcctncgccatncggcgctaggggccagtaaccatgacgatcgccgttgccaaggccgagatccaatagaggcgttgccggggctgtttcaaaaacctaaagcaaacaacgaaaaacgctacatcgttgggggaggggaaagactgagaggacccggggcccctccctgaggctcagaccagctcgtccccggccgacacgctcacttgcgcccttgggcactttggggacgctggttggccgccttcttcaccttctcgccccggcggccc

SEQ ID NO: 646234 - DNA, 164 bp, Homo sapiens
aaaccacgagtcctacatcagaatctggacccaaccagcagttcattcagcaaatggtgcaggccctggctggagcaaatgctcacagctgccgattccagaggtcagatttcagcaccacctggaccagttcacggcattggggttcttaacccgtgaggcaa

SEQ ID NO: 646235 - DNA, 442 bp, Homo sapiens
  misc_feature (47)..(47): n is a, c, g, or t
  misc_feature (62)..(62): n is a, c, g, or t
  misc_feature (79)..(79): n is a, c, g, or t
  misc_feature (110)..(110): n is a, c, g, or t
  misc_feature (134)..(134): n is a, c, g, or t
ccggatcccaaatgcaatggtgtaaaacatcaaaagctgtcgtcatnggaagggcagttctntcaagcgtctccacagnaacccacgccaagtccaagctgtgtgtcccntggtcccaaggccttctgcttccncaacctttagcatctccctgttgatgtcacagaccgtggcaagtgaacctcccaaggaatcctcttcattctggtactttttggcaatttcttcccaggataggttttgctgagtccttagctgtctcctctgtctcctctgatgttgtgcctgaacgtaactaaggaaccggaacgcaatgtcacctgtgcctccagccatgtcgagcagctgggtcccgggcagcgggtgcatcttcctgataagcaaatccttccaagctcgatggatgccgagactcatcatgtcattcatcagatcgtacttc

SEQ ID NO: 646236 - DNA, 494 bp, Homo sapiens
  misc_feature (48)..(48): n is a, c, g, or t
cttaaagtgcccggggtgccgggcccggagtttgtcagaaagttgaangacaaaggggccaaatcctacatccggtcccggccccagacccccaggaaggattttattcagttgttccccggggccagcccccaggttggggccctgttggaaaaaatgttggggttaaaagtggacaagggcctgagggcggggggggccctcccccatcccttttttgaacccttccggggccctggggaaaagaggggggcccaccacccgtttgatgtttccttagaacccgagaaactcccaggggatgaatggaagcggcccttttccaaggggtttgtgaattttagccccctttgccgggagggactccgggggccggggggggataaagttgtagggattttttttggagggccccccgggccagacccggcccaggggccggtttttgtccctcccaaactcagccctttttggaaaaccccctttcaagcaga

SEQ ID NO: 646237 - DNA, 380 bp, Homo sapiens
atccatttaacaaaaatattctagggcgaaaatctagcgtttcttccacaatctatttacggcctattcgaaaaggcccaaagttaatcgggataccccgaagcaaacaccacattgaacatcctattatttgtagggtcatttatttcttttacagcaggaagattaataaatttcatgatttgagaagccttcgctttgaaaggaaaagtccttatagtagaagaaccctccataaacctggagtggctatatggatgcccccccccctaccccccatttgaagaacccgtatacataaaattttggcaaaaaaggaagggattgaaccccccaaaactggtttcaaaccaaccccatggcctccatggcttttttca

SEQ ID NO: 646238 - DNA, 691 bp, Homo sapiens
ccccaccggttaagcccttgggcggcgctgggggaacacactaggaccgccccctcgaggccacaagccaagactgtgttcgtaaacccaccccctgtcttgaggctaccctctttttgttaaaatagatcccgccagaagggtttggagattttacgactcttttttgaaaaaataaatttttgggaattctagtgtttctaaagttaattttaagtcgttttaatacatgtgtccccccagaaatttatactctttgagattctgtgcacccacgccactataatgagtttcttggtgaataccacaatgcgtgaagaacttgtaaatgagcccacaaagggctacccctcggagtagctcctgcttgttcctctcttttcttagtaacctcgttttttgagttacccgtaagacactcccacgattatcctggaaccccttccacgtataacttaggccctcccttccttccgaccactttaattgcttaatagtttgaagaaaactattggagaatgggccttttatatgacatgtatggctttaccatattaaatatgagccaaaagaaaaaatatgagaaggtttatgtgggtctgtaaggtatggctgtggaaagatattgtagtagttttgaccctattgttattacctttaaaatcatttaccccatcgaatgttaaaccga

SEQ ID NO: 646239 - DNA, 519 bp, Homo sapiens
  misc_feature (58)..(58): n is a, c, g, or t
  misc_feature (201)..(201): n is a, c, g, or t
  misc_feature (232)..(232): n is a, c, g, or t
cgagctcggttcccggttgccgcctgctgagcatggggcagcagggatgttccctggnggttaaattctccttgagtcttcatggctacaggaaataaggggtctctaattatttacttcatggccctcagaaggtttctcagcgatgactgtgttgaggtcttgtgaataggaatttatgttttctaacaaaatgaacancgtagtccacatcctggctggcacattgganccttgttctttgctgcatggatccacctgtaatggtggcttctgatggggtgggcagctgaagctagtctgcagccatctgtgcgggtgccgggcccttccacctctgcaggcttgttggaggctgccctccgcgggccttgccacctgcctttctcactctacccggagactccctgtagcctcgctcaccttccctatacacctcagcgtctgaaagtgtgctctgcacctgctccgcaccgcttcctttcgcacctcactcagcccgggatcctctatggtagc

SEQ ID NO: 646240 - DNA, 313 bp, Homo sapiens
atccctccctcagctggaaaatgagttagttctgattgtttatctgttggtcactgttgttgtatggaagagctactgatttctgtacattaatctgtatccggaaactttgctgaattcttttatcagttctaggtgcttcctagaggagtccttagggttttcaaggtaaacaatcatatcatcagcaaacagtaacagtttgacttcctctttaccattttggatgtccttcatttctttctcttgtctgattgctctggctaggacttccagtactatgttgaaaaggagtggtgagtggccatccttg

SEQ ID NO: 646241 - DNA, 858 bp, Homo sapiens
tggctgcgtcgggttgcaggagagagatggcggtctccacaggagttaaagttcctctgtaattttcgcttgtcggacatcatacttgaatgaatgggacacaaaggatgtaggcgacggttacagttagctggggccttgacgatgaatgatgatatgacacttacaaggtggacaggcttgattattgggcctaccataggaccggattatgaaaacagaatatataggcctgaaaggtagaatgtggacctataatacccagaagcatcctccgtcacgttagcatttgtcaaccagcaacatgtattatgaaccggaataaactaattccaggtgggatggtgggaatgcccgcgagtctaccagtgttagcaaaatggcaaatcttcatatagcattaaagttgttacttcactgagctaagacggtctaatgagtgtccatagaaacttatgaaggcttccacagatcaccaagaatggacgacacatgcaacaatctactttctaggtggatctcaaatttgtgttagatcaacaaccttctactcatgttaatggtcttgatttagacctatcacaatgcacaaatacaccatgaagtaaacagattttccagactgtaaacattgacctgaccatttgtgaggaatattatttactatattgtaccgcatttatgtttccaggcaacaaggaggcacaaatgcatgccacaatttttttgctcttgaaaaggcgtgtcatttaaacattaaactcggagtctcgaaatagaatccgggttaccacgcatgaaagcgtgcgcgaatgtcaatggatgtgaacctttggtcaacaagtaaatcccaaaaga

SEQ ID NO: 646242 - DNA, 391 bp, Homo sapiens
  misc_feature (4)..(4): n is a, c, g, or t
  misc_feature (9)..(9): n is a, c, g, or t
  misc_feature (202)..(202): n is a, c, g, or t
ggantgcantggccgcaaatctgggcctcactgcaacctcccacctcccgggtttgagcgattcccctcccctcaaccctcccagagtagcctgggataacaggtgcatgcccacccacacccggcctaattttttatttttagtagagacagggtttcaccatgttggtcaggccagtcttgaactcctgacctcgtgatnccgcccgcctcggcctcccaaagtgctgggattacaggcgtgagccactgcatggccacattttatttttcaaaggagtcaaaggtttcttggccgggcatggtagctcaggactgtaatcctagcaattttgggaccccaaggtaggaggatccctcgagctcagagaccagcctgtgcaacatagta

SEQ ID NO: 646243 - DNA, 111 bp, Homo sapiens
acgcgaaaaagactatcaagagaggagcagctctataatcatcatctgatgaaaggtacactgaactgggtgatcctggccagtcagtggcctcagttggcccttatcgag

SEQ ID NO: 646244 - DNA, 236 bp, Homo sapiens
agactcaggaggaggccgctgctagtaagctgagattgcaccattgtactgctgtctgagcagcgagcaaaactctgtctcacacacaccagaaaagagcacgcagcaactgactggttggatcaggcaagactctgagaaaggactcctgacctggctcttccagaatgaggatggattttccatatgaaggcgccgggggcaggaccttctgggtagacgcgtgaaaagaacat

SEQ ID NO: 646245 - DNA, 719 bp, Homo sapiens
ggtgctagactataggctggggggagggtaggaggtgggaggcagatacttccacctgcgtgtcaatctccggctcctccacggcttctatggaggactcctctcttctgcttctgtggatgtgatgccctggcaggccagggcagctgattcccctaagaacttatgattaccaggatggaaaggccttggtcccatggcgactgggtggaggctgggggatattctctactttgaacacttctccaaagaggcagaagggccacagagttctgagcaccctgaacatataactcagatccctgggagtaacacagtaggcaaggcactcatgtgggagtggtctgactggctgttgacctagacatgcttcataaatcagggtaaggacctctgcttggagcatccaaacccttgaagctcaaaactgtcagagcaaggaggttaagagttctgtatctcttgacgcaagcctggactggtgcaaatggcctgtgaccatacttgtcactggagaggcaaatatgtttatccatcctgcccatatgacacctatgagaaacgttcacagtgaggagtagccaggtagctaggacagtaaccctgacacacactgactgaaaatcggaaatcccacggactccctcttaactaagtgacccatgtagacggaagccaggagatatggtaaccgaaacgatgacaggggaagggatagg

SEQ ID NO: 646246 - DNA, 173 bp, Homo sapiens
  misc_feature (37)..(37): n is a, c, g, or t
gtcaacatctctgtggcgcagtccatgtctccagtgnctatggtggtgcagtggtgtcggcagtggcttaggctgggtggatgaagcagctacatcctatggcagtggtcttggctgttggagtgtggcttcagtttccagctgtatgcggtcgcaggggtaaccgaagctcg

SEQ ID NO: 646247 - DNA, 426 bp, Homo sapiens
cttctagagtatcctacctcctaccccacgggggtctgggaacatgggtgtgtatggtgaggggaggttctgaggttgtaaatagaggcctgaaggaaatcgggtttgctgaagtcactcaggagttggactgtgtgtgaaaggatggtctgaaggggctctcagaggtctcagggttcccctccctgcaccatgctgcgtggggaagaaggaggtggctggggagctcagcaaagggcccctaggctgcaggcagcaaggttgcgaaatgggtcccaggtccagctggccaacttcacttttcccttcctctccctttcttttatttatttatttttttagtgtgtgtgttttcgaaatcacaacaggaaatggggtagtgatttgtctagaggggaggcaaagaatgggcagacagcagtccct

SEQ ID NO: 646248 - DNA, 540 bp, Homo sapiens
aagaccagggtctctgtagttctctaacatcacttccctatacaaatctgtgcatgagcagggtccaggcatggcgactcctccagagaaacttctctggccacatccctaaatgtcaatggccccttttcataaaaagagtacctgagacgcttcctgtcagcccgtaggaatccacttgcttccttgagaggctacactcgagacttcaggttctccattgctaggcttccaggggtacctggcgtcttagctgtagctctcccaatagctgcccaggggctggggctctcaaaggctttgtaggtgcaggttccattggcccttcaaaggtgcaggagccatgcaggggaaaggcaattccctccttgctaggcacggagatagtccagccaaatgatgccgggctactgaggccagaggcgcaggtgggctggcagcagccctggggctggtgtccgaagatgcctgacgggactgcaatctagttggggaggtgtacaagtggtgtcaagacaagcactggaggtagctcctggg

SEQ ID NO: 646249 - DNA, 203 bp, Homo sapiens
gtcgatcagaggatcccccatgtgggcatcactggtttgagctcgtgctggcccccgaaatggtaatatatatacctttcatccttagatgaatatttctaattcgcgatattctctgacaaatcgaagtcaagtacacagttctcgtgaaatatacagtgaatgaggctatcattcactagattacaatacgtcaaacatgg

SEQ ID NO: 646250 - DNA, 915 bp, Homo sapiens
tgatggttatatgtgcatgccttttcttcaaaaggaaatacgcaaggttatagcatctaaaaataaacataagagtcagacaccaaataaatcaagtttacataacagtgtgtatgcccagttggtattaggtgagattttcacattacagaaagtattggaggcagcatgaacaagtgggttatctatcctgtattttccagttgggaaaaaagtacagaaatttcatcacatggcttggccataattgtggcccagaatttaatcttaagcctctctctgacagtgatgaatcatgctcaaaaagccattctaatgggacctttttaagacagggaaagggctcagtaggcggatgtgaaagaaattccaagtcatgaaattattccattgagatttcctacaagggaccaacaatgtgggcacacaaataagacacctaccgacttagattgggctacgtagctagcacacgtatctcccctacataccatacaggccaatcgtatgtctgactcaaagggaatatgtgtgtgtatacttacagacaaacaatcctttacaaggagaaattcactggaacaaacaaaaggctgtggacgtggctcacgaggtatggcacataccctacacgcggaattacacatggaccagcaacacccaagaacactcacgcgcggtcacaccacacagcgccgactcaggacacacgaacgacggtcaccagcgggctaatgccaccggcggacctcctacacaaaacccggctcccataacaacctcaagacacccatggacacacaacgacaagcagcggcaacatcacagctacgccagttcggacaaccaacacacaactatacgcaaacgccgaagaaacaacacaccgacgatgagcacccaaccgtcacacca

SEQ ID NO: 646251 - DNA, 530 bp, Homo sapiens
ttgtgtttgtaataatagccattctgactatgtaagatgatatcttattgtgtgtgtgtgtgtgtgtgtgtgtgtttgagtcagagtctcactctgtcactcaggctggagttcagcggtgcgatcttggcttactgcaacctccacctcctgggctcaagtgatccttgcacatcatcctcctatgtaactaccgtctgcaggagcacaccatcatgcctggcatagctttcccttttgtgaccagtccggaagtccccatggtggccgcactgggactaaccttgggtcctcgtatcctggctcctatgactacctaccttactggatgacaggttcccgctgatctggctgccatagagttccttcgattgtcactatctatagagattgcagccttctaagaggtcaccgcttttcctcagtctctgaaggactgtgattacacctacttacctgccttcacagctcgtaattgccctctactgtttgctagcctttgggcattatccctgctgcctgttttcccg

SEQ ID NO: 646252 - DNA, 224 bp, Homo sapiens
  misc_feature (153)..(153): n is a, c, g, or t
gttatgttgatcgagttttatcgattacagagcaggctcctctagagggatatgaagcaccgccagtacctttgagttatacgctgtgtctcgaagtgaactgtcagagcagtttttgtgatttaactgttgagcgttatggctaagcatagnggggtatctaatcccagcttgggtcttagctattgtgtgatcagatatgttaacgccactttcgtagtcta

SEQ ID NO: 646253 - DNA, 221 bp, Homo sapiens
cttttacttaaatggctgtagcaccctcctgtataaccatagttaatatatgcttactatacccttggataatcttttcatatacacacatctcagcatgcaacttcagtgaggaactgtacaaataaaactcacaaatgagcaaaggaaaaaaatgacagttcaacatgtctcgaagaaatgtatcatcgatccactattcacaaccacacatacacagg

SEQ ID NO: 646254 - DNA, 432 bp, Homo sapiens
actgcagactgcccataccaatcgctgttagcagttgcacctccactttcccactgagaactgccgcatcttcaaggatatgagaaagcccagactcacgagatgagaagacccccttggcgaaatatagtgtactcttcactgccaatgccaccaccaaatgggtttatagagcttagaaacacaatctttgtaaattaatcaaaacctccctgtgacccacctgccttctccccatacccaaatttgaccactactggcctaaaaggcaagatgggcttcgatatagaagggctgcaagacagtagaaagggctgccacggaggtgacagtagctccttcctctccaacatgtgatgctacacatctctgtggataatctaagttggacttatgactctaaaacagctataatccaagaaagttaactca

SEQ ID NO: 646255 - DNA, 440 bp, Homo sapiens
tctatcgtgcttgatgagaaagacacattgaggcccctacagaatatccctggttcactatggagctagtaggatagaaggcttccacaaataccgagcaatacctttaccctatgactacatactggcaagtgagtaccgctggaacaatcaaattcaacacattcttcattgattgcatggacgacctacggtctggactatgaccggaagaaagtctccaaggccgacatcttggccaggattaacagaaccggagatggaaactacaagagtaggctgagttaggggtccctcaggttccttattcaaaaaacagccaggcagaggtattaaatagtcagtttattcactactgaatcatgctaccaggatgctaaagatgatgatgttcacccattccagtacagtatacttttaaaatacaaaagtattgcaag

SEQ ID NO: 646256 - DNA, 401 bp, Homo sapiens
actaataccaatcctactcaaactcctcaaaacaaaaatttttttggaagagaagggattacttcccaactcattctacaagggcaacattaccctgataccaaaaccagacaggatgcaacaagaaaatgacaggccaacatccctgatgaacacagatgcaaaaatcctcaacaaaatactaacaaatcaagtgcaacaatacattaaaaagatcatcctgggatacgaagaggggaagaacagacttacttgagggtggggggttggaggaaggagaggatcagaaaaaatacctattcggtactatgcttattacctgagtgatgaaataatctgtacaccaagcctctgtgacacacagtttacccacattaccaaccagcacattaccccttaac

SEQ ID NO: 646257 - DNA, 111 bp, Homo sapiens
aaaccccccaaggagctaccggagagaataaggcctcccggagttaagggctcccggagggttaaaggctctcggagggttaagggctcccggagggtaaagggctcccgg

SEQ ID NO: 646258 - DNA, 1575 bp, Homo sapiens
gctgctgtgcgggtgtttgtcccctctggtgttttgcgtggggcatcgttgctggtgttgtgggctcataattgttggttcgcgtgggtgggggtgctgctgctcgtccttgttgtccctcgccttttgttgtttttgatagttagtgtatttgggttgtggttctcctttcaccgtgggttcatcccaatactgcctcttctgtgtgggggcctcttcgtgtggggcagttttgcgtcttccctaagttgtggggggctccctcgtttctctcctccgtgaatgtgccacggatgggggtgtttgttttcttgttggtgtcgttgttgcgctcagtgtttttcgggggggggtattacctgtggttgtcgctggtgctccctgtggctcgcctggtggtggtgtcccattcggcttggattgttcctgcctctggggatgggtggctttctcggggtaggtgctctcgctgtggtgttgtgtgtttgtgcgccgcgccgccttttggttgtttggtgagcaggggagatttttggggtcacttgcccccttttggggggtcccactttgtgtcactgcgggtgcggcccccgctgaggggtggggcccccctctaggtacttttttgtttggcccacacgcgcatctgttgggtgaaagtggtcaccgcctcgtttgcgcgggttgttgtgggagacaccatctttctcgccccccttgtcttctcgtgtgtgtggggcgcgcgggggggccgcccctcctcgtctcacacgcgttttgttctgcgtcgttcctcttatgatcgtgatctgttgtcgtccccctcgttgtgaagagaggagatattttgtgaagatatggtatttggggaagaaagcacccttttctctgtgggagacccaccgcgtttgcacagatgtgtcccacatcggtgagatcctctcccactcacatactcacacaaagagagacacgctgtcttctctcgagatagacactacttggggaggcccctcggtactccctccctcccccgtaagagtgtgtcccaacagaatacttctcttgaagggattatttctcccgtgagctccccggcgtatcccccctttctgtagaggcccccttctcgcttggtctccccgcgtgtgggggcttgtctcctccagagagagctctgttttgttttgttttgtccccccactccacccacttctcactggccacacactggcgtttttgtgccacatggtgggccacagcgagaggggtgaacgtgcgagatataattataagagctgcacattattgtagaaagtgccacacacagctcttttcccctcacgcttttttcctgtgaaatgaactggcttcccctcacaaattggcacctgaagaatttgctaacacacttttccccacacctggtaacactgaaaacactgagacccccggttccacaggtgtagaaacctgagtccccccttcccccatagccatccctgcctctcataagtcttgactctcctgtttacttttgcacaccaccccttaatttttaattggttttccttg

SEQ ID NO: 646259 - DNA, 206 bp, Homo sapiens
atcccgggattctattttgctgaatcaggattcaggatcccatgattctgttttgctgaatcaggattcaggaccttttttcaaaacaagtaaaacagaaaaataaagtgcaagtaccaacagaagcagcctccagaacttttaattgttatactcttacctctttttctctttttttttttttgggttttggttttcctttttta

SEQ ID NO: 646260 - DNA, 791 bp, Homo sapiens
  misc_feature (501)..(501): n is a, c, g, or t
  misc_feature (649)..(649): n is a, c, g, or t
cacgagggggcatgtgtcagttgggtggcccttctcaatgtggcacatttcttgccgtcatgtattactgcgtgctgtcgtttgcagaatgacatctctgaaaaggagcaacgatggggagccaagaccatcgaggggtctggacgcacagaacacatcaagtaggtgccgaaaggactggagaaaaggaagggggttatgggaagagcccaaagaaaactcggagacttgggggaaggtgagggaggaaaaggatagggtagttcatgtctatgtattattgtgtttgttttttttctagagtctgttcctgtgtgtacctgtgtgtcattgcatatttccattttatgtctctcctcttaccctcctcaaccctattatctatcttttatacctaacaactctgctatttccccaagtgggtctattggattaactgcctcccttcctttagtaaggcatgagagattcatagaggaagtggaccaaatactaaggtcntctctatctatctacctggcatcatctatctcctatctatctcttcagataaatgtaaatatgtatttagaattcagggtgacttccttcagatgaactaagaacaattcagtaaaagtcaaggtgaagaactcagaataaatgctanaaaaagaggccacttcagctcccataactggcccaaataacttttaaaatacagatttgtacttagctatttgccagaagtgggaagccatgaatggtaatatgaagaaatgtaacacttggaaaacctgtagataaaaact

SEQ ID NO: 646261 - DNA, 562 bp, Homo sapiens
tggcgagggtgtctcgctcggtcacccaggcgggagtgcaggggtgtagtccagctcacggcagcctcaaagttctgagttcaagcaatcctctggcctcagcctcccaaggtgcggggatctcaggggggagccatggcgccgggcccgaaaccaagctttcttatcccaagcacggacctttatcaggtggacctaatcctttatcatctcctaggtgtccctcatgagtgatcacttcacattcctcccacagtgagagctcacccacgggggcatattttccccatgggaaaagtgtggttatgggaagttccctgttttgggaaagaacaggatgggaggtgctctcgggggtgtcctcctaccaagcagcctgttgaaggcctcggggtgctcagggagcacgagcaacattcgccgtcgcttcagtttcatctggaggccacacagaatctccgccaccggccacccagatctcctcgggctcaggggcgagcaccttcgggggctcctcctcaaaggattcctcagattcgtcccacaattccctcttcttttt

SEQ ID NO: 646262 - DNA, 748 bp, Homo sapiens
gcttcaagatgaagctgaagcatctccttcccagccactggctggcagcaatgtctagtggaaggggagcgatgaacgcgagatcgttcgtacctttctactgagaagcgtagtggccacatgaagttgctgctgacgctctgggtgaagaatggaagggttatgtggtccgaatcatggggtgggaacgatcgaaacagaggttgccccatgaatctaagggtgtctctgatccatggccgtgtgccgcactggctactgagatacagggtgggattcctgttgacacgaccaaggagaactggagaaggaacacaagaaatatcagctgtcgctgcgttgtcattcgctaggcatgcaagatctgagcgttctgcaacattggttattgtcacaaaggaaggtagagaaggatacttcctagggactggactgatactacagtgcctcgccgaacgtgggccccaaaagagctagacagaatccgcatgacttttcaagtctctctagaagaagatgagtgtccgccagatatgttgtgaacgaaagcccttaacataagagagaggtaagcaaacctaggaccaaagcacccaggatgcagcgtcatgtaactccagagtgtcctgcagcacaaacggcggcgtatggctctgaacgaagcagcgtaccacgaaaaatatgaagaggctgcgaatatgctaagttgggccggaaatgaggagggaagggagcgcgggaccagtgg

SEQ ID NO: 646263 - DNA, 320 bp, Homo sapiens
tataacataacttgtttcgaagatacattcctcagtaacagactgagctcatgcatgcctttgtcactgaagttgcctaccaaatgaagcttctgcaaaacgaaaacatgagcttgagcctcttcaccctaatagatgctgctttgcttcagaaccggtcatccatgtagtcatatgctctgttgcaccagactttatgagtaaaaggcttaacccatccgttgcggagcagcacttattaggcctgataatatacctgccgtagaagctgttcgcagcagcattattctgcattccaacattgccagacttgccaacga

SEQ ID NO: 646264 - DNA, 259 bp, Homo sapiens
ccacgaggcacaatcgtggaaggatctcccattggccggttgggtgcaaaggcctgaggcactctttcatccccttttgtcctggcgatgactttcccattgacggtgcagtgtacgttgggcatctctgactatggtgtggactcgaggtgttgacctctgcaagctgaggatcaccacgaaatgcctgcgtctcccctggcatgtaagctgttggtagagtgagacaaagatagacgcacgccctgtatgtattcta

SEQ ID NO: 646265 - DNA, 406 bp, Homo sapiens
acatgaggatcaccacagttgtcataccttgcactgttgattcactagcctgcactgttgttcatacctggtcgctgtattgtggggtggactcataatcagaaaggacaggttctgacccaaattgcaatgccccaaactgcgagtgtttaactcctgacatatctagctgagaccaggctatttccacagacctagagcgatgtaatcttacgaatgtcaaggtatgcttttttcattctgcatgtttcaagtttctgactgtagccggcttgacgggctatgaggacttggccgtctgtaagataccaggcgacattctgtggagccgatgtggattttgcttgagcagaggagaagacggaggtggcaggtgcacgctgtggagggtatgaacaacagtgca

SEQ ID NO: 646266 - DNA, 187 bp, Homo sapiens
tggagctcggtccaacttctcatatttatatcttcttcgaaagcacaccttatcccaccctggtcgtatatcacccgtatgaggcaagcagccagaacgcctgagacgcaggcacatacttcctattctacaccctagataggctcccttcccctactcatagcactctgtttgtggaggtagcact

SEQ ID NO: 646267 - DNA, 740 bp, Homo sapiens
actgacaaaacgacaagagctgcaatgaccataaagaactatcaataagccaggtgttgaatgctgaacttttagaaagccatcaagaagaaaaaaatcagttacttaaaaaaattgctgcgaaagatgatgatctaaaaccgaacagccaaaagctatgcagaaatccttgatgctcgtgaagaagaaatgactgcaaaagtaagggacctgcacactcaacttgaggagctgcagaagaaataccagcaaaagctagagcaggaggagaaccctggcaattatcatgtaacacttatggagctacagacacagctagcacagaagacgcctttaatcagtgcttcgaaattgaacgagcaagagttcagagcacagcatcacaatttagacgaccgtttgaagaaatatgaaaagaatgtatatgcaacaactgtggggacaccttacaaaggtggcactttgtaccatacggatgtctccctctttggagaacctaccgaatttgagtatatgcgaaaagtgctttttgaatatatgatgggtcgtgagactaagaacatggcaaagttataacacgtactgagttcctgatgacagctcaaaaatttggaagagagatgccggtgtgttacttactccagggatttcggaaacaaagcggcaataatgtcggtccgtccctgaaaggatgggcgggtgactcactgacagaaggcagcccacacagggaaacggag

SEQ ID NO: 646268 - DNA, 178 bp, Homo sapiens
cacctcgcaactccgacttctcacgaccgggtgctcatctgtgtgctgtgtgtgctgtgcgttgtgtgtgtgctgtgctcgtgtgtgtgctgcgttcatgcgtgtgctgtgtgttgtgtgtgtcgcagcggggatgcataacgtatgagtgctttttaggatgggaattgagcatgta

SEQ ID NO: 646269 - DNA, 123 bp, Homo sapiens
tatgggcttttgccatatcttgccaaagattccctgtaaagtttaattctattaatggtttcataacccggttgatttaagtaatcatcagttctgtaaagtgcaagagcccgcccccccata

SEQ ID NO: 646270 - DNA, 483 bp, Homo sapiens
tactttccacagggactacacagcagagttaataagaaacaagtcatcagagctgagcttttctttagtagaaacaaattacatgaatataaggactgttgatgtgcaacagtctaaagcctgtgtgcttaaaatcacactaacagtctccttttcgtcttttgcagcctctttcattagcgaagcccatcctatgattattttacagggttctcaagtgtgaattctgctttagagacttgtaattcattaaacagggctagatctaactcctttaacccacatttcacccatggacgtctactaccttctttaaaagtctttcagtgtaggaagtgggaaggtgggatctgtaatttggatcaagtgatgagaccaaaagaagtcacagttacagtttcagctgtgaagtgtgatgcatactaacctagagactaactataaagcgtatgagtaggtttgcttattggtgaaggtgaatga

SEQ ID NO: 646271 - DNA, 189 bp, Homo sapiens
atgatttgttcccaaaggtttgaaacattcagtgaaactttttaaaactttgatggcatgaggtattttttttttaaaaagttattgtttgaaaaaaatgtctttttaaaccaggaaaaaagttatcctgaatgacgttgaaaactcccccccccctttatttttttttaatcaaaacatgtgaaagta

SEQ ID NO: 646272 - DNA, 886 bp, Homo sapiens
gatcgaaaggggaggtggtggagatccacatatgatcgaccaggtaacagcgcacggactcgcacaggtgggcaaactgacccttcaagagcacgcgagatggaggaccatcgatccgaccgtgggcaccaaagatagattcgagtccctgagccagaggaacaagggtccatgccggggggacgtgatcagccatcgagccaaagcgacgggcgaagatcatcgcagagttgggccggtcgcttcactcgcgcccgctagctaaccgaacgcgagtggggctcccagaccaaggttcgtagcagatgctcgcagatggggagctccagaaatacgcaaggaggtggtgcacactcgtgtccctgacactgagatcctgactgtcatcaactctcgcacactcagggcttcctgtgcgctacttctcaggtgacacagggcgagatcaacgtcagaagtccgtgagtcagatcaatgccaagggtggctgagtggcgcgatggagggcaagggcggagatcaagtcccgtgtgacgctgctgatttcactcgaacggagggtccgaacatgctgtgacatcaggatcagccttctccttcctcaaccgggccctggtgagaagtgacccctggccgccatggtctcgtgatcatagagccacctagaaaccggtggactatcaagcgacgaatccggggacacctaggcatagccagagcgcctcgacaggtctatcacccaattagacctgacttggaccggggcttgcgttatcggtcatccaagcaacctcccgtaacaaggcgcgaaaaagacactcgaaagcgggattcctccggcaattcggggtgcagaagggaagaatggcatgtcgggcagacttgg

SEQ ID NO: 646273 - DNA, 507 bp, Homo sapiens
  misc_feature (8)..(8): n is a, c, g, or t
  misc_feature (24)..(24): n is a, c, g, or t
  misc_feature (63)..(63): n is a, c, g, or t
cagactgnacctaggcacctactngcaccatcctgccctgatgcacttgggttgagagagggntgcgtgtgtgtgtgtgtgtgtagagaatatgtgtggtatgtgtactgggagaggtgtcccagacctctgccagctgtggcctaattgggagaaagaggccagtggggcacctcccttctgatctggagcttcttggcctaaccttaagctactgatcagtcccatcacttcagggcaaggtgtaccagggccatggttgctaacactagctgtaccaggtcgctcaccttcaggtctgcctgcccttggccctgagtcatggacaggagtgttatgttgtcttttctcttataaaatgtaaataatggctgggcacggtggctcacgcctataatcccagcactttgggaggccaaggtgggtggatcacaaggtcaggagatcaagaccatcctggctaacacggcgaaaccccatctctactaaaaatacaaaaaattagcc

SEQ ID NO: 646274 - DNA, 375 bp, Homo sapiens
  misc_feature (1)..(1): n is a, c, g, or t
ntacatcgagctcggctaccgatgatcaaatgtgggagctggcagccagttcccacattgattttttggtgaccttgggatctagttcactttagcctccgacacgtcttgtatccatttacgacgccatcaccccgccatcaatcatttttccttccgcaccgaaccgcttaagctatttggcatctgtttaatgtccgttgcgtttggccgaaggcatgtccgaaccgttttctctgatccagcacgtgccaggaacggcgcgggattgttcacgacaggttgtatttatgcaccgcaggaatttgctcaaagcgtccatggccatcgcggcttacaccggtctctcggccagcggcctgctggccgcgcaag

SEQ ID NO: 646275 - DNA, 484 bp, Homo sapiens
aaaaattggaaatatcttgtcatttaaacataaatcatgctctttgaaaactgtctattttagggtgaatttccagtttgaggacagttttgacatagaccttaagcacaaagtttggttcaaagagagatgtacaggacatgcccaagtataggcactggcttctcaagggcctgttccagggaatctgtcatggtaaagatgacacagctttccaagatcgacacagtcattttgtcagcacagtaagtgtgtcacagtggcatgcatggacgtacctttagattctgaagtaccctgaatgtcagtgaccttcctgtttctgaccatcgcagaggccatgtcccacccattctcttcagaatctgcattctgcttttcagatgagctgtgcctccatatgtactgctggatctgtctctccactgaggaatgaagaatttggccctaatcatgttcaacatacccctaccttatttcacca

SEQ ID NO: 646276 - DNA, 231 bp, Homo sapiens
cattaaatgcaagctattactgttctgccacatgaatatttattgtttgtttgcttagatgagatccaatcctttcaaaaaaaaaaagcctaaattttgggtgaggttgtttccccagcattgtaaatccattatgtacagaaattgtttccaataaaataagattaaacttaaaagtcttgaaaatgtagacccaatggcttaagaacctgccaaaatatgaagtccata

SEQ ID NO: 646277 - DNA, 223 bp, Homo sapiens
cctcactctactgcccaataatactatcaacctactacaactaatatatgacatagctttactactatagcttttaattagtaagatacctctttacggactccactctataactcccttacaagtcccatagtctgatatcccccatcgctggcgttcaatagttacttgatcgcatatactcgttaataactagcgcggactatggatatatatatcgcct

SEQ ID NO: 646278 - DNA, 1306 bp, Homo sapiens
  misc_feature (427)..(427): n is a, c, g, or t
agcatagtgtctggggcccataacaatgcttcggcatgaatgctttagacctaagacaattggctcctaaatgtgaaaactgcaaggctgaaatgaatgcatgtttaatgccttacaacattgtcaagtgatcagctgcaactcctttctgagggcatgatgcctgagatatgcctgtaatgcgggttgattttaattaatttaatatggtgtggagtggggccttcaaaagtaaagacgtcagttctacgttggttacagggttatgggcaaaggtcttaaaaccccatggtgagcagatggccaatcctgaacaccccaattttaaaacagggctttttttccaagagactttttgaaaatagctcctattttgagaggaggaacccaggcaggagagagacagagttaagcccagctgagaggnggttggtaggcaggggcctgcctgatcctcactgaagcttggtactcagggtgagcttcctaaaccagtgcagatttgccggccactgagcctcccaaatgagaacctgcatttcaacaaggtccttgatgcagcaaagtttgagatatactgccctagaacacttcagggacaccaaggttctctgaaaacttaaggaaagggccaggttgtagtgctaatgcctggaaccttgaatttgcgatgccaaggtggccgttcattaagggcaggaggttgggaccagttgactcaacatgtggaaacccatgtttccaaaaattccaaaattacttggttcgggccggcccacgggtttatgcttggagcccagaattttggagtcccacccgccaaatccagggggccggtaatcggacccttctgggttaaacgctgaaccctggttttctaaaaccacaaaaaattcccctcctggggcatgttccttgaccccactattcggaggccttggtggaaattgcgctaaccttcgggggtcttactggtgctcattgccccatcttctccctcttgaaacatcccactttttttaaaactaatatttttgcgacaggcggttcttgatccccctctctttggtctacaccgcacattctcatctctatgcaagatacatctcagagtgcaacattaacccctctgtatgggctcctctacaacttaaccatccccttcgacaacacttccatacaattcgccctcttctcatatcaatgcgagtctctattctcctctaatcctttctttctataatatggcattatctccgtcttttactattgcgctccttctatatctctgctgttcctacttccc

SEQ ID NO: 646279 - DNA, 441 bp, Homo sapiens
  misc_feature (114)..(114): n is a, c, g, or t
  misc_feature (116)..(116): n is a, c, g, or t
aaggagacacataatggaactaatacaagcccctctcctcccctcctgttctcctccctgtcaagaggtgaacagctcatagaggactagagtccaggctgcaacacagacccnancgtccatgaaaaggatctgcatctgtgatgggaaggagaagttcaattaaaagatatcaaagggcgaaaaaaaaaaaaaaaaaaaaacaaaaaaaatttttcggccgcctggcccctgaagaaaagtttcataaaaccaatcggttgagggcagcccggccccacgatgagcatacctgaaacggggccacaagaggtgctcccagaagaagaccggggcccacggacacaggggcgggggctcccgcaccactatacaaacgcccgggggaacaccgcaacggttcgcaaccaccaaaaggcgccaggacggccacagggatca

SEQ ID NO: 646280 - DNA, 149 bp, Homo sapiens
tgcggggataacaggcatgagccaccaggccgggcctcctagggcactttcggtgggagagctgtggggttcaactctgtcttctttcaccaggccgggagaggtgcctttactggtggaccggttcaggagtttccagcaagaagagg

SEQ ID NO: 646281 - DNA, 426 bp, Homo sapiens
  misc_feature (426)..(426): n is a, c, g, or t
gagagagagaacttactggaaactggagcaaaggtcagttttgttatgcattagcaaagcacctggctgcattgtgcccctgccctagggatctgtgaaaatttgaacttgagaatgatttagcctacctggcagaataaatttctaagcagcaaagtgttcaagaagtagcctggctccttctggtacctatgttcatatgtgtgagcaaagaaatgatatgaaactggaacttatatttaaaggaaagcagagcataaaagtttggaaaatttgcagccaagccatgtgatggaaaagaaaatcccatattcaggggaggaattcaatcagcctgcagaaatttgcataactaaaaggaacactgctgatggccaagacaagggggcactttgaaggcatttcagagctttgtggcgcctctcn

SEQ ID NO: 646282 - DNA, 325 bp, Homo sapiens
ttggcacgaggggggtccccataccttgttggggaacagtccccacctgtgggcaattggcccttggggctttgttggtacatgccaaagaggggcaaggcaatcagaggggctttgtgcaatagcttttgcatccgagctcccgccagggcgtgagcatgtcagtattctagtccagtatttgccggtttccaagtaaaaggggggcaaggcaatcagaggggttttgtgcaataggttttgcatccgagctcccgccagagcgtgagcatgtcagttttttagaccggtttttgccagtttccaagtaaaagcttttgtgtta

SEQ ID NO: 646283 - DNA, 670 bp, Homo sapiens
tgcccacaccaacatggtccccctacacaaaaacaatatgcacccttcttgaataacacccaccaatggggcatttttgtaaactaatatccccccgacccctccactgtagagaacaacttggaaaacactttttacaaggaccctttcatgcggttcttcataacctcaatgacccgctttttcccaaaaaattctatactcactactgaaaccaaatatacatcatgaagaggcatgatatgacacacataaatagtcccccggcaaaataataatgggtggaacaataatagcgtgggaggaaagaaaatgagggctccaaagggagcatggtcttctcccgacaattcagcctcgtggtgttccttctatatggaggtaaacagagttagtcttctggttctcaccagcgggtgtcttcccacaaattctgtctgcggacgcagacttaaaaccgcgcttgttctttagtacgcaagactaattatcatagggcggggtgtctgtagcagtagatggagtctggtgataccacctcctgtggggaacacctctccagggagagtcgtccccaccaagagtagtaccgcccccctagtgaacgtggttaaagacacctggtgtgcaccaacaagtttttcctgagccatcactgggccacatgaca

SEQ ID NO: 646284 - DNA, 416 bp, Homo sapiens
gtgagagagacgaggcggcacactatgaggcgggatatctgctgtgggactggaggcccagaaacggtcatgtgacctgtggcggcttgagtgccgcatgggtctgagggggcgtctattcttgaggcgtttgcggcccggaaggagcggaagtgctgcgggcctctcgggtgcttcttgtcggcttgcaaacaggacttggtggctgaaattgccaagaatctcatcttggcaggagtgaaaggactgaccatgctggatcactgaaccaggtaactccagaagatcccggagctcagttcttgattcgtactgggtctgttggccgaaatagggctgacagcctcttttggagcgagctcagaatctcaacccatggtggatgtgaacggtggacactgaggatatagagaaga

SEQ ID NO: 646285 - DNA, 169 bp, Homo sapiens
aagccgtcgggagccgccgccgccatctgagggaggtaccctggaaaccacctttcacggtggggaagtgcagtcgcggtgggcagctctggggccacgaaacgggagcctctaaatcttggtcgggactgctcgcctggagccgcactcttgagtccgaggccatctt

SEQ ID NO: 646286 - DNA, 909 bp, Homo sapiens
  misc_feature (791)..(793): n is a, c, g, or t
  misc_feature (800)..(800): n is a, c, g, or t
agcgggcctgcctcttccaggctgcgtggccggggcgtcatctcgcgcttccaactgccctgtaaccaccaactgccattattccggctgggacccaggacttcaagccatgtggcgcgtcttgtttctgctcagcgggctcggcgggctgcggatggacagtaattttgatagtttacctgtgcaaattacagttccggagaaaatacggtcaataataaaggaaggaattgaatcgcaggcatcctacaaaattgtaattgaagggaaaccatatactgtgaatttaatgcaaaaaaactttttaccccataattttagagtttacagttatagtggcacaggaattatgaaaccacttgaccaagattttcagaatttctgccactaccaagggtatattgaaggttatccaaaatctgtggtgatggttagcacatgtactggactcaggggcgtactacagtttgaaaatgttagttatggaatagaacccctggagtcttcagttggctttgaacatgtaatttaccaagtaaaacataagaaagcagatgtttccttatataatgagaaggatattgaatcaagagatctgtcctttaaattacaaagcgtagagccacagcaagattttgcaaagtatatagaaatgcatgttatagttgaaaaacaattgtataatcatatggggtctgatacaactgttgtcgctcaaaaagttttccagttgattggattgacgaatgctatttcgtttcatttaactattacaattattctgtcttcannnggagctntggattagattgacgcttaaattggcaacactggagaaagtaatgaggttttccccacattttaaagaaggcaaaaattcttatcctggtgaaggtcctcatgaagtgg

SEQ ID NO: 646287 - DNA, 524 bp, Homo sapiens
  misc_feature (30)..(32): n is a, c, g, or t
  misc_feature (74)..(74): n is a, c, g, or t
  misc_feature (293)..(293): n is a, c, g, or t
  misc_feature (484)..(484): n is a, c, g, or t
atggcgcgacactcgatgtactggatttcnnnatcgctcggccgagcgcctcggtcagccggcgctgcgctggngagtagcaggcagccgtcgccagttgcggttgagcaatggcatgacgctgaaggccgatccgctgtccagcatcagcgatggggctgccggcgtactggtcatccccagcctggggctggacggcatgctcgatgccaacgggcacgagccatgtggactggatgcccgctacaccgacggtattgcattgcgccggttggccatgccggatgcccagnatctggcacgcttggttgcccacttccacgcgagcgggggcagggtgtgcgccagctgtacgggggtgctggtgctgggggaggccggattgctcgacggccgtcgtgtcaccagtcattgggcattggggggccttgctgtgtaaggcgttccacggcagggcacggttggatcccggcctgcatggtgncagaggaggggcgaccgaccacgttgccggccaacatggg

SEQ ID NO: 646288 - DNA, 832 bp, Homo sapiens
  misc_feature (261)..(261): n is a, c, g, or t
gcccgaaactcgtgcgggtaggcgtctgcgctcggttggagggctcggtgcgggctttcctgtacctgtcttctgcgcgtgtgcagttcggggacttcggcctgaccaagaccccatggcttcagaagagctacaggaaacgatctaagaaaagagggtaaaggtggtggttggcttggaaaagggctacgtagagaaaaggaggtacgttgagtgcgcctttacatgcgtgtagggaaattcgcacacgtactgtgaganctcggaagtcaaagggaagcagaggattgcacacctagaaaatcactaggataggagaaaggcaatgaaaagttctgggcattaaatgaacaagagcaagcttgctgtggggttgcttccgctataacaagcgggtctataaccgggggaagaaactcaagtaatgtatggcgatggcggatcacgtcagataaagtccgtgaaaatctacatttacgctgtaacctggaagttcagtcaaagttcccactgacgaaatgttgcaggtgcatttcacagagagtgtcattggaatctttcggtaaacgaaatctagcatgggaagatgttaactcacacttgattggtgaacaaatctcgtgtgaaagcccgatcctctggtgggaaagggcacgttctagaaataaacgtcaagactgattacaggtttcttgatactggtggtacgaagccgaaaatgtggaaaaaccgcaaggtgggggaatgacctggaccgcaggttgaacaggcagtgccaccggaacaagaagaagccctcctatgacacttggaagcaagttcctagtgaggg

SEQ ID NO: 646289 - DNA, 959 bp, Homo sapiens
ggtataggtgtatgggtgtttgtgatgtgtaggaaggggtgttggtttttagggcggtgccgaatgtagggagaggttcatggtgtgttagcgggtgtatatgatgggtgttcagtgatagggcaatgaagtaccggtttgagaggttcgtgtatacgcgtgtgtgtatgtcgcctgtgtttatgtttttaatgacaactgtagagagagatttgtgcaaagacgaagttgtgagaagtagatagatagaaatagagtatgatgtgttggattattagtggccatataaacagggcagtggtcaaaggatcctgcttgtgccaaagtaggtgttggtctgttggaacatgcactgtgatactgtcttagaagaagttgataggtgttggtagtgaaagactgtgtgtgtgttgttacaagtgtgtcttgttagagtagagattgtagaacagcagcgtggtctctgtcgctgctcattagtctgtggatagagaacgcttgaagtgcatgtcatggttgtggaaacgcaggggtatagcccttttgtatgtttgtagcgttatagaattctggggtagctgacaccttcagcaggcttaagtatatgaacactgaaggtgtttgtgctgcagcaatttgcaagctagagagcgtgtaaagcatggttaggtactaacttcacgtgattgtcagcttctgagaacgtctgtaatactggacagtgatgctattgtttatgcttacaggaaataagaggtcaacttgtagtatatttttctcgttgatacaaagaggactgtacgagaactttgtttcctgaatatttttcttctcttgtacaatatccgtgacatcctaccagtactcttgtccgtaccgggtttttgttgttttgctgttcgtgtataatagtagtctaatgattggcaaagaattgaatgtttttgaagtatacagag

SEQ ID NO: 646290 - DNA, 595 bp, Homo sapiens
  misc_feature (360)..(360): n is a, c, g, or t
ggtcccctgagccaggctctctaaccttgtgacttgtagtcgtgagtctcattcttcatctcgaaacggtctgcggggctcatgcggtcaaaggagggggggtcgttgacaggtcgggctcacatttcctctcccacagaagccccgtccagagctgctcggtgccctccaccactccatgggcgggtctgacgagtgggggtcccatactggcatcgtgggcggtggtgtctcagtgccctacattcttcggtgagctccccatatgtaagaatcacttctcattgttttggtccgctcagctaaaagaggggggtgatcaataataacggtcaaggtaataagggagcctgctatggnaactgggcagattatcggtagcagaaaacctggatgtggggaagggaatgacgtgagagtagaacttagcgggggctagttcgtccagagtctcgagtctgggggaggacctggccctttcatcttaaccaggggttgctggaatccgggctccggaagctctgcctttcgagagaaatcagcatttaggccggtgacagactcaggtgtcctgggtgtgccctccagggaatac

SEQ ID NO: 646291 - DNA, 710 bp, Homo sapiens
  misc_feature (638)..(638): n is a, c, g, or t
  misc_feature (657)..(657): n is a, c, g, or t
gcggaggtactcttatccttgtgcctagcgcagtcatggctcgtggtcccaagacgcatctgaagcgggtggcagctccaaagtcattggatgtctggataaattgactcgagtgtgtgtgctcctcgatccataccaccggctcgcccgacgagttgagagatgtgtttccccctcatcatttgaccgtgcaggaagcagacgttaacgtatgcccttgacgaggagatgaagtataacgagacatttgacatgcacgcggtgtacaaccatgagtgcgatggcaaaggtaccgaacttgacttagtaaccctaccctgtcattgcattctcgtggattgctatctccatacatgtgacaacgacgtgggaaagaggagatttccagtccttgatctacttggaccacccacaggggtctggttacgtcttgtacagtcgctccttcacaccgtgcaggtagggcacatagttcagcaagcttgctcgcaaagtgtgcacgatacacgagtctctctggtggcggccacgagaagacgggacattcccccctccaatctgttgcctgggaccttccaatttgactggccgggcgtgatgccccacttccgttcctttaccgaccgtgaatttgcgcnctgtacaattgcaatggcntgcagagatgacgtatgcctaatttgtcacgagtgtgcgcacttccctttgca

SEQ ID NO: 646292 - DNA, 614 bp, Homo sapiens
  misc_feature (13)..(13): n is a, c, g, or t
  misc_feature (68)..(68): n is a, c, g, or t
  misc_feature (187)..(187): n is a, c, g, or t
  misc_feature (198)..(198): n is a, c, g, or t
  misc_feature (285)..(286): n is a, c, g, or t
  misc_feature (306)..(306): n is a, c, g, or t
  misc_feature (388)..(388): n is a, c, g, or t
  misc_feature (430)..(430): n is a, c, g, or t
  misc_feature (453)..(453): n is a, c, g, or t
  misc_feature (580)..(580): n is a, c, g, or t
cagcctgcttatnaagcccctcttcagatatgtaccaggtgttttaaacagaggcatcatttaatggnaatctgcacttcagaacagcacttgagggaccagccattggccctccaatgtaaatacttctcatttcacattatcagagaaacagtgcagtttactaaccactccttccttataaganattcagtagcngtgaaattttttttcagtttcaaaacatttcaatactttttaattccaaagatccggcccccatgtggttgtggcattttgggagtnngtacactcgggggggaggcngtgtttaggatgaggtgggtggggtcatacttcgtatagaaacttgccagagaatatagaattattggggagattgtgaaanacttccgtgaggatgtgaactgtactccatagtccagtggtncccaatgagtggggagccttgcnttaccctggtcaggagtgtcgaaaggtgttcctttcactgcatgcaaaaatacgtacatccccagattatgtataatatttgttaaagtccaagcaacaggaacactgaagaagggaatgctgagtnagacaatatgaagcaagccaactcccaatgcata

SEQ ID NO: 646293 - DNA, 228 bp, Homo sapiens
tccgccgcccacataacagcccagcctcggcttcagcttcagacattgtgtgttttctgttctccgcgcctccctcagtgagtcttttagtgctaaaggagtttagttgtgttcgtctggaaggattggagctcctcgcctcctcctcaaactcaccttcgtttcagattaacatcaagacgcttttttattttgactgggtttcataataaagagattgacatccta

SEQ ID NO: 646294 - DNA, 163 bp, Homo sapiens
ttacatcaggaaacactgagttggtggtagcagacatagctgtggtcttgtacgtaaattgagatcctgacatgtagtgcacattgatgtatagcttgtactgaccctgggtttagacgaccagggttggtttaatacactccattctaggccaaatcaggac

SEQ ID NO: 646295 - DNA, 114 bp, Homo sapiens
tggacgttatgggaaagtagttagtgtaaaaaacatcaatcatctaaattaataaggtgatagtaaattataccttgtagttatagtatcatcatcatcctacagatcacaata

SEQ ID NO: 646296 - DNA, 474 bp, Homo sapiens
tttgtctagagtagttatgaaggaatgagagcatctttaagggcgatgttgtgtaactgctgttagtgagtaacatttggtgctgtattttctattgagtcattagtctgtttgcttatttgtaggagttctatcatatttgctagatataaagtctattatcagttataacttattgtagagatagtttactctccatctaggctatatcttataaaaatctgcaaaaaacaatgttaacttcttttccccccatttaaaaaaaaaaggtatcctgggggtttgacatgtctgtcagttttaatggtcaagtttaccaatattcctttatgggtatgagtttgggtatgtgatttatgagacgttcgttaaccggatgtatggaaaattttctctaaagtattcatgtaaagggctaagggtgggtaacagttgggttgttcacattgaggtcttaaaggcatttgaaatttt

SEQ ID NO: 646297 - DNA, 141 bp, Homo sapiens
gcgcctcgactgtacaaccaagcacaggcatgctcataaggaaaggttaaaaaaagtgaaaaggaactcggcaaatcttaccccgctctgttctaccaaaacacatcaccttctagcatcacgcagtgattagaggcaccg

SEQ ID NO: 646298 - DNA, 235 bp, Homo sapiens
aatactgctgtttcataaacctgcaagtggaagataagctgttcaataaaagccttctttcatatatgtatctatatatagtgatacagacgttattttagaggtctgttcatatacagattattttggtactacaaagttgtacacattcatcattgtatggctagaaatgaacccatactaaccagacacacagggctttccgcacttgttgtaggaaagcttccactattct

SEQ ID NO: 646299 - DNA, 4741 bp, Homo sapiens
ctcgactttttttacacatatggagacttggagattcaggttctccttagatctctctgggtaatttattagaaatgcttacatagatttgcttcctaatctcaagctggcttcccctctccacaactcagcaactatctattctcccaggaggccatacaagcgaggggccctgaagcttaacatttattaacttcatgtaaaggtctgagcggacctttcaggccaggcagcgtgtcacttgcctgtgttccttgttagggcctaccaccgggtaggtgcttggaatgtgctgtggattaaaggcttaaatcctgcgggcccctcaatctgatctaaggacatgagtggcttagagaacggcgcaacaaggctaagcgaaagaaaacaaagcggtgtggctgggagtgggctccttccctccgctggtgagggtgcgatcttagactcttgagagaacccgacataaaggccgcgttccaatggcggccttctcccctaccggccaacctgccccgaaaagagcagaaggcaccctgcgggatctgcagatcagcttgcgtctcattctggggcaccgacacggtggaatgcaagacaccccactaccggaagtttctttgatgttaagaaaaacggcggaagtaggccgcagcgcttcctcagtatagtgcctcgagctggctcgcctactttctacggtaaagggaggtgctccacatctctatgcagctgtgcagcgccgcaggttccatgcgcaggctcggttggctaaatgcgctttccagccatctttcagccacccagtcctttcccaggttctcgagccaggacgtgacgtattcagacgtactgggggcggggcctcaaggggaaaagcgcctgagccgggatatcgcgagaacatcccgttctttcgtagctctggtgctgcggctccgctctcgtcgcaacgagatctttcgagatcttctccgcccccgctaccggcgcctcctctgcggccactgagccggagccggcctgagcagcgctctcggttgcagtacccactggaaggacttaggcgctcgcgtggacaccgcaagcccctcagtagcctcggcccaagaggcctgctttccactcgctagccccgccgggggtccgtgtcctgtctcggtggccggacccgggcccgagcccgagcagtagccggcgccatgtcggtggtgggcatagacctgggcttccagagctgctacgtcgctgtggcccgcgccggcggcatcgagactatcgctaatgagtatagcgaccgctgcacgccggcttgcatttcttttggtcctaagaatcgttcaattggagcagcagctaaaagccaggtaatttctaatgcaaagaacacagtccaaggatttaaaagattccatggccgagcattctctgatccatttgtggaggcagaaaaatctaaccttgcatatgatattgtgcagttgcctacaggattaacaggtataaaggtgacatatatggaggaagagcgaaattttaccactgagcaagtgactgccatgcttttgtccaaactgaaggagacagccgaaagtgttcttaagaagcctgtagttgactgtgttgtttcggttccttgtttctatactgatgcagaaagacgatcagtgatggatgcaacacagattgctggtcttaattgcttgcgattaatgaatgaaaccactgcagttgctcttgcatatggaatctataagcaggatcttcctgccttagaagagaaaccaagaaatgtagtttttgtagacatgggccactctgcttatcaagtttctgtatgtgcatttaatagaggaaaactgaaagttctggccactgcatttgacacgacattgggaggtagaaaatttgatgaagtgttagtaaatcacttctgtgaagaatttgggaagaaatacaagctagacattaagtccaaaatccgtgcattattacgactctctcaggagtgtgagaaactcaagaaattgatgagtgcaaatgcttcagatctccctttgagcattgaatgttttatgaatgatgttgatgtatctggaactatgaatagaggcaaatttctggagatgtgcaatgatctcttagctagagtggagccaccacttcgtagtgttttggaacaaaccaagttaaagaaagaagatatttatgcagtggagatagttggtggtgctacacgaatccctgcggtaaaagagaagatcagcaaatttttcggtaaagaacttagtacaacattaaatgctgatgaagctgtcactcgaggctgtgcattgcagtgtgccatcttatcgcctgctttcaaagtcagagaattttctatcactgatgctaagaacgcagtggaggaatatgtgtatgaaatgagagacaagcttagtggtgaatatgagaagtttgtgagtgaagatgatcgtaacagttttactttgaaactggaagatactgaaaattggttgtatgaggatggagaagaccagccaaagcaagtttatgttgataagttggctgaattaaaaaatctaggtcaacctattaagatacgtttccaggaatctgaagaacgaccaaaattatttgaagaactagggaaacagatccaacagtatatgaaaataatcagctctttcaaaaacaaggaggaccagtatgatcatttggatgctgctgacatgacaaaggtagaaaaaagcacaaatgaagcaatggagtggatgaataacaagctaaatctgcagaacaagcagagtttgaccatggatccagttgtcaagtcaaaagagattgaagctaaaattaaggagctgacaagtacttgtagccctataatttcaaagcccaaacccaaagtggaacctccaaaagaggaacaaaaaaatgcagagcagaatggaccagtggatggacaaggagacaacccaggcccccaggctgctgagcagggtacagacacagctgtgccttcggattcagacaagaagcttcctgaaatggacattgattgattccaacacttgtttctattaaaacagactattataaagctttaagttgtcaactttgttctaaatatcaactagcgcaagtgaatactgaagatttcttagtcagtttttaggggattttcggggaggggaaataggtaatgtatggagcattttcacttctaaatagttagatacagaaattaagtgcattgtatctttttcataatggtactatttagaagcccagttagtcttactgagcttatgcttcactcctttatgtttaaccatgtgtctacaagaataagtttgttttggaaagttgagctatagctacagctctagctatccagcagacttttcattatgacttacatggcaggagctctaattatgctttaaaaatctgttgtggagattgctttaaatgctccctgcctggtgtggggatggggtccccctctttgtgagggctggagcatggcacggcatggattaacacggcagaggaacaaaggtgtgctctgagcttcttcatatttcaccttcaccctcacctgtgttctcttccctctctcccaataaaagggctcccattataaatgccatgtacttctcttgggaaaatagacccccttgcctagagtaagttgttaactgagggctttaaacctggaggctcttcctgaaagtatgttcatgaataccccaagcatcaaggtctaaataattttcagaagattagaattgggtagatatactgttggatatagccatggtaaatttaactgaggaattaaatccttgttaattttggtgtaaagatttgtatcctggcctgtttattcaggtgggagatgttctgtataattttgaggtatagcttgaactcctagaacaagagttaaaagttctttttagctcattcacaatcacttgtgtgttaagtgttaatatctgtcatgaacctgccaatttgtacgtgttaagcagctgacagatgatgcaaaaaaaactaagatacactggattgtactggatgagtctgaaattagtgttaaagaagtgtggtgcctgatgttataacaacacctcattcttaactgtgtggccaatgtcaggtataccaaagcattcctctgactgctttttggggcagtgttgacaggagtgaggcattttggaaactccaagggaagcctgtgtttgaggccagagttggtacctgctttaagaaactgttacagggcttgttggtaatgttttgaatctttgtaaaaattgatattctgtataacagagtgcctctctgttacttttggcctatgttgttagaaataagatgctatcttgcatagttagaattaagcgtttgtccatctctagataacattgaaaagtttgagtgttacaggctctaaagtgcaatggagaacaattgcttaggaggaggaaggggaaagtatacttatgttggtgtgtaagcatgcatggaggcctcgaggcaccacaacaaggccaggttcttagcacatcctctgttctctacctgtcatgcttcaagagttccagctggcctgctgtgaagccagtagctattttaaaagtgctggctgcaggattaagccaaccctttacaactggcccagaccgtaatggccatttcttcttaaaaaaaaacatctgggttttta

SEQ ID NO: 646300 - DNA, 711 bp, Homo sapiens
  misc_feature (1)..(1): n is a, c, g, or t
ncttggcgagagctccaccgctgatgccaacgaggccatttttttttttcttttggaacacaccccctcagataaggggggactactgtattactttttcaaaataaacaaggaaaaaagaccaggcaaggtccaagacattctagggcttctagttaattgcggaaggcaattcatcacaaaaacagatatatcagtcaattctgtgcaccagatccagatatgaggatcacggttattaggtagtttcaatgagggagtggaggaatgactcttccaggagtccaattcacttgcttcaaaagggcagtctctatcggctagtcctgggatgtgggcctggtcccacaggctgccagcagccaaagctaacaggctacagacgaacaaaggttcattgaggagctggcacgcgggaggggccactgccaatggcttgacaggaggggcagtatgcatgtcgggccacctgcccgagcagagagtctcctatggaggaaccccagggggtttcaggtcctgctccatcctcctcgtggatctcttggcatcttttttcttacattcaaagaacatcctgttggagaagtaggatccgagggctgtggcgggaaggctggtgcacactccagtgtgcgagtgttcgagtgcctgcaggtgctccgcccacatgcgtgccagcttgtttgtgagggtgtatgtttgtctttt

SEQ ID NO: 646301 - DNA, 495 bp, Homo sapiens
agatagacagccaggtaacttgagtggacctgtggacaccatcatgtcacaagcctgaaaaaaatgtttatgtctgctttttaaatatattatacttacatgtgcacatgtgtgcatatacattcaaaatttgcattgcataaattgtttatttaactaataagactactactattaagaaaatgcattcttccttcacagtgtgttacgaacttggctaattgtactaatgttgtgtcctaattgcttacatggaagtactgctgagaagaccattttgatcacttggcaggttcttcacacttgagatggggtctggcttccgagggactgtgttgcagactggtgatcaacgttttttggcaaaactggccagcttttgcctggtgcctgcttactttccctgaagttcaccccttcttctttgtggcccttcttttaccccccatttaaaaaaaaacctcgcccccaatttcttcggcctcgggggcccaa

SEQ ID NO: 646302 - DNA, 3492 bp, Homo sapiens
ctcgactttttttacacatatggagacttggagattcaggttctccttagatctctctgggtaatttattagaaatgcttacatagatttgcttcctaatctcaagctggcttcccctctccacaactcagcaactatctattctcccaggaggccatacaagcgaggggccctgaagcttaacatttattaacttcatgtaaaggtctgagcggacctttcaggccaggcagcgtgtcacttgcctgtgttccttgttagggcctaccaccgggtaggtgcttggaatgtgctgtggattaaaggcttaaatcctgcgggcccctcaatctgatctaaggacatgagtggcttagagaacggcgcaacaaggctaagcgaaagaaaacaaagcggtgtggctgggagtgggctccttccctccgctggtgagggtgcgatcttagactcttgagagaacccgacataaaggccgcgttccaatggcggccttctcccctaccggccaacctgccccgaaaagagcagaaggcaccctgcgggatctgcagatcagcttgcgtctcattctggggcaccgacacggtggaatgcaagacaccccactaccggaagtttctttgatgttaagaaaaacggcggaagtaggccgcagcgcttcctcagtatagtgcctcgagctggctcgcctactttctacggtaaagggaggtgctccacatctctatgcagctgtgcagcgccgcaggttccatgcgcaggctcggttggctaaatgcgctttccagccatctttcagccacccagtcctttcccaggttctcgagccaggacgtgacgtattcagacgtactgggggcggggcctcaaggggaaaagcgcctgagccgggatatcgcgagaacatcccgttctttcgtagctctggtgctgcggctccgctctcgtcgcaacgagatctttcgagatcttctccgcccccgctaccggcgcctcctctgcggccactgagccggagccggcctgagcagcgctctcggttgcagtacccactggaaggacttaggcgctcgcgtggacaccgcaagcccctcagtagcctcggcccaagaggcctgctttccactcgctagccccgccgggggtccgtgtcctgtctcggtggccggacccgggcccgagcccgagcagtagccggcgccatgtcggtggtgggcatagacctgggcttccagagctgctacgtcgctgtggcccgcgccggcggcatcgagactatcgctaatgagtatagcgaccgctgcacgccggcttgcatttcttttggtcctaagaatcgttcaattggagcagcagctaaaagccaggtaatttctaatgcaaagaacacagtccaaggatttaaaagattccatggccgagcattctctgatccatttgtggaggcagaaaaatctaaccttgcatatgatattgtgcagttgcctacaggattaacaggtataaaggtgacatatatggaggaagagcgaaattttaccactgagcaagtgactgccatgcttttgtccaaactgaaggagacagccgaaagtgttcttaagaagcctgtagttgactgtgttgtttcggttccttgtttctatactgatgcagaaagacgatcagtgatggatgcaacacagattgctggtcttaattgcttgcgattaatgaatgaaaccactgcagttgctcttgcatatggaatctataagcaggatcttcctgccttagaagagaaaccaagaaatgtagtttttgtagacatgggccactctgcttatcaagtttctgtatgtgcatttaatagaggaaaactgaaagttctggccactgcatttgacacgacattgggaggtagaaaatttgatgaagtgttagtaaatcacttctgtgaagaatttgggaagaaatacaagctagacattaagtccaaaatccgtgcattattacgactctctcaggagtgtgagaaactcaagaaattgatgagtgcaaatgcttcagatctccctttgagcattgaatgttttatgaatgatgttgatgtatctggaactatgaatagaggcaaatttctggagatgtgcaatgatctcttagctagagtggagccaccacttcgtagtgttttggaacaaaccaagttaaagaaagaagatatttatgcagtggagatagttggtggtgctacacgaatccctgcggtaaaagagaagatcagcaaatttttcggtaaagaacttagtacaacattaaatgctgatgaagctgtcactcgaggctgtgcattgcagtgtgccatcttatcgcctgctttcaaagtcagagaattttctatcactgatgtagtaccatatccaatatctctgagatggaattctccagctgaagaagggtcaagtgactgtgaagtcttttccaaaaatcatgctgctcctttctctaaagttcttacattttatagaaaggaacctttcactcttgaggcctactacagctctcctcaggatttgccctatccagatcctgctatagctcagttttcagttcagaaagtcactcctcagtctgatggctccagttcaaaagtgaaagtcaaagttcgagtaaatgtccatggcattttcagtgtgtccagtgcatctttagtggaggttcacaagtctgaggaaaatgaggagccaatggaaacagatcagaatgcaaaggaggaagagaagatgcaagtggaccaggaggaaccacatgttgaagagcaacagcagcagacaccagcagaaaataaggcagagtctgaagaaatggagacctctcaagctggatccaaggataaaaagatggaccaaccaccccaagccaagaaggcaaaagtgaagaccagtactgtggacctgccaatcgagaatcagctattatggcagatagacagagagatgctcaacttgtacattgaaaatgagggtaagatgatcatgcaggataaactggagaaggagcggaatgatgctaagaacgcagtggaggaatatgtgtatgaaatgagagacaagcttagtggtgaatatgagaagtttgtgagtgaagatgatcgtaacagttttactttgaaactggaagatactgaaaattggttgtatgaggatggagaagaccagccaaagcaagtttatgttgataagttggctgaattaaaaaatctaggtcaacctattaagatacgtttccaggaatctgaagaacgaccaaaattatttgaagaactagggaaacagatccaacagtatatgaaaataatcagctctttcaaaaacaaggaggaccagtatgatcatttggatgctgctgacatgacaaaggtagaaaaaagcacaaatgaagcaatggagtggatgaataacagctaatctcagacagcgagttgcctagtccaatcctttaaccgcctaa

SEQ ID NO: 646303 - DNA, 1440 bp, Homo sapiens
  misc_feature (1)..(1): n is a, c, g, or t
  misc_feature (907)..(907): n is a, c, g, or t
  misc_feature (1235)..(1235): n is a, c, g, or t
ntttctgcagtcctcgtgtcgctcatctttcttgctcgtctttgctttctctggtcgtcgtctacttcttccatcgttgattgtctacgctgtgttctgctttggtggtgcttcgtgtgtcggtctgttcctgccctctccttcgggtttttcctcttgtgttcccccctccgcggtcgcttgtcctcttttactgcctttcccccctttttgggacttttctgtccgtgtttttctccctcgcggtaaaggtgccgcctttcacacgggtatacccttgtttgaacacgcccccagggggcccttggccgcggtatctcatccgtgggccccttccccaagttgggctgtgaaagcattgtggatgtcttcccccattctggtgttcccatttaggggggacctttcccctggtggtgatatccactccggttgggtcttttgtggaatttttgaggtgttatactcctcttgggggtacccttccctcggacccagacttttgaggaagttatctttgtagggaaccaagcgccggagtccgtgttcgcccagtattggaggttacccaaaggtcctgggttccccggttctctgtccaggataaagggcccataggtattttatgatgccctttttcgcccccccctgtacccccctaccccccggatgtccccgtcctcgttcttagtcgtatagcttgtgcctgtgccaccagagaccccgctgggctctccacgggagcactgtagcccaacttcacttctccactcttctgcgccacgctctttataaggaggttttccctcgcacgttcccgccctcgagagggctttctttcgcgcacaaattggtatgccactcggggcacccctccacgagtttttttgtttgtgttataaatggngccacttccctcttctcttctcggtccacgagaaccccccgggttccccactcgggcccccacaccgaagagactctatatgtgtggtttctctctaatggaggagatctctataaagtatatgagggcgcttataggacacacctatattttataattatattgttttataatcttattttaaatatatgttataaatatatgtggagaagctcgaggtgtataatcttatatgtataagtcactaattgtattaattgttgtttaagaaagtgatcccccctctgggaaacccactctttatatgtatattatagttttgtagaantatataatggagaagtgggctaatgcacgctttgtatatcccttgtttcacgagccacgatcacttttcttggagaagtgtaaggcttatcctccaataaaatggctaaacttaatacactatttttataagaaatatttatattgtatttatataaagtataaatggtttttatacccataaatggcctttttaaaaattccca

SEQ ID NO: 646304 - DNA, 3778 bp, Homo sapiens
  misc_feature (3613)..(3613): n is a, c, g, or t
  misc_feature (3622)..(3622): n is a, c, g, or t
ctcgactttttttacacatatggagacttggagattcaggttctccttagatctctctgggtaatttattagaaatgcttacatagatttgcttcctaatctcaagctggcttcccctctccacaactcagcaactatctattctcccaggaggccatacaagcgaggggccctgaagcttaacatttattaacttcatgtaaaggtctgagcggacctttcaggccaggcagcgtgtcacttgcctgtgttccttgttagggcctaccaccgggtaggtgcttggaatgtgctgtggattaaaggcttaaatcctgcgggcccctcaatctgatctaaggacatgagtggcttagagaacggcgcaacaaggctaagcgaaagaaaacaaagcggtgtggctgggagtgggctccttccctccgctggtgagggtgcgatcttagactcttgagagaacccgacataaaggccgcgttccaatggcggccttctcccctaccggccaacctgccccgaaaagagcagaaggcaccctgcgggatctgcagatcagcttgcgtctcattctggggcaccgacacggtggaatgcaagacaccccactaccggaagtttctttgatgttaagaaaaacggcggaagtaggccgcagcgcttcctcagtatagtgcctcgagctggctcgcctactttctacggtaaagggaggtgctccacatctctatgcagctgtgcagcgccgcaggttccatgcgcaggctcggttggctaaatgcgctttccagccatctttcagccacccagtcctttcccaggttctcgagccaggacgtgacgtattcagacgtactgggggcggggcctcaaggggaaaagcgcctgagccgggatatcgcgagaacatcccgttctttcgtagctctggtgctgcggctccgctctcgtcgcaacgagatctttcgagatcttctccgcccccgctaccggcgcctcctctgcggccactgagccggagccggcctgagcagcgctctcggttgcagtacccactggaaggacttaggcgctcgcgtggacaccgcaagcccctcagtagcctcggcccaagaggcctgctttccactcgctagccccgccgggggtccgtgtcctgtctcggtggccggacccgggcccgagcccgagcagtagccggcgccatgtcggtggtgggcatagacctgggcttccagagctgctacgtcgctgtggcccgcgccggcggcatcgagactatcgctaatgagtatagcgaccgctgcacgccggcttgcatttcttttggtcctaagaatcgttcaattggagcagcagctaaaagccaggtaatttctaatgcaaagaacacagtccaaggatttaaaagattccatggccgagcattctctgatccatttgtggaggcagaaaaatctaaccttgcatatgatattgtgcagttgcctacaggattaacaggtataaaggtgacatatatggaggaagagcgaaattttaccactgagcaagtgactgccatgcttttgtccaaactgaaggagacagccgaaagtgttcttaagaagcctgtagttgactgtgttgtttcggttccttgtttctatactgatgcagaaagacgatcagtgatggatgcaacacagattgctggtcttaattgcttgcgattaatgaatgaaaccactgcagttgctcttgcatatggaatctataagcaggatcttcctgccttagaagagaaaccaagaaatgtagtttttgtagacatgggccactctgcttatcaagtttctgtatgtgcatttaatagaggaaaactgaaagttctggccactgcatttgacacgacattgggaggtagaaaatttgatgaagtgttagtaaatcacttctgtgaagaatttgggaagaaatacaagctagacattaagtccaaaatccgtgcattattacgactctctcaggagtgtgagaaactcaagaaattgatgagtgcaaatgcttcagatctccctttgagcattgaatgttttatgaatgatgttgatgtatctggaactatgaatagaggcaaatttctggagatgtgcaatgatctcttagctagagtggagccaccacttcgtagtgttttggaacaaaccaagttaaagaaagaagatatttatgcagtggagatagttggtggtgctacacgaatccctgcggtaaaagagaagatcagcaaatttttcggtaaagaacttagtacaacattaaatgctgatgaagctgtcactcgaggctgtgcattgcagtgtgccatcttatcgcctgctttcaaagtcagagaattttctatcactgatgtagtaccatatccaatatctctgagatggaattctccagctgaagaagggtcaagtgactgtgaagtcttttccaaaaatcatgctgctcctttctctaaagttcttacattttatagaaaggaacctttcactcttgaggcctactacagctctcctcaggatttgccctatccagatcctgctatagctcagttttcagttcagaaagtcactcctcagtctgatggctccagttcaaaagtgaaagtcaaagttcgagtaaatgtccatggcattttcagtgtgtccagtgcatctttagtggaggttcacaagtctgaggaaaatgaggagccaatggaaacagatcagaatgcaaaggaggaagagaagatgcaagtggaccaggaggaaccacatgttgaagagcaacagcagcagacaccagcagaaaataaggcagagtctgaagaaatggagacctctcaagctggatccaaggataaaaagatggaccaaccaccccaagccaagaaggcaaaagtgaagaccagtactgtggacctgccaatcgagaatcagctattatggcagatagacagagagatgctcaacttgtacattgaaaatgagggtaagatgatcatgcaggataaactggagaaggagcggaatgatgctaagaacgcagtggaggaatatgtgtatgaaatgagagacaagcttagtggtgaatatgagaagtttgtgagtgaagatgatcgtaacagttttactttgaaactggaagatactgaaaattggttgtatgaggatggagaagaccagccaaagcaagtttatgttgataagttggctgaattaaaaaatctaggtcaacctattaagatacgtttccaggaatctgaagaacgaccaaaattatttgaagaactagggaaacagatccaacagtatatgaaaataatcagctctttcaaaaacaaggaggaccagtatgatcatttggatgctgctgacatgacaaaggtagaaaaaagcacaaatgaagcaatggagtggatccaaggataaaaagatggaccaaccaccccaagccaagaaggcaaaagtgaagaccagtactgtggacctgccaatcgagaatcagctattatggcagatagacagagagatgctcaacttgtacattgaaaatgagggtaagatgatcatgcaggataaactggagaaggagcggnatgatgctnagaacgcagtgcaggagtatgtgtgcgactatctgaaaggttaatattaaacatagcatgctggcaataccctgctgtgtattggcgcactcggcaatttcaacatccgctctatcgaatacagacgatgacttactctaattttgaacatttcat

SEQ ID NO: 646305 - DNA, 342 bp, Homo sapiens
tatcatactcatcatcatcatctatcacatagctcactccagtataatataccactgctcttggggattagtacgctacagataaaaagtgaccactatcgacgatctgcagcaaaggatagcttcagcatcatcatccagatctccactctcaggaacttcaggcggggcaaaaaagtataagacagcgtcataggaaacagtatatagtcacagaacgaacagacccacgtccctatgtgtatacaagataactatgaaatagtatatcaaagtgacatatctttaccttttatccaatctatctaggaaccctgtaacaacacccataattaactaggt

SEQ ID NO: 646306 - DNA, 946 bp, Homo sapiens
ctgccgctctttcggggcgtgttccgcttttgtgcgccccctcgggggggcggtggggtgtgttcgtggcggccgggcgcgattcttctcgttcgtgtgttggcgtgttcgctcttctttgtgggggcgaccgctctgttgttgcgctgtgtccttggttgttttaatcttccgccacgtggtggggtgaaggtgcgactcagtgtgtggtggtttaacctcgttggtggttagccgttttcgcttctgtcttgtgtctctcgtggatgagtacttcgcggagaggtgcgcgggttgttgtgggggtcctccttttgtgtggtgggcgcagtgcccgcgctttggtattgtggtgcgattgcggtatgctcttggcggggggtctcgttggggttgtcggccgctcgttcgttcgtgtttctcgaggtgtgggttataacgccgttgtttttctttgtgtgtattgtctctcagtgttttactcccctgtttgttgattttgtttgtgatttatgtccgtttttctggccctcagtgggtgccgggtggtgcgcgcaccacgcgccttggtagttgtgctcgcggcccgctttgtggggtgtgccctccataggggccgcgtgtggcccccttgtgaggtgtcctgtagttttgtgtaggccttttgcccgtggctcgccctctgtgcgcctatcctccactgttgcccgcttgttgaaatattctcctctccgttttgtcgtgggggcctgtggtttgggtggggccgcccggtgaaatgcgtggcctcttttgggaggtggttgggtatcaagaaggtattctcccttgcgtcgccacgggggccacagcaggagttcctcgctgtcacttgtaggggttgttggccctacggctcgcttctccatcctcgtgggtgcccgcgctcgagcgactcccactccac

SEQ ID NO: 646307 - DNA, 383 bp, Homo sapiens
aggatccctactgtgctgctggagaagtatctttggaaggtatgtagccattaactgtaatgcttcttttcatgaccttattgaattacaccaaactggctgtagcagtaaattttggccagttagtggctctggctaaccattcccaaattatctcttagaaactggtcactggttgtcccacagtgcctaaagagtttggctataacggttgccgtatgaccatacagaattccgtactgcatcctttgtgtcttttagaatcctgaggtcctgtattattggtttcgtattaagaactgcgagatgtaactccaatagcccatttccaccaactttaaaatttttaatccatatttccaaagtcctggtcccttaaggct

SEQ ID NO: 646308 - DNA, 2559 bp, Homo sapiens
tgaggtgactagagttccccaacagaacacctgtcaagcaactgaacacccgaaagcaagaaggcaaaagtgaagaccagtactgtggacctgccaatcgagaatcagctattatggcagatagacagagagatgctcaacttgtacattgaaaatgagggtaagatgatcatgcaggataaactggagaaggagcggaatgatggatgctaagaacgcagtggaggaatatgtgtatgaaatgagagacaagcttagtggtgaatatgagaagtttgtgagtgaagatgatcgtaacagttttactttgaaactggaagatactgaaaattggttgtatgaggatggagaagaccagccaaagcaagtttatgttgataagttggctgaattaaaaaatctaggtcaacctattaagatacgtttccaggaatctgaagaacgaccaaaattatttgaagaactagggaaacagatccaacagtatatgaaaataatcagctctttcaaaaacaaggaggaccagtatgatcatttggatgctgctgacatgacaaaggtagaaaaaagcacaaatgaagcaatggagtggatgaataacaagctaaatctgcagaacaagcagagtttgaccatggatccagttgtcaagtcaaaagagattgaagctaaaattaaggagctgacaagtacttgtagccctataatttcaaagcccaaacccaaagtggaacctccaaaagaggaacaaaaaaatgcagagcagaatggaccagtggatggacaaggagacaacccaggcccccaggctgctgagcagggtacagacacagctgtgccttcggattcagacaagaagcttcctgaaatggacattgattgattccaacacttgtttctattaaaacagactattataaagctttaagttgtcaactttgttctaaatatcaactagcgcaagtgaatactgaagatttcttagtcagtttttaggggattttcggggaggggaaataggtaatgtatggagcattttcacttctaaatagttagatacagaaattaagtgcattgtatctttttcataatggtactatttagaagcccagttagtcttactgagcttatgcttcactcctttatgtttaaccatgtgtctacaagaataagtttgttttggaaagttgagctatagctacagctctagctatccagcagacttttcattatgacttacatggcaggagctctaattatgctttaaaaatctgttgtggagattgctttaaatgctccctgcctggtgtggggatggggtccccctctttgtgagggctggagcatggcacggcatggattaacacggcagaggaacaaaggtgtgctctgagcttcttcatatttcaccttcaccctcacctgtgttctcttccctctctcccaataaaagggctcccattataaatgccatgtacttctcttgggaaaatagacccccttgcctagagtaagttgttaactgagggctttaaacctggaggctcttcctgaaagtatgttcatgaataccccaagcatcaaggtctaaataattttcagaagattagaattgggtagatatactgttggatatagccatggtaaatttaactgaggaattaaatccttgttaattttggtgtaaagatttgtatcctggcctgtttattcaggtgggagatgttctgtataattttgaggtatagcttgaactcctagaacaagagttaaaagttctttttagctcattcacaatcacttgtgtgttaagtgttaatatctgtcatgaacctgccaatttgtacgtgttaagcagctgacagatgatgcaaaaaaaactaagatacactggattgtactggatgagtctgaaattagtgttaaagaagtgtggtgcctgatgttataacaacacctcattcttaactgtgtggccaatgtcaggtataccaaagcattcctctgactgctttttggggcagtgttgacaggagtgaggcattttggaaactccaagggaagcctgtgtttgaggccagagttggtacctgctttaagaaactgttacagggcttgttggtaatgttttgaatctttgtaaaaattgatattctgtataacagagtgcctctctgttacttttggcctatgttgttagaaataagatgctatcttgcatagttagaattaagcgtttgtccatctctagataacattgaaaagtttgagtgttacaggctctaaagtgcaatggagaacaattgcttaggaggaggaaggggaaagtatacttatgttggtgtgtaagcatgcatggaggcctcgaggcaccacaacaaggccaggttcttagcacatcctctgttctctacctgtcatgcttcaagagttccagctggcctgctgtgaagccagtagctattttaaaagtgctggctgcaggattaagccaaccctttacaactggcccagaccgtaatggccatttcttcttaaaaaaaaacatctgggttttta

SEQ ID NO: 646309 - DNA, 1310 bp, Homo sapiens
tggggaaaaaaaaaaaattcttttttttctatggggggggggggggccgcgctgtcccccccctccaaatatctctgggagaagcggttttgtgggggcgcgcgcggcctctctgtgtggtcctcgtggcccgtcgtgttgaacgcgcccgtgtgttgtgtgccagagagagggcgggttcccccccgcgtgtggggagcgagtgttctcccgcgcgatgtgcgggagagtctccctcctaagagcgcgaggggaacacgaggtgtgtctccagaaatgtgtgttttggggggggcacttctctctagaagagcggggtggaactgtggggagagatgtgtgatggggaagaaaatatttctcgggggaggataacaaggtgcgctcctccgggattctcttctctctctgtgtggggcccccccccacaagaagagagatatctcccccctcacagagaggggagccactatatctcccgaggagagggggggtatatattgtgtgggagagagagtagaggaggcgcgcccctctaaagagaccctctctctgtgaggggttcttttgtggaacccccaaacaagaggatttatttgtgtgtgagaacccccggggggagaaatatctcctcttgtggagcgcgagatatcactccccccgagagggaagagccccccctctgcgaggggggaggaggagaaagagtgagggcggcggggagtcaaactcggaggagagaaggacccgccctacaacaatcgggaaagaggtccgcccccaaatcctcccgcggagaaaagcagagaagacaacaccaacatctatctctctcgccgcggcgacggtttatcttcacctcagtctatcttctattacttcggaggggacgccctctaataaataacaaaatactcttcttagagggaggagggggcaccacctcgtggggtattatctctcgacacaacctctctcagtactactttaggaggaggggcgcttctatattaaaaaacactaccctccactaggtgtattgtagcaaacgtataaactagctgggctgctcgctcacccacaaaaatcttttgtttttaattaggtgcgcgccccccttacaagaaagatagataaccctcgctgtgggggggcgcgtccccaataaaaaatagagagggattgtctgcacacccccgtttcttcaggggggacggagcagtttatataatagaagcggggcgcgaaagtaatgtaccccctcctcctattgaagacaagaggtgtctcctctcatctcctctcctaaa

SEQ ID NO: 646310 - DNA, 2817 bp, Homo sapiens
  misc_feature (63)..(63): n is a, c, g, or t
cgactcttgagatcccccatgtacctcctcagtctgatgctccagttcaaaagtgaaagtcanagttcgagtaaatgtccatggcattttcaggtgccagtgcatctttagtggaggtcacaagtctgaggaaaatgaggagccaatggaaacagatcagaatgcaaaggaggaagagaagatgcaagtggaccaggaggaaccacatgttgaagagcaacagcagcagacaccagcagaaaataaggcagagtctgaagaaatggagacctctcaagctggatccaaggataaaaagatggaccaaccaccccaagccaagaaggcaaaagtgaagaccagtactgtggacctgccaatcgagaatcagctattatggcagatagacagagagatgctcaacttgtacattgaaaatgagggtaagatgatcatgcaggataaactggagaaggagcggaatgatgctaagaacgcagtggaggaatatgtgtatgaaatgagagacaagcttagtggtgaatatgagaagtttgtgagtgaagatgatcgtaacagttttactttgaaactggaagatactgaaaattggttgtatgaggatggagaagaccagccaaagcaagtttatgttgataagttggctgaattaaaaaatctaggtcaacctattaagatacgtttccaggaatctgaagaacgaccaaaattatttgaagaactagggaaacagatccaacagtatatgaaaataatcagctctttcaaaaacaaggaggaccagtatgatcatttggatgctgctgacatgacaaaggtagaaaaaagcacaaatgaagcaatggagtggatgaataacaagctaaatctgcagaacaagcagagtttgaccatggatccagttgtcaagtcaaaagagattgaagctaaaattaaggagctgacaagtacttgtagccctataatttcaaagcccaaacccaaagtggaacctccaaaagaggaacaaaaaaatgcagagcagaatggaccagtggatggacaaggagacaacccaggcccccaggctgctgagcagggtacagacacagctgtgccttcggattcagacaagaagcttcctgaaatggacattgattgattccaacacttgtttctattaaaacagactattataaagctttaagttgtcaactttgttctaaatatcaactagcgcaagtgaatactgaagatttcttagtcagtttttaggggattttcggggaggggaaataggtaatgtatggagcattttcacttctaaatagttagatacagaaattaagtgcattgtatctttttcataatggtactatttagaagcccagttagtcttactgagcttatgcttcactcctttatgtttaaccatgtgtctacaagaataagtttgttttggaaagttgagctatagctacagctctagctatccagcagacttttcattatgacttacatggcaggagctctaattatgctttaaaaatctgttgtggagattgctttaaatgctccctgcctggtgtggggatggggtccccctctttgtgagggctggagcatggcacggcatggattaacacggcagaggaacaaaggtgtgctctgagcttcttcatatttcaccttcaccctcacctgtgttctcttccctctctcccaataaaagggctcccattataaatgccatgtacttctcttgggaaaatagacccccttgcctagagtaagttgttaactgagggctttaaacctggaggctcttcctgaaagtatgttcatgaataccccaagcatcaaggtctaaataattttcagaagattagaattgggtagatatactgttggatatagccatggtaaatttaactgaggaattaaatccttgttaattttggtgtaaagatttgtatcctggcctgtttattcaggtgggagatgttctgtataattttgaggtatagcttgaactcctagaacaagagttaaaagttctttttagctcattcacaatcacttgtgtgttaagtgttaatatctgtcatgaacctgccaatttgtacgtgttaagcagctgacagatgatgcaaaaaaaactaagatacactggattgtactggatgagtctgaaattagtgttaaagaagtgtggtgcctgatgttataacaacacctcattcttaactgtgtggccaatgtcaggtataccaaagcattcctctgactgctttttggggcagtgttgacaggagtgaggcattttggaaactccaagggaagcctgtgtttgaggccagagttggtacctgctttaagaaactgttacagggcttgttggtaatgttttgaatctttgtaaaaattgatattctgtataacagagtgcctctctgttacttttggcctatgttgttagaaataagatgctatcttgcatagttagaattaagcgtttgtccatctctagataacattgaaaagtttgagtgttacaggctctaaagtgcaatggagaacaattgcttaggaggaggaaggggaaagtatacttatgttggtgtgtaagcatgcatggaggcctcgaggcaccacaacaaggccaggttcttagcacatcctctgttctctacctgtcatgcttcaagagttccagctggcctgctgtgaagccagtagctattttaaaagtgctggctgcaggattaagccaaccctttacaactggcccagaccgtaatggccatttcttcttaaaaaaaaacatctgggttttta

SEQ ID NO: 646311 - DNA, 424 bp, Homo sapiens
  misc_feature (365)..(365): n is a, c, g, or t
gtctatgctcgattggcattggatgatcgtaaacacaatcgattaaaactggtaagactcggcaggtattgcataatagttacattccacaatatatcctatcaaatatcactcttgtattggacacgagtcctcctctagacctcgaactgcagtcttgaccagacttgccctgggacactgccgatgtaagtacggcagtgacttgcaaaccactgtccgaacctatgggacagccttgggatgttccatattgtcatttctttttcaagccatacaaagttcaactttatagcaaatggcagcacataaattcatttctgagtagtaaaagtattccccatacaggtgaccagtccatctgnaccatcttaagatgggtcagatggaaccaattttgacgccatctccattacccatttgg

SEQ ID NO: 646312 - DNA, 2423 bp, Homo sapiens
aggtgttctagaggatcccgtagaggttactagaagtgtgaaaacgtaggttggattaaggcgacagcgatttctaagaacgcagtggaggaatatgtgtatgaaatgagagacaagcttagtggtgaatatgagaagtttgtgagtgaagatgatcgtaacagttttactttgaaactggaagatactgaaaattggttgtatgaggatggagaagaccagccaaagcaagtttatgttgataagttggctgaattaaaaaatctaggtcaacctattaagatacgtttccaggaatctgaagaacgaccaaaattatttgaagaactagggaaacagatccaacagtatatgaaaataatcagctctttcaaaaacaaggaggaccagtatgatcatttggatgctgctgacatgacaaaggtagaaaaaagcacaaatgaagcaatggagtggatgaataacaagctaaatctgcagaacaagcagagtttgaccatggatccagttgtcaagtcaaaagagattgaagctaaaattaaggagctgacaagtacttgtagccctataatttcaaagcccaaacccaaagtggaacctccaaaagaggaacaaaaaaatgcagagcagaatggaccagtggatggacaaggagacaacccaggcccccaggctgctgagcagggtacagacacagctgtgccttcggattcagacaagaagcttcctgaaatggacattgattgattccaacacttgtttctattaaaacagactattataaagctttaagttgtcaactttgttctaaatatcaactagcgcaagtgaatactgaagatttcttagtcagtttttaggggattttcggggaggggaaataggtaatgtatggagcattttcacttctaaatagttagatacagaaattaagtgcattgtatctttttcataatggtactatttagaagcccagttagtcttactgagcttatgcttcactcctttatgtttaaccatgtgtctacaagaataagtttgttttggaaagttgagctatagctacagctctagctatccagcagacttttcattatgacttacatggcaggagctctaattatgctttaaaaatctgttgtggagattgctttaaatgctccctgcctggtgtggggatggggtccccctctttgtgagggctggagcatggcacggcatggattaacacggcagaggaacaaaggtgtgctctgagcttcttcatatttcaccttcaccctcacctgtgttctcttccctctctcccaataaaagggctcccattataaatgccatgtacttctcttgggaaaatagacccccttgcctagagtaagttgttaactgagggctttaaacctggaggctcttcctgaaagtatgttcatgaataccccaagcatcaaggtctaaataattttcagaagattagaattgggtagatatactgttggatatagccatggtaaatttaactgaggaattaaatccttgttaattttggtgtaaagatttgtatcctggcctgtttattcaggtgggagatgttctgtataattttgaggtatagcttgaactcctagaacaagagttaaaagttctttttagctcattcacaatcacttgtgtgttaagtgttaatatctgtcatgaacctgccaatttgtacgtgttaagcagctgacagatgatgcaaaaaaaactaagatacactggattgtactggatgagtctgaaattagtgttaaagaagtgtggtgcctgatgttataacaacacctcattcttaactgtgtggccaatgtcaggtataccaaagcattcctctgactgctttttggggcagtgttgacaggagtgaggcattttggaaactccaagggaagcctgtgtttgaggccagagttggtacctgctttaagaaactgttacagggcttgttggtaatgttttgaatctttgtaaaaattgatattctgtataacagagtgcctctctgttacttttggcctatgttgttagaaataagatgctatcttgcatagttagaattaagcgtttgtccatctctagataacattgaaaagtttgagtgttacaggctctaaagtgcaatggagaacaattgcttaggaggaggaaggggaaagtatacttatgttggtgtgtaagcatgcatggaggcctcgaggcaccacaacaaggccaggttcttagcacatcctctgttctctacctgtcatgcttcaagagttccagctggcctgctgtgaagccagtagctattttaaaagtgctggctgcaggattaagccaaccctttacaactggcccagaccgtaatggccatttcttcttaaaaaaaaacatctgggttttta

SEQ ID NO: 646313 - DNA, 3325 bp, Homo sapiens
ctcgactttttttacacatatggagacttggagattcaggttctccttagatctctctgggtaatttattagaaatgcttacatagatttgcttcctaatctcaagctggcttcccctctccacaactcagcaactatctattctcccaggaggccatacaagcgaggggccctgaagcttaacatttattaacttcatgtaaaggtctgagcggacctttcaggccaggcagcgtgtcacttgcctgtgttccttgttagggcctaccaccgggtaggtgcttggaatgtgctgtggattaaaggcttaaatcctgcgggcccctcaatctgatctaaggacatgagtggcttagagaacggcgcaacaaggctaagcgaaagaaaacaaagcggtgtggctgggagtgggctccttccctccgctggtgagggtgcgatcttagactcttgagagaacccgacataaaggccgcgttccaatggcggccttctcccctaccggccaacctgccccgaaaagagcagaaggcaccctgcgggatctgcagatcagcttgcgtctcattctggggcaccgacacggtggaatgcaagacaccccactaccggaagtttctttgatgttaagaaaaacggcggaagtaggccgcagcgcttcctcagtatagtgcctcgagctggctcgcctactttctacggtaaagggaggtgctccacatctctatgcagctgtgcagcgccgcaggttccatgcgcaggctcggttggctaaatgcgctttccagccatctttcagccacccagtcctttcccaggttctcgagccaggacgtgacgtattcagacgtactgggggcggggcctcaaggggaaaagcgcctgagccgggatatcgcgagaacatcccgttctttcgtagctctggtgctgcggctccgctctcgtcgcaacgagatctttcgagatcttctccgcccccgctaccggcgcctcctctgcggccactgagccggagccggcctgagcagcgctctcggttgcagtacccactggaaggacttaggcgctcgcgtggacaccgcaagcccctcagtagcctcggcccaagaggcctgctttccactcgctagccccgccgggggtccgtgtcctgtctcggtggccggacccgggcccgagcccgagcagtagccggcgccatgtcggtggtgggcatagacctgggcttccagagctgctacgtcgctgtggcccgcgccggcggcatcgagactatcgctaatgagtatagcgaccgctgcacgccggcttgcatttcttttggtcctaagaatcgttcaattggagcagcagctaaaagccaggtaatttctaatgcaaagaacacagtccaaggatttaaaagattccatggccgagcattctctgatccatttgtggaggcagaaaaatctaaccttgcatatgatattgtgcagttgcctacaggattaacaggtataaaggtgacatatatggaggaagagcagaatggaccagtggatggacaaggagacaacccaggcccccaggctgctgagcagggtacagacacagctgtgccttcggattcagacaagaagcttcctgaaatggacattgattgattccaacacttgtttctattaaaacagactattataaagctttaagttgtcaactttgttctaaatatcaactagcgcaagtgaatactgaagatttcttagtcagtttttaggggattttcggggaggggaaataggtaatgtatggagcattttcacttctaaatagttagatacagaaattaagtgcattgtatctttttcataatggtactatttagaagcccagttagtcttactgagcttatgcttcactcctttatgtttaaccatgtgtctacaagaataagtttgttttggaaagttgagctatagctacagctctagctatccagcagacttttcattatgacttacatggcaggagctctaattatgctttaaaaatctgttgtggagattgctttaaatgctccctgcctggtgtggggatggggtccccctctttgtgagggctggagcatggcacggcatggattaacacggcagaggaacaaaggtgtgctctgagcttcttcatatttcaccttcaccctcacctgtgttctcttccctctctcccaataaaagggctcccattataaatgccatgtacttctcttgggaaaatagacccccttgcctagagtaagttgttaactgagggctttaaacctggaggctcttcctgaaagtatgttcatgaataccccaagcatcaaggtctaaataattttcagaagattagaattgggtagatatactgttggatatagccatggtaaatttaactgaggaattaaatccttgttaattttggtgtaaagatttgtatcctggcctgtttattcaggtgggagatgttctgtataattttgaggtatagcttgaactcctagaacaagagttaaaagttctttttagctcattcacaatcacttgtgtgttaagtgttaatatctgtcatgaacctgccaatttgtacgtgttaagcagctgacagatgatgcaaaaaaaactaagatacactggattgtactggatgagtctgaaattagtgttaaagaagtgtggtgcctgatgttataacaacacctcattcttaactgtgtggccaatgtcaggtataccaaagcattcctctgactgctttttggggcagtgttgacaggagtgaggcattttggaaactccaagggaagcctgtgtttgaggccagagttggtacctgctttaagaaactgttacagggcttgttggtaatgttttgaatctttgtaaaaattgatattctgtataacagagtgcctctctgttacttttggcctatgttgttagaaataagatgctatcttgcatagttagaattaagcgtttgtccatctctagataacattgaaaagtttgagtgttacaggctctaaagtgcaatggagaacaattgcttaggaggaggaaggggaaagtatacttatgttggtgtgtaagcatgcatggaggcctcgaggcaccacaacaaggccaggttcttagcacatcctctgttctctacctgtcatgcttcaagagttccagctggcctgctgtgaagccagtagctattttaaaagtgctggctgcaggattaagccaaccctttacaactggcccagaccgtaatggccatttcttcttaaaaaaaaacatctgggttttta

SEQ ID NO: 646314 - DNA, 2129 bp, Homo sapiens
ttgaaaaatggcagaaactagacagtagttgcctgggagggagggtatcacacttttagcacttgtttgactgtctcctggttgcaggaggaccagtatgatcatttggatgctgctgacatgacaaaggtagaaaaaagcacaaatgaagcaatggagtggatgaataacaagctaaatctgcagaacaagcagagtttgaccatggatccagttgtcaagtcaaaagagattgaagctaaaattaaggagctgacaagtacttgtagccctataatttcaaagcccaaacccaaagtggaacctccaaaagaggaacaaaaaaatgcagagcagaatggaccagtggatggacaaggagacaacccaggcccccaggctgctgagcagggtacagacacagctgtgccttcggattcagacaagaagcttcctgaaatggacattgattgattccaacacttgtttctattaaaacagactattataaagctttaagttgtcaactttgttctaaatatcaactagcgcaagtgaatactgaagatttcttagtcagtttttaggggattttcggggaggggaaataggtaatgtatggagcattttcacttctaaatagttagatacagaaattaagtgcattgtatctttttcataatggtactatttagaagcccagttagtcttactgagcttatgcttcactcctttatgtttaaccatgtgtctacaagaataagtttgttttggaaagttgagctatagctacagctctagctatccagcagacttttcattatgacttacatggcaggagctctaattatgctttaaaaatctgttgtggagattgctttaaatgctccctgcctggtgtggggatggggtccccctctttgtgagggctggagcatggcacggcatggattaacacggcagaggaacaaaggtgtgctctgagcttcttcatatttcaccttcaccctcacctgtgttctcttccctctctcccaataaaagggctcccattataaatgccatgtacttctcttgggaaaatagacccccttgcctagagtaagttgttaactgagggctttaaacctggaggctcttcctgaaagtatgttcatgaataccccaagcatcaaggtctaaataattttcagaagattagaattgggtagatatactgttggatatagccatggtaaatttaactgaggaattaaatccttgttaattttggtgtaaagatttgtatcctggcctgtttattcaggtgggagatgttctgtataattttgaggtatagcttgaactcctagaacaagagttaaaagttctttttagctcattcacaatcacttgtgtgttaagtgttaatatctgtcatgaacctgccaatttgtacgtgttaagcagctgacagatgatgcaaaaaaaactaagatacactggattgtactggatgagtctgaaattagtgttaaagaagtgtggtgcctgatgttataacaacacctcattcttaactgtgtggccaatgtcaggtataccaaagcattcctctgactgctttttggggcagtgttgacaggagtgaggcattttggaaactccaagggaagcctgtgtttgaggccagagttggtacctgctttaagaaactgttacagggcttgttggtaatgttttgaatctttgtaaaaattgatattctgtataacagagtgcctctctgttacttttggcctatgttgttagaaataagatgctatcttgcatagttagaattaagcgtttgtccatctctagataacattgaaaagtttgagtgttacaggctctaaagtgcaatggagaacaattgcttaggaggaggaaggggaaagtatacttatgttggtgtgtaagcatgcatggaggcctcgaggcaccacaacaaggccaggttcttagcacatcctctgttctctacctgtcatgcttcaagagttccagctggcctgctgtgaagccagtagctattttaaaagtgctggctgcaggattaagccaaccctttacaactggcccagaccgtaatggccatttcttcttaaaaaaaaacatctgggttttta

SEQ ID NO: 646315 - DNA, 3081 bp, Homo sapiens
  misc_feature (2916)..(2916): n is a, c, g, or t
  misc_feature (2925)..(2925): n is a, c, g, or t
ctcgactttttttacacatatggagacttggagattcaggttctccttagatctctctgggtaatttattagaaatgcttacatagatttgcttcctaatctcaagctggcttcccctctccacaactcagcaactatctattctcccaggaggccatacaagcgaggggccctgaagcttaacatttattaacttcatgtaaaggtctgagcggacctttcaggccaggcagcgtgtcacttgcctgtgttccttgttagggcctaccaccgggtaggtgcttggaatgtgctgtggattaaaggcttaaatcctgcgggcccctcaatctgatctaaggacatgagtggcttagagaacggcgcaacaaggctaagcgaaagaaaacaaagcggtgtggctgggagtgggctccttccctccgctggtgagggtgcgatcttagactcttgagagaacccgacataaaggccgcgttccaatggcggccttctcccctaccggccaacctgccccgaaaagagcagaaggcaccctgcgggatctgcagatcagcttgcgtctcattctggggcaccgacacggtggaatgcaagacaccccactaccggaagtttctttgatgttaagaaaaacggcggaagtaggccgcagcgcttcctcagtatagtgcctcgagctggctcgcctactttctacggtaaagggaggtgctccacatctctatgcagctgtgcagcgccgcaggttccatgcgcaggctcggttggctaaatgcgctttccagccatctttcagccacccagtcctttcccaggttctcgagccaggacgtgacgtattcagacgtactgggggcggggcctcaaggggaaaagcgcctgagccgggatatcgcgagaacatcccgttctttcgtagctctggtgctgcggctccgctctcgtcgcaacgagatctttcgagatcttctccgcccccgctaccggcgcctcctctgcggccactgagccggagccggcctgagcagcgctctcggttgcagtacccactggaaggacttaggcgctcgcgtggacaccgcaagcccctcagtagcctcggcccaagaggcctgctttccactcgctagccccgccgggggtccgtgtcctgtctcggtggccggacccgggcccgagcccgagcagtagccggcgccatgtcggtggtgggcatagacctgggcttccagagctgctacgtcgctgtggcccgcgccggcggcatcgagactatcgctaatgagtatagcgaccgctgcacgccggcttgcatttcttttggtcctaagaatcgttcaattggagcagcagctaaaagccaggtaatttctaatgcaaagaacacagtccaaggatttaaaagattccatggccgagcattctctgatccatttgtggaggcagaaaaatctaaccttgcatatgatattgtgcagttgcctacaggattaacaggtataaaggtgacatatatggaggaagagcgaaattttaccactgagcaagtgactgccatgcttttgtccaaactgaaggagacagccgaaagtgttcttaagaagcctgtagttgactgtgttgtttcggttccttgtttctatactgatgcagaaagacgatcagtgatggatgcaacacagattgctggtcttaattgcttgcgattaatgaatgaaaccactgcagttgctcttgcatatggaatctataagcaggatcttcctgccttagaagagaaaccaagaaatgtagtttttgtagacatgggccactctgcttatcaagtttctgtatgtgcatttaatagaggaaaactgaaagttctggccactgcatttgacacgacattgggaggtagaaaatttgatgaagtgttagtaaatcacttctgtgaagaatttgggaagaaatacaagctagacattaagtccaaaatccgtgcattattacgactctctcaggagtgtgagaaactcaagaaattgatgagtgcaaatgcttcagatctccctttgagcattgaatgttttatgaatgatgttgatgtatctggaactatgaatagaggcaaatttctggagatgtgcaatgatctcttagctagagtggagccaccacttcgtagtgttttggaacaaaccaagttaaagaaagaagatatttatgcagtggagatagttggtggtgctacacgaatccctgcggtaaaagagaagatcagcaaatttttcggtaaagaacttagtacaacattaaatgctgatgaagctgtcactcgaggctgtgcattgcagtgtgccatcttatcgcctgctttcaaagtcagagaattttctatcactgatgtagtaccatatccaatatctctgagatggaattctccagctgaagaagggtcaagtgactgtgaagtcttttccaaaaatcatgctgctcctttctctaaagttcttacattttatagaaaggaacctttcactcttgaggcctactacagctctcctcaggatttgccctatccagatcctgctatagctcagttttcagttcagaaagtcactcctcagtctgatggctccagttcaaaagtgaaagtcaaagttcgagtaaatgtccatggcattttcagtgtgtccagtgcatctttagtggaggttcacaagtctgaggaaatggagacctctcaagctggatccaaggataaaaagatggaccaaccaccccaagccaagaaggcaaaagtgaagaccagtactgtggacctgccaatcgagaatcagctattatggcagatagacagagagatgctcaacttgtacattgaaaatgagggtaagatgatcatgcaggataaactggagaaggagcggnatgatgctnagaacgcagtgcaggagtatgtgtgcgactatctgaaaggttaatattaaacatagcatgctggcaataccctgctgtgtattggcgcactcggcaatttcaacatccgctctatcgaatacagacgatgacttactctaattttgaacatttcat

SEQ ID NO: 646316 - DNA, 100 bp, Homo sapiens
  misc_feature (20)..(20): n is a, c, g, or t
  misc_feature (39)..(40): n is a, c, g, or t
cagtccccgaaggcctgganttggtcgcctgtatcaatnnctcactctcggacagccagtctaaggacgagaggcccagggccgtcttccacgaggagga

SEQ ID NO: 646317 - DNA, 2661 bp, Homo sapiens
  misc_feature (2633)..(2633): n is a, c, g, or t
  misc_feature (2645)..(2645): n is a, c, g, or t
ctcgactttttttacacatatggagacttggagattcaggttctccttagatctctctgggtaatttattagaaatgcttacatagatttgcttcctaatctcaagctggcttcccctctccacaactcagcaactatctattctcccaggaggccatacaagcgaggggccctgaagcttaacatttattaacttcatgtaaaggtctgagcggacctttcaggccaggcagcgtgtcacttgcctgtgttccttgttagggcctaccaccgggtaggtgcttggaatgtgctgtggattaaaggcttaaatcctgcgggcccctcaatctgatctaaggacatgagtggcttagagaacggcgcaacaaggctaagcgaaagaaaacaaagcggtgtggctgggagtgggctccttccctccgctggtgagggtgcgatcttagactcttgagagaacccgacataaaggccgcgttccaatggcggccttctcccctaccggccaacctgccccgaaaagagcagaaggcaccctgcgggatctgcagatcagcttgcgtctcattctggggcaccgacacggtggaatgcaagacaccccactaccggaagtttctttgatgttaagaaaaacggcggaagtaggccgcagcgcttcctcagtatagtgcctcgagctggctcgcctactttctacggtaaagggaggtgctccacatctctatgcagctgtgcagcgccgcaggttccatgcgcaggctcggttggctaaatgcgctttccagccatctttcagccacccagtcctttcccaggttctcgagccaggacgtgacgtattcagacgtactgggggcggggcctcaaggggaaaagcgcctgagccgggatatcgcgagaacatcccgttctttcgtagctctggtgctgcggctccgctctcgtcgcaacgagatctttcgagatcttctccgcccccgctaccggcgcctcctctgcggccactgagccggagccggcctgagcagcgctctcggttgcagtacccactggaaggacttaggcgctcgcgtggacaccgcaagcccctcagtagcctcggcccaagaggcctgctttccactcgctagccccgccgggggtccgtgtcctgtctcggtggccggacccgggcccgagcccgagcagtagccggcgccatgtcggtggtgggcatagacctgggcttccagagctgctacgtcgctgtggcccgcgccggcggcatcgagactatcgctaatgagtatagcgaccgctgcacgccggcttgcatttcttttggtcctaagaatcgttcaattggagcagcagctaaaagccaggtaatttctaatgcaaagaacacagtccaaggatttaaaagattccatggccgagcattctctgatccatttgtggaggcagaaaaatctaaccttgcatatgatattgtgcagttgcctacaggattaacaggtataaaggtgacatatatggaggaagagcgaaattttaccactgagcaagtgactgccatgcttttgtccaaactgaaggagacagccgaaagtgttcttaagaagcctgtagttgactgtgttgtttcggttccttgtttctatactgatgcagaaagacgatcagtgatggatgcaacacagattgctggtcttaattgcttgcgattaatgaatgaaaccactgcagttgctcttgcatatggaatctataagcaggatcttcctgccttagaagagaaaccaagaaatgtagtttttgtagacatgggccactctgcttatcaagtttctgtatgtgcatttaatagaggaaaactgaaagttctggccactgcatttgacacgacattgggaggtagaaaatttgatgaagtgttagtaaatcacttctgtgaagaatttgggaagaaatacaagctagacattaagtccaaaatccgtgcattattacgactctctcaggagtgtgagaaactcaagaaattgatgagtgcaaatgcttcagatctccctttgagcattgaatgttttatgaatgatgttgatgtatctggaactatgaatagaggcaaatttctggagatgtgcaatgatctcttagctagagtggagccaccacttcgtagtgttttggaacaaaccaagttaaagaaagaagatatttatgcagtggagatagttggtggtgctacacgaatccctgcggtaaaagagaagatcagcaaatttttcggtaaagaacttagtacaacattaaatgctgatgaagctgtcactcgaggctgtgcattgcagtgtgccatcttatcgcctgctttcaaagtcagagaattttctatcactgatgtagtaccatatccaatatctctgagatggaattctccagctgaagaagggtcaagtgactgtgaagtcttttccaaaaatcatgctgctcctttctctaaagttcttacattttatagaaaggaacctttcactcttgaggcctactacagctctcctcaggatttgccctatccagatcctgctatagctcagttttcagttcagaaagtcactcctcagtctgatgctcaccgcaatatnatggtaccgagncgatcactgcgtgttt

SEQ ID NO: 646318 - DNA, 1510 bp, Homo sapiens
gatgcacgagagcaagtacctcagtcctgaccgagtggcatctcgcgaacactacgcccgatggatgagagtcagcaagggaccgattattcacaggctaggccgtcctacgcttgtggtgtgcgcaagattgtcttggtcaccaacttggctgagacttccatcacaatcaatgacatcgtgcatgtggtggacggtgggctgctactaagggatagaacgctatgacactagacagacctacatggtgtcctgcctgagagtaccagtcgcttggcgtatcaacgcagccacatgctcgatcccacgcgccgcgggcccgggcggtgcctgctgcccgagtccaggcttgtggcccataacacatatctggtatcccccgtacgaagaccctggacatgaggaagaaaaaaagtggcacccacctttgtccgaaagctcggccgacgcaggaatacacgtagccggccatcgactcgttctttgtacaggtaacgacttggtgtctcgcgtgcgaacaggcaggaaaccaactctctgactatctgtctccgtgagagcccagaaggaacggtgtcaggaggatgtcgagagtctaatcccatgtgctcttctgagaagggggccatggatgacgcaacagaaaaatcagccatacaaccaatgtcagagactgggtcctaggatttgtgcgaccaggaaggcggccataggttggaagtaccttttcgccatttccagaaaggggcatgagaagttccgaagtggcgttttgcctttgggggcaacctccgaacgcccgttggggataaggttttacccccattaggaaaactttgaaccgccgccgttgtggccgcgggtcctaaagggccttgggccccattttgtgggacttttccaaccgaggctttccatttaccaccgaggcgccgggaaagcaaccccctcggcggggaggaactctgtgtgtgcgctcccaggagatgtgcggcccaacccaatttttgggacttcgggttatccgcgcggtgcgttgggacccccaatgtcttgtgcttcccgcgggactcattggttccacgttggagcgaaaagaccggtctaaaccttaaaaatccttcgggggggtataaggaggggtaacccgggatagatatagggcgcccttggggtctcctttggccaaacctccccacagaggggggcagtataagcacctcgctacgcggtgaaatacccaaaggcgactcaaattgccccaaaggggggcaacccttcacaaacccaaatgaggaacaaacacacccccgggcgtggggggacgccacaagggaaaggctgctgtcggggggaaaccacgaaagacggaaggttctcggacaacagagcaaccgggccaacccccttcgtgttgtgtgtgcgcacgagtccgccccgaaatgtgagggaaccagatgcccaggtagggggaagggttccgcacaacacaacagcctcttttgggagg

SEQ ID NO: 646319 - DNA, 463 bp, Homo sapiens
catcaataagaagacgatggaagcgagtttcagatagtgcggctggtggagcgggctgggatatagtctgtgtgtaggaggtacggagtagagtaatccctcgagtctgatagttcgttcgcctcggagatgcgtgggaagggtaggatcgggggcccttggtttcgtggatgtgcgagtaaggggggtagcgatccaggttgaccatttaagtgcgagttaacctgagtaggcaggtcgtggggattatttgggcgtgtacagatggaggtagaataggcgattgcagtgaggtcgggtatggtgtacctggtaagagggtagccgagtaaggttgatgtggtatttcgaaggtgggggaaagaagtgcatgcaggtgtaggaagctttagggattgaggtaggtgtgaccgggtcgagttataagcggttgctaggcattgatgtggctgcgctgataacg

SEQ ID NO: 646320 - DNA, 194 bp, Homo sapiens
gtccgggtaggagacaggcagtatgcctggtccagccggcgtcgccttggggcggtgagcagtgccaggcaggcgcgaggggccgggcagaccccgaggctttaagtgcaaagcagggcaagggtgtacgcagcacgggccgagtcagcctttggaacaattaggggcggcaaccgcatgtgaccgcagggcat

SEQ ID NO: 646321 - DNA, 222 bp, Homo sapiens
  misc_feature (3)..(3): n is a, c, g, or t
tgnccaaagctagtacccaaactaaatacacaaaattacaaaaccaacaacgtttaaattatcaacatcaaattaatctgatggagacagtttttaaaaaccagactgatgctgaaggcataaatatggtactaaaggcaccaagttaggtttttttttttttttttttttttttttttttttttttttttttttttttttttttttttttttattttttag

SEQ ID NO: 646322 - DNA, 886 bp, Homo sapiens
ggccagtgcctggtctccaagtgccttgtgaatgaccagaggcgattggtttgagtggtatgtgtgtggtggatcctgttctggtctactcgtggatgctggtcatcgggtgtgcagtattgatcaggacctgctcacccaaaacgcttatggagagctggctacgtgacgacaaaagaaaagaaagcaagcccatcatcttcgtatacggacagagcaaagcagtaactaggacgcttgggtgtggaccaggagtcagaggagggcaagaggcaaaatgaagccctgataaggctagatgcacgattcccatagggcacgagcctggcagggtctgatcaggagaacgtgaggaacatgcgagcaattccggaacattttctagcagatagcaggagatgacatggagatctgtgctgatgagctcaagaaggtccttaacacagtcgtgaacaaacacaaggacctgaagacgcacgggttcacactggagtcctgccgtaagcatgattgcgctcatggatagcagatgggtctggaaagctcaatctgcaggagttccaggcagctctggtaacaacgattaaggcctggcatgaaccctttgcaaagactatgacacagagcagtccggcgagcatcaggaggtacgagatgcgaatatgcggtcaatcggcgcaggattccacctcgaagaagcgagtctatgacatcattaccatgcggtacgcagataagacacatgaacatcgacgtttgacagtttcatctgctgcttcgttaggctggaggggcttgttcagagctttttcatgcattttgacaaggatggagatggtatcatccaagctcaacgttctggaagtggttgcagctcaccatgttg

SEQ ID NO: 646323 - DNA, 322 bp, Homo sapiens
tctctttcgtttccatcttaagcttacgatattcatcacctttagacaaatcccaagccttacagtgccgaggccttacctggtcaggtgccgagacctccagctgccgtgccaggctggagtggctcagcagcacggcggggagcggcgcgggaccgtacctctccgtggaccctgcccgccggctgaggagcgtgagcgtgggcgctgcgggagggctgctggatgagtcccggcgtcttcgacgataccgcggcatgttcgccctgcgcaacgcgggaggcgaggaggccccctggcgctggccgagggtctgcactgt

SEQ ID NO: 646324 - DNA, 819 bp, Homo sapiens
  misc_feature (389)..(389): n is a, c, g, or t
  misc_feature (427)..(427): n is a, c, g, or t
  misc_feature (472)..(472): n is a, c, g, or t
  misc_feature (607)..(607): n is a, c, g, or t
  misc_feature (613)..(613): n is a, c, g, or t
  misc_feature (632)..(632): n is a, c, g, or t
  misc_feature (639)..(639): n is a, c, g, or t
  misc_feature (647)..(647): n is a, c, g, or t
  misc_feature (661)..(661): n is a, c, g, or t
  misc_feature (749)..(749): n is a, c, g, or t
agcggggagtgacgacagaggcggagctccaactgacatgttcattaagggcagggctccgaggagagccacgctcgagagcgacaggtcgggctacccggggcgggtctgaggcaggtttgtagcgcacgatcccagggaccattgggctccgacgcgtctcgaggccctacttctcgccagggctaaggcgttgtgtaggcaggctgctgcacagtagaatcaggctggtctagctttgtccagcaatctacggcagatggatggcagtggctcgcgtgctgggtgcaacggggagacggacaaggcattcctacgagacctctcggagctccgggcatggacgaaccgtccgcggtcggccatgattccgtgcaagtgctccgcgnacacaggaactatgatacagcagccacactcgaatggnagcgatggtgtgcaatccgttacatgaagttcccacacattgctntcagcacaacaggtggcgcgaggtacacgcagcacatggtttacgaaactgcaacgtgctacgtgtctctgtcatgtgagggcatgcaaagcatgtgcattgctcgcaaaacccagcaggtggtaagcgcaatgngctggnaacgcaagaggatagccangactaanttccgtgnggcctcgagtcganacattatcgttgggacgaatcagaggagccgccaacttgggaagcaatcgctagcagcagatgtgacgactccaccatcgcttgcganagcgcatacagttggacccaaggcgtacaaattggcttacgtccatttgagacttacgaattggaggcga

SEQ ID NO: 646325 - DNA, 420 bp, Homo sapiens
cctgatcgcattgcctgtaccctcttagcctcggttcccttatctgacagcagccctttatctattctagctctctggcttgcaggggatgaggtgaagcaaccctaatcggctgaagccaaagaaaggacttcagatctcgtaactgcaaatcctggggtctagcctcataactgcaaatcctggggtctagcctccctctctggttcttgtcacctcctcgtgggcttcagtcccaagttccagatcggtgcaagacatggtcgaagcccagggcccgcatcctcccagattccagccacctgggagtgtgtctgtggtccctggtctctgacgaggtcctgtgccctgccattggttccagtggactgccggagctgatgggtcaggcctgcactggagctggttggagtttgctcc

SEQ ID NO: 646326 - DNA, 337 bp, Homo sapiens
ttggtatataaactatcgtgtacagacaaggcctacagacttatttcttcttggacacacccacggtgcggccacggcgagccagtggtacttggtgtgctggcctcggacacgaaggctccagaagtgacgcagccctctatgggcctgaatcttcttcagtcgctccaggtcttcacggagcttgttgtccagacattggctaggacctggctgtatttccatcctttacatcttctgtctgttcaagaacagtctgggatcttgtactggcgtggattctgcataatggtgatcacacgttcacgtcacctcagtggtcgacgcggcctgacat

SEQ ID NO: 646327 - DNA, 298 bp, Homo sapiens
aagcttgtcatcttgataggtaatatataggtacatagacacatcagaacgatcacttactccaatatcattggccaggatactatatgacatacgatagtgaattcggatcacatgtatccctatatcgggatagaatcaaacaggttattgatgactccctaaacgaacatcttaactcaatgattctacgtgttgatctgcatgacccaattgatacagaaaatatggataacccattctttcaacccagggttggctctggtgctatatctcgctttaccagtgcgttaaaagc

SEQ ID NO: 646328 - DNA, 126 bp, Homo sapiens
aaggggggttttttttcccccccctttttttttttcggggggggggtttcccccccccccggggttggggctcttaattagggaaaaacccccccttttttttttttgttggccggggggggggga

SEQ ID NO: 646329 - DNA, 102 bp, Homo sapiens
gcgtgaggaattctcctcctcctattaagctttggctaatactgcatatggcacaatgtttaatattggcaagttcatctcaggaggaggaggaattcgccc

SEQ ID NO: 646330 - DNA, 337 bp, Homo sapiens
  misc_feature (1)..(1): n is a, c, g, or t
ntttcacaaaagctgaacccactttaccaaaaattgagtttaccctgaagccacaaaaattgaattgtatacacaagtaaacttaaggtttaaaacgtgtaggacatggtaccaaggtagttctcagttgaagaatttttccaatgtgccttatagagagggccaaagttgtgaaatatgtaatgtagccttacagggaaccaaatggtgtcatcaggttttactgtcatctacaacaccttacacagccagaacccttggtattttaatatgtgtaggaaacacattcctcatataggcgagtagggttctcattcaacccttttgtgctgtttct

SEQ ID NO: 646331 - DNA, 154 bp, Homo sapiens
acatcgaaaccatggagccaagagccatgccaggggtgccctgctggagagtaggacatgctgtaggtgggcgagccgtacatgtaggtctgcgagctggtcatggagtcgaactgtcgggctagtcgggagggaacgagctcgaatccgaaaa

SEQ ID NO: 646332 - DNA, 784 bp, Homo sapiens
agcggatgacgtcacgcctgcggagctgccgccgcgcgccggtggggcgcgagcgtgtgcggggtgcgggcgcgggcgcgggcgcgggcgcgggcgcgtgcgggctgcgagccgggaggcggcggcggcgacggcgacggcggcggcatggcggagagcgaggcctgagacccccagcaccccgggggagtacgagagcaagtacttcgagttccatggcgtgcggctgccgcccttctgccgcgggaaagatggaggagatcgccaacttcccggtgcggccagcgacgtgtggatcgtcacctaccccctccggcaccagcttgctgccaggaaggtggtctacttggtgaagccagggcgcttgaccccgatgagatcggcttgatgaagcatcgacgagcagctcccggtcctggaagtaccccacagccgggcctggacatcatcaagggagctgaaccttctcccacggctcatcacgatgccaacttgcccctaaccgctttcgtgccctctgacctccagacgatggagaactccaagggtcatctatatggctcgcaaaccccaaggatctggtggtgtcttattatcaggttccagcgcttctctgcggaccatgaagctaccgaagggcaccttcacggaatttctgccggaggtttatgaatgataagctgggcctcggttcctggttgagcacgtgcaggagttctgggagcacccgcatggactcgcaacgttcttatcttcaacgtattgaagacatgccttcgggacc

SEQ ID NO: 646333 - DNA, 516 bp, Homo sapiens
ccagcccgcccgcattacgccgagaaccagcgaggcggaacttgcactacgagaccgcgccgtgccctccagcctgggcgacagcagtgaggctccgtctcaaaaacaaacaacaccaaaagaacacaaaaaacagaaatataataagaatatcttcaaagggtacaaatcatacgtagagcttaacaaatttctacaaagtgaacacacccatataatcagcatcaggtcaaacaggatagagaactagtaccttggaacgttcccttaggacccctcaagggaagacaatctggattatcattctgagtatgtgtatgtatgctatgggcatctagtaggcagaggccagggatgctgctaaacatcctacaatgcacaggaaagccccaataacaaagaattattcattttaaaatgtcaatagtgctaaggataaaaaattctatattacagacccagatgtgcttctccctttcactcaagtatgaacgatgatagtcagagcagctaaca

SEQ ID NO: 646334 - DNA, 124 bp, Homo sapiens
caatcgcgtgagccatcagacagaggagtgactctctgaactgaaaactgagctatagcacggatctgtgatagggcaacctccttccggagagctgtagtaatgcctcacgcagtgctaggta

SEQ ID NO: 646335 - DNA, 700 bp, Homo sapiens
  misc_feature (174)..(174): n is a, c, g, or t
  misc_feature (197)..(197): n is a, c, g, or t
  misc_feature (201)..(201): n is a, c, g, or t
  misc_feature (207)..(207): n is a, c, g, or t
  misc_feature (235)..(235): n is a, c, g, or t
  misc_feature (249)..(249): n is a, c, g, or t
  misc_feature (303)..(303): n is a, c, g, or t
  misc_feature (318)..(318): n is a, c, g, or t
  misc_feature (337)..(337): n is a, c, g, or t
  misc_feature (343)..(343): n is a, c, g, or t
  misc_feature (346)..(346): n is a, c, g, or t
  misc_feature (350)..(350): n is a, c, g, or t
  misc_feature (380)..(380): n is a, c, g, or t
  misc_feature (387)..(387): n is a, c, g, or t
  misc_feature (396)..(396): n is a, c, g, or t
  misc_feature (413)..(413): n is a, c, g, or t
  misc_feature (417)..(417): n is a, c, g, or t
  misc_feature (420)..(420): n is a, c, g, or t
  misc_feature (427)..(427): n is a, c, g, or t
  misc_feature (431)..(431): n is a, c, g, or t
  misc_feature (433)..(433): n is a, c, g, or t
  misc_feature (445)..(445): n is a, c, g, or t
  misc_feature (447)..(447): n is a, c, g, or t
  misc_feature (449)..(449): n is a, c, g, or t
  misc_feature (454)..(455): n is a, c, g, or t
  misc_feature (490)..(490): n is a, c, g, or t
  misc_feature (502)..(502): n is a, c, g, or t
  misc_feature (517)..(517): n is a, c, g, or t
  misc_feature (533)..(533): n is a, c, g, or t
  misc_feature (536)..(536): n is a, c, g, or t
  misc_feature (550)..(550): n is a, c, g, or t
  misc_feature (554)..(554): n is a, c, g, or t
  misc_feature (558)..(558): n is a, c, g, or t
  misc_feature (568)..(568): n is a, c, g, or t
  misc_feature (609)..(609): n is a, c, g, or t
gttaaaggtttaatttttgtttaaacctagacgtgcaacaaaagttttaccacagtctgcacttgcagaagaaagaaaaaaattcaaaccacatgtttatttttttttttgcctacctcattgttcttaatgcattgagaggtgatttagtttatatgtttttggaagaaaccnttaatgtttaatttaatcttaanaccnaaacgnccagattgaagtttgacttttattgtcncaaatcagcaggcncaagaactgtccatgaagatgggaaatagccttaaggctgatgcagtttacttncaagtttagaaaccngaatgctttgtttttaccngattcnccnttanaggttgatggggcaactgcagcccatgacncaagatntcattgttntcgatgtaaaggggttngtancanacaggtngttncnttagaatagtcncncnaactnntcagtgttgcaggaacctttttttgggggtggggnagttcccttttntaaaaatgcaatgcnctaaaactattttaanaangtagttaattctgnttantcanaaagtgggcntcttctgtgtttagggtgtaataatcgaggttcttggcttntccttggtttctttacttgctcttattgggctctgggttttttaaacccatttttactttataggatatttttcatgtgccttttgtgaat

SEQ ID NO: 646336 - DNA, 191 bp, Homo sapiens
aggatcctcggaatgtgtggtgttatgaacagatacttcggatcgtaataatctcgcaccccaggacccggtcatcgaaagcctatcgtgctccgagagtaacgagtggaatatatatatgtcctgcatgatccacaatttgcttgacgggcatcgccccggccggaggccacccataacaccacacaatt

SEQ ID NO: 646337 - DNA, 1014 bp, Homo sapiens
tactagcatttagccatctcacttctaggaatactagtatatcgctcacaccgttcatatcctccctactatgcctagaaggaataagtactatcgagtgttcattatagctactctcataaccctcaacacccactgccctcttagccaatattgtgcctatgccatactagtctttggccgcccggcgaagcaagcggagggccatagccggatacgtagggtctctaatctccgaagcgacatgatggcctagaacgtacgttaacgataaccatagaccctacgtccaaggcgtaaaactaatcggtccgcagacgaattatgatgtactgaccacgtgcacagtgactttccaaaaaacacgatagagtttggaatcgacgcaagcacccacaggctaagttattagcatcatcctccctactatgttctaaccaatgtcaacatagaagcctatttgagctgttcccgcaagactttggcgtccgagcccctaagaacgccgcgctcgctaatactaactacctgaggtcctacccgctcacaatcatggcggccagggcgggttatccagtgagccactatcacgagagaaagctctacctctctatactaatctccgctacgaatctccttagttataacatgccagcacagacactaatcatgatttagtagtctacttgcgaaaacccacactgaatcccctacctgtgtgtaaacattcaactcgtatgatggcaacccggtcagaaacgtctgaacggcagggcacttacttctattctacaccctagttagctcgccttcgctagtcagtcggatataggtaactccagagcccttagggtccgtaaattttactattcactctcactgccaagaatatacaaggccgggcaacattttatggggtcgttacacaacggttaggaagaaccttacggctcactttagtccatgcatcttacccccactgggatattgcgcgcaccaaaagggggagaaccc

SEQ ID NO: 646338 - DNA, 443 bp, Homo sapiens
tacttcaaattttggcatttgaaaatggctggtggatattaaaaagttggatagtgtagaactcctttgaaatataaacaactttgaagtgtaaaaaattgtaattatcactacaatatatcagggatgtgaaagattttagttgtgtgatagccttggtatataacagcaaagataagccataatttgaactttcagagtgattgggtagtattgaatttaatgagttacttttgtacaattttaatgtgtactgagttaaaatttattggataattttgaaaattacagcatattatagtatatcttaattgactatagaaacagaaaaacatgatatatgcactagtgttattggacttacgtttattgcaaaatgagtttattctggtatgccatcataattgtatgtctattcttaaattaattatggacacattttt

SEQ ID NO: 646339 - DNA, 415 bp, Homo sapiens
ggcttggtaatttttcccccctcagctcacaaaaccaggcagtgggatttggagggtcagcaactgagctagagatggtaagtgacaaagtgagggaatatcgtggatcccagttgttcctccatgtgtactggtatccagggcgaagcaagagagactgatttagaatcaagaaaaaagctactgaccacggatgttgccatttggagtggtttagcatcagagccataggagctgctcaggttcagggcttgcttgggcagctatggctgtctgaaaacttttttttttttgagatataactactttcaagtcctcggattttgggggtagtaattccacagggcttgtcatttgtgtttgaagctggtggtgaggagggcggagtgaggagaagcgagggggtggagtgggt

SEQ ID NO: 646340 - DNA, 3118 bp, Homo sapiens
  misc_feature (2953)..(2953): n is a, c, g, or t
  misc_feature (2962)..(2962): n is a, c, g, or t
ctcgactttttttacacatatggagacttggagattcaggttctccttagatctctctgggtaatttattagaaatgcttacatagatttgcttcctaatctcaagctggcttcccctctccacaactcagcaactatctattctcccaggaggccatacaagcgaggggccctgaagcttaacatttattaacttcatgtaaaggtctgagcggacctttcaggccaggcagcgtgtcacttgcctgtgttccttgttagggcctaccaccgggtaggtgcttggaatgtgctgtggattaaaggcttaaatcctgcgggcccctcaatctgatctaaggacatgagtggcttagagaacggcgcaacaaggctaagcgaaagaaaacaaagcggtgtggctgggagtgggctccttccctccgctggtgagggtgcgatcttagactcttgagagaacccgacataaaggccgcgttccaatggcggccttctcccctaccggccaacctgccccgaaaagagcagaaggcaccctgcgggatctgcagatcagcttgcgtctcattctggggcaccgacacggtggaatgcaagacaccccactaccggaagtttctttgatgttaagaaaaacggcggaagtaggccgcagcgcttcctcagtatagtgcctcgagctggctcgcctactttctacggtaaagggaggtgctccacatctctatgcagctgtgcagcgccgcaggttccatgcgcaggctcggttggctaaatgcgctttccagccatctttcagccacccagtcctttcccaggttctcgagccaggacgtgacgtattcagacgtactgggggcggggcctcaaggggaaaagcgcctgagccgggatatcgcgagaacatcccgttctttcgtagctctggtgctgcggctccgctctcgtcgcaacgagatctttcgagatcttctccgcccccgctaccggcgcctcctctgcggccactgagccggagccggcctgagcagcgctctcggttgcagtacccactggaaggacttaggcgctcgcgtggacaccgcaagcccctcagtagcctcggcccaagaggcctgctttccactcgctagccccgccgggggtccgtgtcctgtctcggtggccggacccgggcccgagcccgagcagtagccggcgccatgtcggtggtgggcatagacctgggcttccagagctgctacgtcgctgtggcccgcgccggcggcatcgagactatcgctaatgagtatagcgaccgctgcacgccggcttgcatttcttttggtcctaagaatcgttcaattggagcagcagctaaaagccaggtaatttctaatgcaaagaacacagtccaaggatttaaaagattccatggccgagcattctctgatccatttgtggaggcagaaaaatctaaccttgcatatgatattgtgcagttgcctacaggattaacaggtataaaggtgacatatatggaggaagagcgaaattttaccactgagcaagtgactgccatgcttttgtccaaactgaaggagacagccgaaagtgttcttaagaagcctgtagttgactgtgttgtttcggttccttgtttctatactgatgcagaaagacgatcagtgatggatgcaacacagattgctggtcttaattgcttgcgattaatgaatgaaaccactgcagttgctcttgcatatggaatctataagcaggatcttcctgccttagaagagaaaccaagaaatgtagtttttgtagacatgggccactctgcttatcaagtttctgtatgtgcatttaatagaggaaaactgaaagttctggccactgcatttgacacgacattgggaggtagaaaatttgatgaagtgttagtaaatcacttctgtgaagaatttgggaagaaatacaagctagacattaagtccaaaatccgtgcattattacgactctctcaggagtgtgagaaactcaagaaattgatgagtgcaaatgcttcagatctccctttgagcattgaatgttttatgaatgatgttgatgtatctggaactatgaatagaggcaaatttctggagatgtgcaatgatctcttagctagagtggagccaccacttcgtagtgttttggaacaaaccaagttaaagaaagaagatatttatgcagtggagatagttggtggtgctacacgaatccctgcggtaaaagagaagatcagcaaatttttcggtaaagaacttagtacaacattaaatgctgatgaagctgtcactcgaggctgtgcattgcagtgtgccatcttatcgcctgctttcaaagtcagagaattttctatcactgatgctaagaacgcagtggaggaatatgtgtatgaaatgagagacaagcttagtggtgaatatgagaagtttgtgagtgaagatgatcgtaacagttttactttgaaactggaagatactgaaaattggttgtatgaggatggagaagaccagccaaagcaagtttatgttgataagttggctgaattaaaaaatctaggtcaacctattaagatacgtttccaggaatctgaagaacgaccaaaattatttgaagaactagggaaacagatccaacagtatatgaaaataatcagctctttcaaaaacaaggaggaccagtatgatcatttggatgctgctgacatgacaaaggtagaaaaaagcacaaatgaagcaatggagtggatccaaggataaaaagatggaccaaccaccccaagccaagaaggcaaaagtgaagaccagtactgtggacctgccaatcgagaatcagctattatggcagatagacagagagatgctcaacttgtacattgaaaatgagggtaagatgatcatgcaggataaactggagaaggagcggnatgatgctnagaacgcagtgcaggagtatgtgtgcgactatctgaaaggttaatattaaacatagcatgctggcaataccctgctgtgtattggcgcactcggcaatttcaacatccgctctatcgaatacagacgatgacttactctaattttgaacatttcat

SEQ ID NO: 646341 - DNA, 749 bp, Homo sapiens
tgagaccagttgaataaaagtgcacaccttaaaaaaaaaaaaaaaaaaaaaaaaaaaaaaaaaaaaaaaaaaaaaaaaaaaaaaaaaaaaaaaaaaaaaaaaaaaaaaaaaaaaaaaaaaaaaaaaaaaaaaaaaaaaaaaaaaaaagaaaaaaaaaaaaaaaaaaaaaaaaaaaaaaaaaatttgggcccctttggcccaagcaaatttaaaattagaaaaatttaaaaatgggggccaaatttgggccaaattggcaaaattccccaaaaggggggggaaaaaaaaataaaggggcggggtttaaaaaacgtggaaatggaaaaaacctggggttaaccaaataaaaacccttggaaaaaaaaccctttttaaaaagtggggaaaaaacaaaaaagccccacacaaagggcttttcaaaaaagtggccaacctaaatgggaaaagaaaaattgaagggttaaaattttggaaaaaatccgggaaaaattttgtgaaaacaagcaattttttaaacaaataggccaaaatgggaaaaaccctataaaaataaaaagaaatcacccaaaaaagggtagaaggtttctcaatttaaaaaagaaccctctttaaaaaaaggggcctcacacgtaaagggaaaaaaccgttttaagagcaaaggccacattggaaacaaaccctaaaaatttttggggcaagggccaaaacaaaaatggaccctaaggccctttttatggggaccccacggg

SEQ ID NO: 646342 - DNA, 1194 bp, Homo sapiens
  misc_feature (63)..(63): n is a, c, g, or t
  misc_feature (1029)..(1029): n is a, c, g, or t
  misc_feature (1038)..(1038): n is a, c, g, or t
cgactcttgagatcccccatgtacctcctcagtctgatgctccagttcaaaagtgaaagtcanagttcgagtaaatgtccatggcattttcaggtgccagtgcatctttagtggaggtcacaagtctgaggaaaatgaggagccaatggaaacagatcagaatgcaaaggaggaagagaagatgcaagtggaccaggaggaaccacatgttgaagagcaacagcagcagacaccagcagaaaataaggcagagtctgaagaaatggagacctctcaagctggatccaaggataaaaagatggaccaaccaccccaagccaagaaggcaaaagtgaagaccagtactgtggacctgccaatcgagaatcagctattatggcagatagacagagagatgctcaacttgtacattgaaaatgagggtaagatgatcatgcaggataaactggagaaggagcggaatgatgctaagaacgcagtggaggaatatgtgtatgaaatgagagacaagcttagtggtgaatatgagaagtttgtgagtgaagatgatcgtaacagttttactttgaaactggaagatactgaaaattggttgtatgaggatggagaagaccagccaaagcaagtttatgttgataagttggctgaattaaaaaatctaggtcaacctattaagatacgtttccaggaatctgaagaacgaccaaaattatttgaagaactagggaaacagatccaacagtatatgaaaataatcagctctttcaaaaacaaggaggaccagtatgatcatttggatgctgctgacatgacaaaggtagaaaaaagcacaaatgaagcaatggagtggatccaaggataaaaagatggaccaaccaccccaagccaagaaggcaaaagtgaagaccagtactgtggacctgccaatcgagaatcagctattatggcagatagacagagagatgctcaacttgtacattgaaaatgagggtaagatgatcatgcaggataaactggagaaggagcggnatgatgctnagaacgcagtgcaggagtatgtgtgcgactatctgaaaggttaatattaaacatagcatgctggcaataccctgctgtgtattggcgcactcggcaatttcaacatccgctctatcgaatacagacgatgacttactctaattttgaacatttcat

SEQ ID NO: 646343 - DNA, 132 bp, Homo sapiens
ccttcttctggtggtatcctccccaggcgctgatagcggtattgaagcccagctggtgatgtgcgagctgatagatgagcggcaaatcaggagtaccagcggctcatggacatcaatgttgcggctggagca

SEQ ID NO: 646344 - DNA, 160 bp, Homo sapiens
agactgtgctcactcgctgtcatcgcgccatcattggtatatggttagtgtgttggttatgtaggcctagttatgaggagcgttatggagtggaagtgaaatcacatgtgctaggccggaggtcattagtgagggctagagcgggcccctgtttaggggt

SEQ ID NO: 646345 - DNA, 285 bp, Homo sapiens
ttgggatgaggaacgtcactggggaaaggggacactgggccaacccttgcttctcccccactgctgtgaggctcagtgaaaggcagacttttgagtctcttccttctttgctgcaggggttggggctgccagagtggtacctgctactctctcaggagcagcactgaagcatgtccatgttttagcagaagctcaaacaggaagtcgctagcctttccttgcacttgtttcttgcagacggttgccttggtaggcgtgtgacttccaactccttgatgcccaaga

SEQ ID NO: 646346 - DNA, 390 bp, Homo sapiens
  misc_feature (7)..(7): n is a, c, g, or t
  misc_feature (94)..(94): n is a, c, g, or t
  misc_feature (371)..(371): n is a, c, g, or t
tgaaagncctgccccggcatgtaataaaaaaaagccaccccctccatataaactggggtttggccaccccccgggaatacctgtatttttgganccctcatttgggacctcgggcagttcaaacctcactcatgttggttccagggtcaactgtatttcccatataacttaactcagttccttctgaatactttaagtcatctctaggttatttataatacgatttaatgctatgtaaatagttgttatgctgtattgcttagggaataatgacaaaaaaagtctgtacatgtttatacagatgcagtttttttccaaatattttcaatctgtgattgtttgaatctacagatgcagaacccatggatacnggtgggccaatcgtatatt

SEQ ID NO: 646347 - DNA, 86 bp, Homo sapiens
  misc_feature (52)..(52): n is a, c, g, or t
  misc_feature (61)..(61): n is a, c, g, or t
  misc_feature (63)..(64): n is a, c, g, or t
  misc_feature (75)..(75): n is a, c, g, or t
gaggagtactcatttgcttgcaaaggccataatctgttctttgaatggaganactgcattnanngcctgcaagcnccacgtcctga

SEQ ID NO: 646348 - DNA, 692 bp, Homo sapiens
attcggccattatggtctctgtggctcacgcctgtaattttagcactttgggaggccgaggcaggcagatcacaaggtcaggagattgagaccatcctggctaacactgtgccctgtctctactaacataatataattagctgggcgtggtggcgcacgcctgtagtcccagctactcgccaggctgaggcaggagactgccgtgaacctgggaggcgccgctctcagcgagcgcccaccaccccacctgcctccagccttgccgacagagagagcctccgcctcaccgatcaccacctcccccaccccctccaccccccccgtccccccctccgctcacccgcccttagactccaccacccttacgcctgccccccgcacttcccctcctacctgccaacccccccctcaccaccgcgcccccccaccactcactcgactctcctcctcccccttcacacccgccccccccccctcttgtccccccccttctccccctcctccctctccccccttcccctacccctcccctctcactcccctcccctcccccgctccccctttccccccacccccccccgccccccctccccccccctacccgctcccccccacactctcgcaccctcacccctccttcccccccacccctgccgccctgcccctccctccctcgtccccccgccgctccg

SEQ ID NO: 646349 - DNA, 347 bp, Homo sapiens
gggtgaccgcgtggaaatcaggtgtgtggctgatggcaaccctccaccacacttcagcatcagcaagcagaaccccagcaccagggaggcagaggaagagacaaccaacgacaacgtgggtacctgtgtagctatggagcctgcccggaaggaacacatgtggagcgctatagaatgtcagggcctggacttggacaccaatgatatacgctcgtcttagtgaaccacaggaactactggtgaactatgtgtctagacgtacgagatagagtacccgaagcccctgagagacaggaaggcaggacagcctcgaacctgacctgtgaggcagagagtagaccaggaac

SEQ ID NO: 646350 - DNA, 1140 bp, Homo sapiens
  misc_feature (734)..(734): n is a, c, g, or t
cttcagtagtctaccttaccatatatacccttttatctttccattacacaaggtggtttatttaagtctgtacatcttggttaatatctggtacaatcttccattcactgacggtgattttctgtgtcccccaagattcttacagaccattttattaagtggcttcgagcatcatcatacagaccaccatatgttctttgactataattatcggacaatatcttcactgttgtgggataggattggtgcgcctctattcaatcagatccttcatgcctttgaggtggaagggaccgctcagttatgtgaaggagatgcatcagagggcacatacgcgcaggtagtccattcacggcaatatggctgtaataatgaccgattattcaatgggagagtttcacgaatgactgtaatatgattatggcccagattacttcttcacagtaaggcacaagagaaggaaatatcatcgtatctcatagctagaataaggaacaactaatctccatacacgtcaagatacatagtacatggtatcatttggaaatcagtgtcgtggagcactgctgaggaatgatcctagtggtaggtccagacgaagatgctgtgaacatcagtgactttaatcttatgcgttcataatggcgcagatgtttgtttcgggcgactaactgtatctttctagcagcgatcttgtagttgactaggctcgaaaagaattttaaataagaccnggactaactcgaggggggacaaggaaaaggttagcttatccacccaggttttagaaaaacccgggggtgaacataacacagctagaagcctaacccgagaattatggcgcaacgatgcgcacacacggaggccccaaccggtgagaaaaccaacatttgagaaaaaacaccacgggggcacacacacacaacaccacaccgacaaaacacaacaacaacgcggagacatatgggagcgcacccaataagtaaatgggcactgtcgcgcaccaacaagaagttgcccttgtccctcactgctgccatatttcgtctcttttctcttctctctctctctactcttactacaaaataaaaataacagaatacaacaacataaaaaacactcgagacagcaaagacagac

SEQ ID NO: 646351 - DNA, 491 bp, Homo sapiens
  misc_feature (332)..(332): n is a, c, g, or t
  misc_feature (393)..(393): n is a, c, g, or t
  misc_feature (410)..(410): n is a, c, g, or t
gttttcagaatgtaaaaacacagaccacattaaaaagaaaaataacccaattaaaatgggaaaagcatttgaatagacagttctccagaaaagttgtataattaccaataaacacaagaaaactgctcaacatcattagtcattatggaaatgcaaatacgaactacaatgagatacctcttcccactcctaggataaccaaaattaaaagtcagacagaaataagtgttggcaagaatgtggaggaattagaatcctcatgcgttgctggcagaattgtaaaatggtacagacactttgggaaaacacatacagttctttaaaatgtgaancagagtaactcaggaattttatttctagggaaaatttttatatacctaaggaaattttttnaaaaacacatgtttccntgttaaaacttttacctaatttttaccgctgccttattttatattggtgttaaaagtgggggccacctggaattgttcctt

SEQ ID NO: 646352 - DNA, 790 bp, Homo sapiens
accctccggtgtcccgacccagtgctaagcttgagcatggcttgagcagtgagcccacagcctgagctgctgtgcccagattgcagctggagaacgaggagtgatgagcactctggtcaactacaatgcccccgtgcccagaatgagcatccagtgagatccatgtgagctgtgacaatggactgactgatgagcctgctgaaatgtacaatggatgtgccctgcttgggcctgctgtggcctgttacctgcagaccccaactgtccccaacgtctgtggttgacttggcctgacccatgtgtgtgcatgctcgtgccccggtgccccctgggatgctagtgacgctgacgtgtgctgaccttgtgatgagctatcacagcaatgcaagtctggttttgttgcttgaaatcggagtgtgttgttgtgagtacctgggataaaaatctctttcctgggttaacctgagagatagttgtcctggcatgaatgtacatccatgcatactgtatcatggaaatggcgtacaagattgacaagactgactacattggtaggcatgctatggtgccccggggcctgatggagtaacgagtatcctgaccccccgtgttatagagtgcacccaagggggtattgcttggccctggggcagcatacagcatcatgtcccgctttcacatgactgacgacaatacctgaacacctgtcctgggagttgaatctcaccatcatgacggacttggaaggactgacccagccataagcggctgtgcaactgacggccggcag

SEQ ID NO: 646353 - DNA, 110 bp, Homo sapiens
gcttggaaagagaactcagggagcatcaagagagacaccttgagcagagagatgagcctcaagaaccttctaataaggtccctgaacagcagagacagatcacattgaaa

SEQ ID NO: 646354 - DNA, 153 bp, Homo sapiens
  misc_feature (6)..(6): n is a, c, g, or t
aggggnactgccctgctacaaagtgatgaacatccacctttttgtctaccctctgtacttcacttttgtgcgccccaccgagatcatcgcgttcagcaaccgtgcagaggacattcgtaagctgcgctgtgaagtgctagactgtgtcgaagt

SEQ ID NO: 646355 - DNA, 206 bp, Homo sapiens
catcagaacaacccaccctacattacacgcccagcaggtgctctgagtgtggcaagcatttccgatgcgactcccatctagccagccatcagagcgtgcatgcagcaggcaactcctgcacaggccaagaggctggagagagccctggggctaggaaacggcagcgtgctgtgccagtgccaaagtgccacgtgtgcaccgagtgt

SEQ ID NO: 646356 - DNA, 941 bp, Homo sapiens
cgtggttccccgacgccgacgaagtcccccgcacagttgggtgtgttaccgccacattgcccccggtgggctccttcttcagtggtgtggttcccgccacgcacaccagtagtttggtgcgcgggagagacacctctcgctcactagcggctttctccgctctctctcacggaggggtgtctccctccctctcccccttcagagagagagaggtgtgtttcacacgcccccggcgccaccgctgctctctcgccgcgggagatattcttgtgaggagacaagagatgatgccatgtgggagggtaaacacgacgcacacagcgcgacccaactcccggggtggtacatctatatagagagagcgaggggcacgtcttttgtggtgggggtaagagagagcccccccccgcggggggtgtgtcccaccacccgcccgactgatcagtggggcggcgaaacagagcagcgcgctccacaaagagagaaccccgctctctctccctccccccctcgcgcgagggcggtgagatagaaaagagacacacatctcgctggtggtcaccacacacgcaaagaacggttggtgtgtagcacacgacacgatatctcctgctgcttatagagagggagaggctacccaccacacacgaccaccagaagagtgagggccccaaccacccctttcttatcagggagtcaaaacattatttacaaagcaagggaaacgaaacacattctccacacgagtgccaccgcaccggctgcatcgatgacgatgtggatgagaggagcgtgcccacacactgaatataggacacgaccagcgcggccccccccccggggagagacccacgaagggttttgtgtgtttttttttcccccccccgttttaatgtttgggggaaggattttaaccccctttttaaaaaaaatttttttta

SEQ ID NO: 646357 - DNA, 81 bp, Homo sapiens
  misc_feature (42)..(42): n is a, c, g, or t
ctagaagattcagcaaagtacttttgtgctcttggggagtcncccatcctactgggtcacgctatcaccgataaactcact

SEQ ID NO: 646358 - DNA, 954 bp, Homo sapiens
taactggtggggtgagagcccccatcatatgcgggggtcatgttgttggtcaattccggccgcacgaagtcagtgtgtgttggcgaaaacagatgattggtcctttgtggggcgaggaacagcttggtgggtagcacgcgacctcggatgctcgctggtggcgacgcgcccgaccagcgtggttggttggggcccactccttccactcacacggtggtgaccagagccccccctcgaggtgtgtgttgccacaacacactgtgtgtcgactaagcaccctcgccgccgcatgacctcttgcgtgactctccgcgcgagtcgagaatgtaggaaagtgtgcgtgtcttggttctccacacagtcgaccacaggttctgagagggcgcacctaaggcgccgaaggagataattctctgtggagcacaagcgggttctatcaaataaatcgctggcgacagtagattgatagcgttataaacagtaaaacagccactacgctttctgcagccaactgattacttgaggaacaccctttggggcgtcttatgaggggatatacatcacgctgagaccacctacttcccggatttctggggcgatataccccacataaatggacacgcccacacacactctggtgagattttttcatccgccacgctgagagcgttttaaacatacttggtgcacgttggtagtgatatacgcccacgtgtttcacaccttgcccgtgcacaccatttgcccgactaactcacctaccactcttggtgccctacacgcagcagtctcctccacaacagtgatggcccctcagcaccatgatttcccaccaccagaagtatatataggaggttcataccttccctcgcacctcattaattctcccgcttcttccactgccccaaacagccatataagaagacatttccatgaaacattctggtacataac

SEQ ID NO: 646359 - DNA, 548 bp, Homo sapiens
tggtaagtagtaatatagcggcacgcatgactggttcattcttgtgcattaaattgtaatagtaactagatagtccaaatatgaagcaaagatgatcacggtaggatacagaaatctcagagtaacaagcaatagtagcatgtagcagaaattaaactgagatggagcaaagaaaggtgaaggtaacacgataccaaaagtacccccatgccatcactaactgaagaaaagcttcgcacagtagaactaatatcagacactgcgtacagcaggaggtgagcgatgatagaggaagagaggcctctcataaccacccaaaggccaagtcaccaggtagataaaccaattatcattacgagagcaatccacttcatataatatcaaagtatgtgaaccaaaaagttacagaacctaagagacaggactcatccacaagcgcagactctcaggggccgctgacccagcgttcctacttctggatctgtactcaccagaagtgtgaatacatgcacagcccaaggagaaaagacgcttacattgtaaaagcc

SEQ ID NO: 646360 - DNA, 563 bp, Homo sapiens
  misc_feature (30)..(30): n is a, c, g, or t
  misc_feature (92)..(92): n is a, c, g, or t
  misc_feature (116)..(116): n is a, c, g, or t
ctattaggcatttacccttgaatcacggtntcatctcaagtcactcctgacttgcaggtctcagaaccccaaatgggaccggatccctcagnagcagatagtgtccagctttgtgnagccgacatttaagatgtggagcacttggggtcgtttgaaacccgctatcttcagtagggacttttacttctagagaacatgtgcattttgattttatctgtcctcaaactgaacttttgctcattttaatagtaaaaacacattcctaggtggagacttaagatgctaacgagacatgcaatgtatgcacaaatatgtacagttagtgcacatgtgcacccagaagaccactcaaaacatgcttacactaacacttctttccaccttcttatgaataatcgtgcaaaacccccagaaggagggtttctccagtaacaattaatggtgtctcactcttatgagcagcctgccctggaatctctttctcagaatgtaccgtctattctgcacttaattttcaaagtagtcttttctttttttgtgtgcaataaattactctatgctgt

SEQ ID NO: 646361 - DNA, 284 bp, Homo sapiens
  misc_feature (160)..(160): n is a, c, g, or t
gtcgacatcatcgcggatccacgccgacgatagctgcgccccgcccacgcaggacaggatcaacatgctcaagccgatgcccaatacccagcggcaatcgacccaacgcaggttgcacagcgccgccaccaacggcagcgcgatcaactgcggcacgccnatgatcagcatcaccggggcagtttgcagcgggcggtcgttgctacctgagccaggtagctggacggaatgatggtcaccgccagcagcacgatcagcacgccggcgagcacaatcagcgcgaa

SEQ ID NO: 646362 - DNA, 139 bp, Homo sapiens
ttagctgacggagtaatgtggtgataccagtaggggtgctgatagtgagtcggagaagaatgttacggaaaaataaaggctgttacgcctagttggtttagtagggatagactgatcaggctaatgaggagactatgta

SEQ ID NO: 646363 - DNA, 374 bp, Homo sapiens
  misc_feature (149)..(149): n is a, c, g, or t
  misc_feature (151)..(151): n is a, c, g, or t
  misc_feature (162)..(162): n is a, c, g, or t
  misc_feature (263)..(263): n is a, c, g, or t
  misc_feature (272)..(272): n is a, c, g, or t
  misc_feature (277)..(277): n is a, c, g, or t
  misc_feature (295)..(295): n is a, c, g, or t
  misc_feature (305)..(305): n is a, c, g, or t
  misc_feature (324)..(324): n is a, c, g, or t
  misc_feature (350)..(350): n is a, c, g, or t
  misc_feature (361)..(361): n is a, c, g, or t
taagctttaaaaatttttattttttcattttatttcacacattgacattaaatttttatggacacataataactgtacatatatatggggtagaatgtgatgttttaatacatgtactcaatgtgtaatgatcaaatcagggtaatttncntaatgattttnctgtagggagaaaattcaaaatctactcttctggctattttcaaatatataatatgttattgttaactatactcatcctactatgcaatagggcacccgancttattccnggggntctacatccgttaaggcnaacccagggnttgggaaatattggggaanaaaaattgcggtctggtactggaacnatggtaccggncttttttcttggt

SEQ ID NO: 646364 - DNA, 381 bp, Homo sapiens
cgctcctctgcctctgggccgtccggttgtggcaggttgtcgcagacttgccctcaatctcgttccaggccgctgtggcgacgcatttgtgtttctcgcgctcgtcgtacacatggggccgcacagccacccagtccgactcgagcgtctcctccagcgcgatcgacatggtgggcgtgccttctcgccgcggggaatagcaccggcccggcccgcccgaggacatgccacctgtgcgcgcgcaccccgctcaacctcgccgggcgccttcagccatcttagatgcccgccggctctcccagctcgttcgcctgtccctccgcgccccgaacgccgagctcctttgtggcgcggatcgagagaaggacaataagcgtcccg

SEQ ID NO: 646365 - DNA, 194 bp, Homo sapiens
gctcgaccacaggatcactacacatcattggtagggcgtacaaaaattagctgggcatgggccaggcatagtggctcacacctgtaatcccagcagtattgggaggccgaggcggatggatcacgaggtcaggagattgagaccatcctggctaacacagtgaaaccccttctctactaaaaattcagtcgacg

SEQ ID NO: 646366 - DNA, 242 bp, Homo sapiens
tatgcccgtgtccgtgtagtaggggcactctgccgccattaatgagagtgataacgctgatatcatagtcaatgcccggctccagtccctgtgactgtgttgtatcctactgaggagtccacgaaaatcttcaagatatagggagtgccttctcctgtccgtaactactgtgagtgcggtacccaagtaattggtggaacgagtttagccggggttccacactcagtgcctgagtgcttgaa

SEQ ID NO: 646367 - DNA, 369 bp, Homo sapiens
  misc_feature (218)..(218): n is a, c, g, or t
aaaaaccccggtcctaaaaaccggttttttcctcgtcattttgggggtcctccccccccccccctgggttgggggtcagggtttcctgctttatatgagcccccctcccttcccccccccccttatggtggggggcccgggcttccaacccaaagcctttgcccctgccataccttgtttgtccccccctcccgggtccccttgtcccccagcctgantcctgcctgataggtcctgggtcccccagctggtccccctggccccggctgccggagcccgggtggggggccccccccccccccccctgggggtggggaattgtgttttgggggaaagtgggggattttattaatttttggggctctggga

SEQ ID NO: 646368 - DNA, 243 bp, Homo sapiens
tgacctgcccgcctctgcctctcaaagtgctgggattacacgcgtgagccactgcgcctggccaactaaagcctcttcctatgttgatttcccctctggtaaatttcctcttttgctcacgtaacattggaatgaccactgggcctttttttttttttttgaattccactaaggggaagaacggccaggatcttttcaatttgggagagaggaatatttttgcgggtcacacacattgtcctt

SEQ ID NO: 646369 - DNA, 366 bp, Homo sapiens
aggttgtacgtaaagaaaaagaaaaaaaccttaagcgggatggtactgaaaggattaaggcactagaggggtccggaattcacctggagaaagacccaaagggccagtcaggggggtggggggaactcagctaaatagacctagttacggcccggctaggccaggcggtacggggagcccctcctcactctctaccaaccctaaaccctgaggacaggggaggaacccacagcttccttctccggccagcggcagatggttggcctggcttttccaccccctaatggtcaaccacaaaaatgagaaattcctcttctagctcagccttgagtccatggccaaatttccagtacaaccggccggggg

SEQ ID NO: 646370 - DNA, 109 bp, Homo sapiens
ggggggtttaggcaggaaaatggcattaaacccggagggggggctttcagtgagccaaaatcaaacccctgccccccagcctgggggccaaagtgagcctttgtttcca

SEQ ID NO: 646371 - DNA, 1070 bp, Homo sapiens
  misc_feature (4)..(4): n is a, c, g, or t
  misc_feature (23)..(23): n is a, c, g, or t
  misc_feature (39)..(39): n is a, c, g, or t
  misc_feature (41)..(41): n is a, c, g, or t
  misc_feature (45)..(45): n is a, c, g, or t
  misc_feature (47)..(47): n is a, c, g, or t
  misc_feature (743)..(743): n is a, c, g, or t
  misc_feature (1031)..(1031): n is a, c, g, or t
cccnaccggaaataatgaaaggnccccataaagcccggntnacancntatccagtgtacattttaacaggtggcaacatcaccacaggtagctttgattatgtaatcaacacttttaactttccctacacatgtacatcaaatgtgaatggtggaatatacaagttaaccgtcctccttcaaactagctgaaaaactactctctcttatttcattttgcattttctaggcagtatttttccatgctctttaaaaacagacgcaggagctttggaagagcagaaatgcaattacttacatacaatatgatgagaagtgtttcatgatatacaaattgacataggacaagttattaacatagtacaagtttttactgtgtagaaaaaataaacttacagtgaataaataaacagctttctatatcaagttatgtatggagtataaaaagtagttactatatatatatacatatacatatatatataaatgtgcatgttctagagtataaatatactatatacttaaatatttcacgtgacagaacattatttcatctggtttcagttttgtacattaaaatatatctggcagttggggtctcccctgatctctggagacccagggatcctcttcccattccaagggtagacgcaccagcagagtcccgcctctccatccatggatgtctcacactgtctgctgtgataaaatccattcttgttgcagtttggcaggtaaaatttnggaaatttcttctcctgatgtctcctgtgccttggctaaactctctacgactctgtagagttctattcggcagggctccttccattttttgatgttggtgacatggagagccttcgagccatcataggtactgatggcgtcccaaaggatggaatgatcctcttcagaaggggccatcagatggaaattatccaggagctcctcctcagttatctccgtgctctctgggctttcagggctcctgcctctgcagcatgggggagcggaggcgtcagactcctgcacgcnggcgccttggccgcgggtgagggcgtgcagagggtgctg

SEQ ID NO: 646372 - DNA, 406 bp, Homo sapiens
  misc_feature (15)..(15): n is a, c, g, or t
  misc_feature (298)..(298): n is a, c, g, or t
  misc_feature (324)..(324): n is a, c, g, or t
  misc_feature (363)..(363): n is a, c, g, or t
  misc_feature (377)..(377): n is a, c, g, or t
  misc_feature (399)..(399): n is a, c, g, or t
tcaattgtgtttttnactgtgactgtctaaagacatcttgtgattcacagacaatcgtagtcttgttttgatcctcttcaaaaggtggtttataatcagctgtagaacttaggtgctcttaaatgcatatttccaatatctttagattgtgatattaggaataaaggaaaaacattcagggactcatgaagagctgaaatattcatggaatatcaagcagagcaaggagttaactgaatggggctggaactaatagaaggacatgtaatctgtttaactttttgcttaaaactttgcnggagttttgtttttcggggtcagggnaaacttttattttggggcctatttacggcttttaaccantggggtaggggggnttcccccgtggggaccaaattnggggggt

SEQ ID NO: 646373 - DNA, 1069 bp, Homo sapiens
  misc_feature (4)..(4): n is a, c, g, or t
  misc_feature (23)..(23): n is a, c, g, or t
  misc_feature (39)..(39): n is a, c, g, or t
  misc_feature (41)..(41): n is a, c, g, or t
  misc_feature (45)..(45): n is a, c, g, or t
  misc_feature (47)..(47): n is a, c, g, or t
  misc_feature (436)..(436): n is a, c, g, or t
  misc_feature (443)..(443): n is a, c, g, or t
  misc_feature (445)..(445): n is a, c, g, or t
  misc_feature (461)..(461): n is a, c, g, or t
  misc_feature (463)..(463): n is a, c, g, or t
  misc_feature (466)..(466): n is a, c, g, or t
  misc_feature (495)..(495): n is a, c, g, or t
  misc_feature (503)..(503): n is a, c, g, or t
  misc_feature (512)..(512): n is a, c, g, or t
  misc_feature (519)..(519): n is a, c, g, or t
  misc_feature (538)..(538): n is a, c, g, or t
  misc_feature (742)..(742): n is a, c, g, or t
  misc_feature (1030)..(1030): n is a, c, g, or t
cccnaccggaaataatgaaaggnccccataaagcccggntnacancntatccagtgtacattttaacaggtggcaacatcaccacaggtagctttgattatgtaatcaacacttttaactttccctacacatgtacatcaaatgtgaatggtggaatatacaagttaaccgtcctccttcaaactagctgaaaaactactctctcttatttcattttgcattttctaggcagtatttttccatgctctttaaaaacagacgcaggagctttggaagagcagaaatgcaattacttacatacaatatgatgagaagtgtttcatgatatacaaattgacataggacaagttattaacatagtacaagtttttactgtgtagaaaaaataaacttacagtgaataaataacagctttctttttcaagttatgtttggngtttttntngttgtttctttttttntntgngtgtgcgtttttgtgtgggtgtgcgtgtncttgggtntgggtgttntttttgnttgggtgtttggggtgtgnggggattatttcatctggtttcagttttgtacattaaaatatatctggcagttggggtctcccctgatctctggagacccagggatcctcttcccattccaagggtagacgcaccagcagagtcccgcctctccatccatggatgtctcacactgtctgctgtgataaaatccattcttgttgcagtttggcaggtaaaatttnggaaatttcttctcctgatgtctcctgtgccttggctaaactctctacgactctgtagagttctattcggcagggctccttccattttttgatgttggtgacatggagagccttcgagccatcataggtactgatggcgtcccaaaggatggaatgatcctcttcagaaggggccatcagatggaaattatccaggagctcctcctcagttatctccgtgctctctgggctttcagggctcctgcctctgcagcatgggggagcggaggcgtcagactcctgcacgcnggcgccttggccgcgggtgagggcgtgcagagggtgctg

SEQ ID NO: 646374 - DNA, 268 bp, Homo sapiens
  misc_feature (2)..(3): n is a, c, g, or t
  misc_feature (184)..(184): n is a, c, g, or t
  misc_feature (228)..(228): n is a, c, g, or t
  misc_feature (264)..(264): n is a, c, g, or t
annctccaccatgttgaccctgcattgccttatatcagcgacacagggacaatacctcctgaaagatgcctctttggagtaatgctaaatatcgctgcagttttaggcattgctaccatgtatgttcgttacaagcaagttcatgcactgaaccctgaagagaaccttatcatcaaattaaacnaaggctgggccttgtacttgggatactgaagttgtttaaggacntttcccttgtggcaaatttccaggaaatcaacaccngtta

SEQ ID NO: 646375 - DNA, 581 bp, Homo sapiens
  misc_feature (4)..(4): n is a, c, g, or t
  misc_feature (23)..(23): n is a, c, g, or t
  misc_feature (39)..(39): n is a, c, g, or t
  misc_feature (41)..(41): n is a, c, g, or t
  misc_feature (45)..(45): n is a, c, g, or t
  misc_feature (47)..(47): n is a, c, g, or t
  misc_feature (409)..(409): n is a, c, g, or t
  misc_feature (414)..(414): n is a, c, g, or t
  misc_feature (419)..(419): n is a, c, g, or t
  misc_feature (427)..(427): n is a, c, g, or t
  misc_feature (441)..(441): n is a, c, g, or t
  misc_feature (445)..(445): n is a, c, g, or t
  misc_feature (449)..(449): n is a, c, g, or t
  misc_feature (476)..(476): n is a, c, g, or t
  misc_feature (491)..(491): n is a, c, g, or t
  misc_feature (500)..(500): n is a, c, g, or t
  misc_feature (572)..(572): n is a, c, g, or t
cccnaccggaaataatgaaaggnccccataaagcccggntnacancntatccagtgtacattttaacaggtggcaacatcaccacaggtagctttgattatgtaatcaacacttttaactttccctacacatgtacatcaaatgtgaatggtggaatatacaagttaaccgtcctccttcaaactagctgaaaaactactctctcttatttcattttgcattttctaggcagtatttttccatgctctttaaaaacagacgcaggagctttggaagagcagaaatgcaattacttacatacaatatgatgagaagtgtttcatgatatacaaattgacataggacaagttattaacatagtacaagtttttactgtgtagaaaaaataaacttacagtgaataaataanaaaanttgtntatgaaantctgtctagcgtanaccnaatngttcatctatatatctcgatatcgatntactatatacacctntaactagtnatctcgtcaacacacatactcgtctctcgttccctactattcgctgttataccgaagcccgcttcttttgcntgttaagtt

SEQ ID NO: 646376 - DNA, 424 bp, Homo sapiens
  misc_feature (10)..(10): n is a, c, g, or t
  misc_feature (39)..(39): n is a, c, g, or t
  misc_feature (121)..(121): n is a, c, g, or t
  misc_feature (213)..(213): n is a, c, g, or t
  misc_feature (224)..(224): n is a, c, g, or t
  misc_feature (274)..(274): n is a, c, g, or t
cgtgaaagcngccgtcggactggtgctgcccgccaagcntgcggcacctgtcgcgggagaacgtcctcatcaccggcggcgggagaggcatcgggcgtcagtcgcccgcgagttcggaagncggcgccagaaagattgttctcgtggggccggactgagaaatgcctgaaggagacgacagaggagatccggcagatgggcactgagtcagtntaccttcatcntgtgatgtgggcaaccgggacgacggtgtaccagacggccaaggctcagnggagaaggtgggtgacatcaccatcctggtgaacaatgccgccgtggtccatgggaagagcctaattggacagtgatgatgatgccctcctcaagtcccaacacatcaacacccttgggccagttctggaccaccaaggccttcctgccg

SEQ ID NO: 646377 - DNA, 845 bp, Homo sapiens
gtcataatcaggcaactcaggtagaactagaccagttaggggagtataacccagctgtctataagaagccaccgaagagcaggggcctcagtgcttgggccaggctgcgggcatctttaacaccgtggttccagtagatacaggcgagtgagctagaagcatgtctctgactcacccagcgcgatatacgcagcagaggcatattagcctcgtactcggagtggttcttttagctcattagctgttacctactcctgtttcccaaagcttatgtaagagcttttccttctaaacttaaactgtgtgtggttcacttaggaagccacgtgccactatcctggctgctgtcttaactcgtcgtcttgggcacaggatacatattgtccccgtcccactgaggacctcagtttgggagtgcccttgagtccccttttccttagcctgcaggtgcttcaagtggatcatggggcaaagcaggacgatgatcgtgtggggctcttcctgctgtcacctcccatcatcccactctctacaccaggactcaaggggtacgttaacaacgaatgagcatacaggagcaatggcctgtcagaatgccaggcatgtagtgttgacacaaggagagcccttcattggatctttccccttgcctgtcttagtcgacagacgacgaccatcaagaaggacgggtgtatgcatcccacaaaggcctccgtgactaagtttgggtcgagacctcacaatttccctgggcacagggtggccctggtgtgggactttagtcactcaacgcgcggtcttacccttcgaaatcagggaaggtagaccacatggagcaacattct

SEQ ID NO: 646378 - DNA, 141 bp, Homo sapiens
gtcttcccaagggtataagatgaataggaacagacagaaaaccaaggaggggctttcaggaaactctccctctccatcgccatcctgcaagctccacagacctcgggctggcagacatgatggcactgtcctcgagtgtgt

SEQ ID NO: 646379 - DNA, 476 bp, Homo sapiens
  misc_feature (146)..(146): n is a, c, g, or t
cggcccgcttcttgggccccagggtttttttaatatgggtgggcttttttaaaaaatttttttgggcccccccggggggccccctttggggggggggggcccccccttttgggttttcccccgccgggggggcccggggggggggnttttttttttttttccaaacccccccccgggtttttttttggaaccccccgggggggtttttttgggggggccccccctttttttcccccccggggggggttttggggccccgggacccccccccccgggggccccccccggggaaatttttttttttaaaaaaaaacccgggggttttttttttttccccccccccccaacccccccccggggggggggggggggggtggggggggaggggggggcccccccgggggggggggtttttttttggggggcccccctccccccccttttaaaaaaaaaccgggttttttttttttttttta

SEQ ID NO: 646380 - DNA, 222 bp, Homo sapiens
ttaaagtatgttgcgcacgtgcttgaattacagtaggagttgtgttttcagtgttaccctgacctgctttaggagatattgtgatttgagaattaagtttaattgtattagccgaaaatacaactttaccattatactgattgaactcgacataatttgggttattatttatcggccatttgccggtggtatttttagtaatagggaatgaattttgtgttt

SEQ ID NO: 646381 - DNA, 318 bp, Homo sapiens
  misc_feature (106)..(106): n is a, c, g, or t
  misc_feature (126)..(126): n is a, c, g, or t
  misc_feature (179)..(179): n is a, c, g, or t
  misc_feature (205)..(205): n is a, c, g, or t
  misc_feature (289)..(289): n is a, c, g, or t
ttgagggaagactataaggcgggataagaaagattactataggagccgggcacaggggctcatgcctgtaattccagcactttgggaggctgaggcaggcagatcncctaaggtcgggagtttganaccagcctgaccaacatggagaaaccccgtttcaactgaaaatacaaaattanccgggcgtgtggcacatgcctgtaancccagctactcaggaggctgaggcaggagaattgcttgaacccgggaggttgcaatgggccaagatcatgccatttcactccancctgggcaacaagagtgaaactccgtctc

SEQ ID NO: 646382 - DNA, 359 bp, Homo sapiens
  misc_feature (73)..(74): n is a, c, g, or t
  misc_feature (94)..(94): n is a, c, g, or t
atgagccggaaggtctgtttgtcatttattgacagcagtttatacacatttgtttccttcccagtgcaggtannttgcctgggagattggcagnctctgaacgagggggccaggaatgtatgtcggacacgtctttggcaggcatgcccagccccagcaggatgcaatccttcaagttggaattccactgggtatctgagagggaccaaggtggggggtagagaggaagtcttcaacaggactcacatttacggccaggcctcctctctcactatacaagtccatccaagttttaaggaccctcgggggcaacagcgaggcccaccctcctcgacagggggcagattcttcactctcgt

SEQ ID NO: 646383 - DNA, 107 bp, Homo sapiens
tctcaatggcagctaaaattgagtcaccagctctacatggtttagcgcagggggtgtgtgtgtgtgtgtagtcgagtatcgtctgtggtgtgttgtgcgctgctggt

SEQ ID NO: 646384 - DNA, 173 bp, Homo sapiens
cgaaattgctctggattaaatgatgaaatcttatggctagcaaagagggcaaaccgtgcattattataaagctcacacgagttctaggcttcaaacctaagcctcccaagaatgagtccttggagacttacccagtgatgcagtataacccacatgtccttcccgttcactgg

SEQ ID NO: 646385 - DNA, 401 bp, Homo sapiens
  misc_feature (125)..(126): n is a, c, g, or t
  misc_feature (130)..(130): n is a, c, g, or t
  misc_feature (247)..(247): n is a, c, g, or t
  misc_feature (259)..(259): n is a, c, g, or t
  misc_feature (284)..(284): n is a, c, g, or t
  misc_feature (377)..(377): n is a, c, g, or t
gagatggagtctttttctgtcacccaggcttgagtgcagtggtgcaatctcggctcactccaacctgggcaagtgagacttcatctagcaggggtggggagtggtccttatagccataattcaannaaanttcaagaaggctatctgaaaggttgttcagtgaaacatttaggatttatcactgttgagcacttttcatcttcaaattcctgacttgtagtcctgtgttgtcctggatgtggccaangtctctcctcangcgggaactgcacgtccttctccangtgacacaaattttaaaggtcttgttaccatgcaaggaaccgcactttccggctgccactgtcctgtgggcgcgctggggtcgccggccggtngagctcgtgcgcgccacggtgcgg

SEQ ID NO: 646386 - DNA, 833 bp, Homo sapiens
gccccaacccggcgccgccataaatggcggcgccgggttgggtaggagagggcggccccagtgcagttgggtgaactaccgtgcacactggagctctggtgtcttgcttggaactgaccatagctcgtggcagggggaacctcggctagcggcccacgagcccctgctgactcaaaacaagtgagtgtcaggaggtcatcgccggttatccttgagtaaagaatggaaactctggaagcccagccgaggacaatgcaaccttcacagagattcgtgcactaatctgagtgaagggtctaaggtgggaatctccccctcatggagagaaagcttgtgtatggcgtgtcatgcttagacagtgattcctgcaactttgaccttcaggctgggagacggtggagagcatgctgtactccttccttgtgctatggaatttgtgacacaaatatcttcccgcctgtgcttgggcatatcctaagaacttacaatttcctgtataatccgtgtgtgagcagctgtcacttatggggggaaaaatgctgaaaatgaggggggcacttccaagtagatagcttctatttcctatattggtctatatataggtatggttttatcaaaatattcccataagcatttagagtacaaaaacaaagaacaaaaaaatgtgtgggggcgtgtggcagaaaagttttaacactttggtggggcgggcacgggtgtaaggaacggggaaaggtgccaaggaactggcagagaggtgtgtttccacaaaaagggggacggcggtgaacacagagggttgggtagggttaagggcagctataagcgggggc

SEQ ID NO: 646387 - DNA, 253 bp, Homo sapiens
tgcactgacaagtacatcgccctggatgagtgggcggtgcttcggctcgaagcgagaaggatatcgacaaggatctggtgatctaaatccactccttccacacgtaccggattctctctttaaccctccccttcgtgtttcccccaagtgtttaaaatagtttggactggtttgtatgttctgccgtggagtagcaaggtggctaaccatacgatttacagtgacatacacttaagcggatgctaacaaatga

SEQ ID NO: 646388 - DNA, 917 bp, Homo sapiens
  misc_feature (52)..(52): n is a, c, g, or t
  misc_feature (76)..(76): n is a, c, g, or t
  misc_feature (82)..(82): n is a, c, g, or t
  misc_feature (131)..(131): n is a, c, g, or t
  misc_feature (135)..(135): n is a, c, g, or t
  misc_feature (160)..(160): n is a, c, g, or t
  misc_feature (188)..(188): n is a, c, g, or t
  misc_feature (191)..(191): n is a, c, g, or t
  misc_feature (198)..(198): n is a, c, g, or t
  misc_feature (245)..(245): n is a, c, g, or t
  misc_feature (283)..(284): n is a, c, g, or t
  misc_feature (296)..(296): n is a, c, g, or t
  misc_feature (299)..(303): n is a, c, g, or t
  misc_feature (307)..(307): n is a, c, g, or t
  misc_feature (346)..(346): n is a, c, g, or t
  misc_feature (432)..(434): n is a, c, g, or t
  misc_feature (462)..(462): n is a, c, g, or t
  misc_feature (558)..(558): n is a, c, g, or t
  misc_feature (662)..(662): n is a, c, g, or t
  misc_feature (770)..(770): n is a, c, g, or t
  misc_feature (910)..(910): n is a, c, g, or t
cccccaccccaacccccacccaggttttgctacagaatctagctagttcacnccctccctccccccaaaaaacacnaattanaacaagacattttgctagtctaaaaacgaccaaggtccaagttataatncaanaatagagtcgcatctaatgcactgncacacaaaaatgtgtatcgtggggccgngtncatctcncgagacgcggagagacgacacgtagcatgtgttgtgtcaggcaaatnagaggcacaccccgcaagggtaagcagccttaggagtnncgctgcccgccntgnnnnnttcngggaaggcggtgtgtgtgagggggtggggcttaggagtngaccccacttgggctgttggaaagagctacccctatagccactcccaggcattttaaattttcttttagaaggagctgcctccatnnncacccccaccgccatagccgcctctgtnaggtccactattactgcgaccgccccagctactgcctccaccgccgccgccgccgccgctcttcatgggcccataggaggactgatgctggctgtngctgccgaagccgccgaagccgttaccgtagtcgctcccaccgtagaacgaaccgccgccgccgcctccgtagcattgtagccgccgcctccgccgccgccgtnaccaccgtagctgttgtcaccgccgccgccgcccttggaaaggccgttctggtctcgaccaccgccgcgcccccggccgcctcggcgccccggggaggatcgggagcngcctccaccccaccggagtagatatcctccttggggactgcttcttcactccacgcgatggccctgaatcggatggacttgaccaccgcggccttgtctgcgcgtcgtgattctggaaaaaacgagccgaatcacgcctntcgccgg

SEQ ID NO: 646389 - DNA, 1506 bp, Homo sapiens
gaaggcattgaggcagccagcgccaggggcttctgcctgagggggccaggcggagcttgcaggcaacaccgcagataagttttctctctcttttgaaagctcagcagcattcacataccaactcactataacacaacacatcagtccaataggttcagtcaagcatcattgcttcagcgttcaagtttctcaacgctaattttcaatcacgcttaagcattttacagcagcacaaatcatcgacagcacttcagcaagagccagcaatgcaggcaaggcacaacagatcaaacaggtttcctaaaacaaatgcacggaggtatgagaatgcaagctatccttccatggcagtcacaacaacatgtcatctctaaaagaaaaattgcagcagcaacaggactaccagcagaccccgcaattcaataacccacatcagcacaggggccacattgtcttttcaggattcacccaatgcacaggtagaattatgaacaccaggctttcacaaggtcttcagcttctcacaagagctctgtcaagggtagcatctcaccaaatcaaactattggcaacgggcgcatcattctctacacacaaccgacgcatttcaacaccggaagggttgaatttcacacacagaaccctttgaaacactaccgcatggaccggcaaggggcacgcacattctgccgctacactccctaaccaggcacttaaagattacacgaccatcataacataaccatcgcatcgaccggcacaaacttgggcaccacgcactctacattggcgccgagctcgggccccccgcctgcaacaacaccaacgctaggggcaagacaaacaatcaggcaaccggtacgggcaacgacggcgcaaccaacttggggcaacagcaaacgagaacagagtcaccgcggagaacggagcgcaccaccacgaacagcatcaccacaccaagacgcagatacacacaccacctcacctctccatgcgctcgacagccaggagaacctcgagacaagcaacataactcacgacaaaacacacacactccacagacctgcagcagcagcgcggacccacccacactgatcgtataccagctagcacaaacgcagttaacactccacaaggtggtatctgcccatcgagacagaacccgtggcgaatacgacctacgagcgagcgaccaaaccaccccgcaacaacagactagagcgagccgggaaatgacaaaccccgcaagcgagcttacagacacacaacacgaagaatgatataaagcgaaacgtcacgctgcgatcacacgacgacaacaaccgcaggaaacacgcaacgacgcgcaggagacagacgaccgtaagcaaagccagggagaagcgacgcaagatcgacacaccgagcagcacaaaggacgacgacaaaaaaaaaaagcgagacaaaacaagacaccaccggcgaccactcccactcgagtgccaccgacgtccagagacacaatta

SEQ ID NO: 646390 - DNA, 155 bp, Homo sapiens
gcatccaagggggttgcagcagcaatcactggtgagctgccagaggtcaaggggtgaaggggttggcactgaagaaatccctgacatcatattggcgctgctgtcgggctagtcggggactgtcgggctagtcggggactgtcgggctagtcggg

SEQ ID NO: 646391 - DNA, 224 bp, Homo sapiens
agaaagtcatccctatgctcatctgagacaaatgcgtacctcattgcttcctctgccctatttatgtaaaagtgcagtttcactgagccagattaaattgtgtattcagtgaaaggctgatgagggattcaaaagatgcaaccttttgcttttacctacttatgacctggacccaccctatcagaccatgacatgttacacatactgatgctctgatctcgtaa

SEQ ID NO: 646392 - DNA, 747 bp, Homo sapiens
  misc_feature (53)..(53): n is a, c, g, or t
  misc_feature (70)..(70): n is a, c, g, or t
  misc_feature (97)..(97): n is a, c, g, or t
  misc_feature (100)..(100): n is a, c, g, or t
  misc_feature (104)..(104): n is a, c, g, or t
  misc_feature (128)..(128): n is a, c, g, or t
  misc_feature (135)..(135): n is a, c, g, or t
  misc_feature (138)..(139): n is a, c, g, or t
  misc_feature (143)..(143): n is a, c, g, or t
  misc_feature (147)..(147): n is a, c, g, or t
  misc_feature (172)..(172): n is a, c, g, or t
  misc_feature (206)..(206): n is a, c, g, or t
  misc_feature (244)..(245): n is a, c, g, or t
  misc_feature (252)..(252): n is a, c, g, or t
  misc_feature (255)..(255): n is a, c, g, or t
  misc_feature (260)..(260): n is a, c, g, or t
  misc_feature (292)..(292): n is a, c, g, or t
  misc_feature (295)..(295): n is a, c, g, or t
  misc_feature (318)..(318): n is a, c, g, or t
  misc_feature (321)..(321): n is a, c, g, or t
  misc_feature (329)..(329): n is a, c, g, or t
  misc_feature (331)..(331): n is a, c, g, or t
  misc_feature (334)..(334): n is a, c, g, or t
  misc_feature (339)..(339): n is a, c, g, or t
  misc_feature (341)..(341): n is a, c, g, or t
  misc_feature (344)..(346): n is a, c, g, or t
  misc_feature (365)..(365): n is a, c, g, or t
  misc_feature (380)..(380): n is a, c, g, or t
  misc_feature (385)..(386): n is a, c, g, or t
  misc_feature (390)..(390): n is a, c, g, or t
  misc_feature (411)..(411): n is a, c, g, or t
  misc_feature (414)..(414): n is a, c, g, or t
  misc_feature (420)..(420): n is a, c, g, or t
  misc_feature (422)..(423): n is a, c, g, or t
  misc_feature (467)..(467): n is a, c, g, or t
  misc_feature (472)..(472): n is a, c, g, or t
  misc_feature (529)..(529): n is a, c, g, or t
ggtttttgttggggtttgttcttgttctttttttggttggtttgcgcctttcntccccgtccttggtctntggcctgtccatgtgtgtgggtgtgtntgntccngttctcctggtggccactgccttnttcctcntcnntgtncttngctttggtgttcactattccaggtngcccgggtttagactctatcattttcctcgctgntggcggcgagatgactgcttctgttgtgtgctgctggnnttctttngcncaaantgcttcatagtttaaacggccatatacttttnaantactttgaaaaatattttttttngtntgtttacnangtngtttncnaannngcttcgctacgggggttgnttcttttttccgggngcganngtgngggattttacttgggggggtntangtttangnnaccacttttttttttcttattgctgggtgggggggcttgggctnctaanttctggttttctgtttttttttcaaaaagaacttgtttttgctggcggagttttttncccctttctcaggcttcttttttcggttcttgatgggtttggacggctgttcctctttccaatttctgtttaatttcagctgtgtatttcccattggttctttcggctttcttgttggttttggcattcctttcattattgtggtcgatatctgcatcatcattataaggacgtctccggctatatttgtctcgtttttcaatctgtttttccagatc

SEQ ID NO: 646393 - DNA, 875 bp, Homo sapiens
gactttagccattatccaagcgaagacattgaacattactctcttccgtggggaaaatgggcaatatagattgcagattttgaaaatattactagaaatcaagatcttaccaccatcgctttgcagaaagttaaacggccatcagagacatgcaatgcaccacttgccaacgtcattctaagacaagttcgggtcaagcgtgggaaacctggagctctacgtcgagcaggagtcagttccttccacgtggtatttactgattgtgctccctgtcttgctagtgataagtcatttatgcggccgtgggggtgaccaggcacaaatcgaaggagctgagtcgcaaacagagtcaacaactagaattgctggaaagcgagctccggaacagagatacgtgacggcttggctgagctgcagatggatacaattggatgtggttgatacgttatcggcactgtaccctatccatatgactacaaacataagctctgagaacttcattccctgagtcaggtggctatcacaccagatcttcactgcagcatatgcataacagagacgcaacgacaagactgacagtctcacagacttaggatgccctaatctgtactaaaagcttaccaggagactggcatccaacccttgaaaagacagaagaacaacgctgtgaaggacaggtgactggaagacaacagcataaacaatggccagaagaccaacacggcaaaacagagaaacatccaacggaagaacaaggacagacgcacacaagaaaaacaagcaaagaaagaagcaaaagaagagccacaagaaaaacaaaagaaaggaaacacagaacagaaacgagaaagaaaacacaaagagaacaacgaaag

SEQ ID NO: 646394 - DNA, 1320 bp, Homo sapiens
  misc_feature (136)..(136): n is a, c, g, or t
  misc_feature (208)..(208): n is a, c, g, or t
  misc_feature (311)..(311): n is a, c, g, or t
  misc_feature (381)..(381): n is a, c, g, or t
  misc_feature (875)..(875): n is a, c, g, or t
taaaaacggggaatacttttttcaaaacccttcccaaaattggccactttttggttcttgtaacaaagctattctatggtttaaaacgctataggtcaagtatcttggttattatgagacgctataccactggctnactatacaatattaactggatcagcaccacaatctttctcaattgtttaaacacaaaataacgctcccctgntaaaacgcagccaccctttgtgtgtacacgtttataacactttataggttaatctccctctctcgcttctcttctcctctcacaccctctctctctcttctanaacagaaaaactctccaaccacgcaaaaccctctcctctcaaaataaactcccttctctctcaagagggnccagacccgagtgtcgtccttctcacacggtgcaccctctctgtgaaaaaaactctctccaccctctttctctctctcacatctccgctctctcgccacaaacgcgtattcccgcagcgtgtatgaaaccccacagagggggccacgcgtttgtgtgcggaccatactacacacttcttcagctggtctcaacacacctgttgtggtgtggtgtcctcaacagcagagtgcagaatgcccacagagggctctcttcagccacagtagtggtggtgttgtgtgcgtgtgtattgtcgctctccccaagcctcgtgttgttcgccaccacacaagaagactcttctcttctgttgtgtccacccctgttgtgtgcgccccgagttgtcttctctccctccaagccagagaggcccaccacccacagagtgtgggagaagagcgctcgtgtgttccactgttgtggtagtggcccccacactctttggtgatatagngcgccccgctgtgtgggcgggacacacacaatatctcacacacaacaaacccttgtgcgtactgtgtggtctcccccgactttgtggggcctcctctgtgaagcgtcgggcgtggggcacaactgtggtggcacgcacatgttttggcgccctcttcttttgttgtgggaggaaaccccacaaccgtgttgtccacaccccccggcgcgtgtttcacaaaccagctgtggccccagctccctagcagcccccccgctggttttttttttcgtccccccctgttgtgcgcgagaggggggtctccccccctttttttctcccaccccacatcctctgggtgctggtgggcgccttgcggcttctctccaaacgaggcgctcacggccccttttggggggcggggcaaactccctgcgtgggtctcaaccggtgaaacaagagcgtt

SEQ ID NO: 646395 - DNA, 170 bp, Homo sapiens
ggggttttttcccctttggggcccaaaaagtttttattttaaggggcataaggtgggccccccctgggttttgggagggcctttggggttggttttaaaggttgcccccacgggttaaattttgggggtttttcctaagggatttattaaaaaggttattggtcctttta

SEQ ID NO: 646396 - DNA, 818 bp, Homo sapiens
ccttgattagcgggcgttttatgcccccccgttttgttggtcccctcgcggaaataatgggtccccctcttggtgtggtactccccctggggcgcgctattttcacccgcctgctgtgcgtgctgggcacacagggtccttatgtgctgccttgtggagatatctgtttgtactgcccgccaccttccccgtcggtggggggcccccccctgtttgttcccccaccccccctggtggtttttccgcggcgccccatctgtttttttatgatgtcccccccggggtgtatatcctcccactatattattttttgcgcgcggtcgccgagccgccgcaacttgcgggcggcgccttcccgtctgcgctcggtattgatactcactctttctctcagaggggacgcccgcaacgcctgattcccccccccacaagatagtcgtgtttgtaggggacttttttcccaccacctcgctctataacacccctcgccgtcatccccccccttttactcactctggggagacaatttttgtgttgattgcaccacacgattttgttcttgtctccaataatcatcatttttcttatttaatcgaggagctgctaccaatatgtttgccgccgcccaattacacctcttccttcaaaatttttcccaccaaacaacaacagtgggggctcccctcactccaccccccccgctgcacacacaacattaacacccccctctctcccccgcacccccccttttttaccacccccccccccttttttcccttccccccccccccccccccctcccgggtttttttttttta

SEQ ID NO: 646397 - DNA, 965 bp, Homo sapiens
  misc_feature (156)..(156): n is a, c, g, or t
  misc_feature (159)..(159): n is a, c, g, or t
  misc_feature (163)..(163): n is a, c, g, or t
  misc_feature (210)..(210): n is a, c, g, or t
ggttttattgagggggggggagggggaaaaaaaaaaaaaaaaaccttatacattaaccagtgaccccttgttgggtgcctactactgaggaggaatacttgcactttggggagaaggctgactctgagagggagaggggcggagagtacatgaacncantacnaaagcggaaggggctttatgtggaagaaaagattgtggagcatgcanaaaagcagaggacactcagcaaaaataaggaactacctactactgggggggattcttttccttatagggaatttaaaattatggggcgaggggttaaaatttgggaaatttctttttaccacattatctgtgtttattcactttgaataaaggggggtccttgtgagtgtttgtagaaggaggggagtgaggagtagaggtggggtgagcaggtgagggagtataggtggggacgttttgtgtgagaaggggaggggaagcgactggttaggggtgtggattgtgtgatgtgggggaggttggggtgcgtgagggggagaggctgctggcacgaaggcgggttggggaggagggatggtgagtaggtgcatggacaagcaccgggcgcgtcaatgggagaggggggtgggggagtgtgggtgtgtaataggggtgaggggtgattcggcgtagtggcgcgagagtggagggtagcgtggagggaagggaagggagcgcctgggggcagggcgtgagcggggatgcgagcggggtggagagcggtgagaggggaggcgagaaggggcggggacgggcgcgagtggaatgtgggtgtgaaggggtgggagaggcgagcggtggtgagcgtggtgtgggtgcagaggagggtgagtggagggggacagcggagggggaggagagatggcgcaaggagggagcggcatggcgaacgtgaggactgagtgatgctgtgcggagtgcgcgaggcggaggat

SEQ ID NO: 646398 - DNA, 171 bp, Homo sapiens
cccaggtgatcagtgtcccaggtgatcagagtcccaggtgatccagtgtccaggtgatccagtgtcccaggtgatccagtgtccccaggtgatccagtgtccccaggtgaaccagtgtccccaggtgatccagtgtccccaggtgatccagtgtccccaggtgatccagtg

SEQ ID NO: 646399 - DNA, 347 bp, Homo sapiens
  misc_feature (249)..(249): n is a, c, g, or t
gtggagcttgcagtgagtggagatcacgccactgcactccagcctgggcaacacagcaagactctgtctcaaaaaaaaaaaaaatttatgaaaaaaaaaaaaatatgctttcatgtgatgtagttctcttttagtaattaacctttaaaaattatatttcatttaatctaaatcaccattcatttaaaaatgtaccattattttatacattacagtatttaacattattttatatgttatgtatatatnttaggagacaaatgaacatttgtctgtatctgaatcaactgtaccacccaaaaagtgtgtgccacactgcattggcctgggacataaaactggaagct

SEQ ID NO: 646400 - DNA, 292 bp, Homo sapiens
  misc_feature (5)..(5): n is a, c, g, or t
  misc_feature (12)..(12): n is a, c, g, or t
gattnctagaancccaggagttcgagaccagccctgggtaacatagctagaccacatctcttaaaataaaatagttaatttagcccaggcatgatgatatatgcctatagtcccaactacttggaaggctgaggtgtgaggatctttgagcccgggaggtcgaggctacagtaagctatgatctcaccactgtactccagcctgggtgacagagcgagacccagactcaaaaaataaaaataaaaaccctgaatatcttccttctacttcttcagtgctgttttttatttaa

SEQ ID NO: 646401 - DNA, 218 bp, Homo sapiens
taaaattgcatcttattgaaaagaatttttcaaaaatgtttcttgtacacaatgaatggaatatgcaccagtagctgccctgtagtgacaccagtgtagtggcctgattccacaactggtgacctggctgactatctggggatccgtactacgagtctgaccttgcagtgcgatgcaatgcttagtgcactggcctgtcagtttatacaaactgtctg

SEQ ID NO: 646402 - DNA, 223 bp, Homo sapiens
  misc_feature (67)..(67): n is a, c, g, or t
cgcgatggcacgcgggtacgtgaaagcttgggagtcctcctaagaagcgggcccgccctactactantctaatacgggctgcggaagaaagacgacacgaaagggagaaagaggggatggtgaaaaggagacccacatcttagaaataagaagggtcttctatgataaggagtccaggagttctccctgagaattcttgattaaaaactacccacgcccacga

SEQ ID NO: 646403 - DNA, 184 bp, Homo sapiens
  misc_feature (138)..(138): n is a, c, g, or t
tcccgggcgggcttgatgacttttaatctgtatgaagaatggacacaagtgcaagtgtgcaggatcaagacaaaaaacttcaagactgtggagaacatgtcagaagtgccacacaaaatttgttaactttagttattngatcaagttccttgcaaagcttgctcagaccagcacgaactccctt

SEQ ID NO: 646404 - DNA, 490 bp, Homo sapiens
gggccaacatggcgaattcccgttctctactaaaaatacaaaaaatgtgtggggtgtggtggcaggagcctgtaatcctagctactcaggaggctgaggcaggagaatcgcttgagcccaggaggcggagattgcagtgagccgagatcgtgtcactgcactccagcctgggtgacaagaggtgagactccgtctccaaaaaaaaaaaaaaagaattttatttaacctgtggtgggcttaattaaattgggtggtggttcccttggcccggcgttggttggcttcacgcctgtgtaatcccagcacttttggggaggccgaggcggggcagatcacgaggtcaggagatcggagaccatcctgggctaacacgggtgaaacccccgtcttctactaaaaatacaaaaaattagccaaggcgtggtgggcggggcaccttgtagttccagctactgggggaggcttgaggcaggacgaatgggcgtgaacc

SEQ ID NO: 646405 - DNA, 861 bp, Homo sapiens
  misc_feature (1)..(1): n is a, c, g, or t
  misc_feature (128)..(128): n is a, c, g, or t
  misc_feature (154)..(154): n is a, c, g, or t
  misc_feature (178)..(178): n is a, c, g, or t
  misc_feature (186)..(186): n is a, c, g, or t
  misc_feature (202)..(202): n is a, c, g, or t
  misc_feature (239)..(239): n is a, c, g, or t
  misc_feature (293)..(293): n is a, c, g, or t
  misc_feature (372)..(372): n is a, c, g, or t
  misc_feature (567)..(567): n is a, c, g, or t
  misc_feature (749)..(749): n is a, c, g, or t
  misc_feature (751)..(751): n is a, c, g, or t
  misc_feature (772)..(772): n is a, c, g, or t
  misc_feature (787)..(787): n is a, c, g, or t
  misc_feature (818)..(818): n is a, c, g, or t
  misc_feature (830)..(830): n is a, c, g, or t
  misc_feature (856)..(856): n is a, c, g, or t
naggtcagatgggctaagcctagctgtttggggtgctgtggtggtggtagattggctaaacaaactgttgctgctgctgctgcttcttggtggccgccttgctggcgaggcccttggccttctctgtngctgcaagtcccgtttcctttgcctnctccttggcttccttggctgtttnaacaagtnttttggaaggggcctngccttgcagcttagccaagaaaaattcaaaacccttnaaagttttggtcacgttgcttttgaaccgggcaagaacaaatccctggacagcnctggagaaaccaaaaaagcaagaggagacccaggcttcccggcggatttcagtccagcaacttttgtaagatttcacanagtaaacacatcgttcctccaccaccatcagcagggcgtggttaaggttccaggtgaaggtagtaatggtctgattttgtgggtccacaaaagagtcctccaggacgtacaccgagtaagcaacattggcaggaaaaagtggctcggcccagcgtggcaccctgttggtcttggtcaggagtggccgggacagcngtttctggtcaggggtaacctcccggtgtactatgttttccgtaaagacaagtttgctatagggattcgggttccgctgcaagaaggcggcgaacacttggtcccaggaactccggagcacgctctggcccaggaaatactttaccatcgtcccggccgaagcgggctcagcacccgcgcananacagagggtgcggagctgtgnaggtacgcgaggtcngggccgggccggggctcggcgcacacccgcngccaggtctgtngcttagttaccaccgcaccgcgcccnagccg

SEQ ID NO: 646406 - DNA, 398 bp, Homo sapiens
atccctgattttttagaaggggcagcaattgctttttagggcctgaaagacatagtgagccagtgctgactgaaaccctgactaatgacttagggccagtaagtgcttgggtttcccctcaaagatttgtcaaatgaggtagagaactgcaaaaaagcagcccctgctattttcaggattggcctgcccatttggggttaaatggtttccaatttgggggtttgggcaaatgcccccttgagactgtttgactcccctgggttctttgaggagctgtttaatccccaaagggaaatagttttcaaaaaagaaagggaacttgaaattttttaatctttaagggttgatgtggtttgcctcccctgccctctccctgaaataaagaacagcttggcaga

SEQ ID NO: 646407 - DNA, 815 bp, Homo sapiens
ggtggtctgtaggtgagctcgcacgacatgagtgagatgccaggtcgccccatgacctgggtgcgcgctccctgggctcagtgactgtcctcggagctgcctggctcatggcccaacccctttcccggatccccccatctgctctctgaagttggcgcactagagctgccatttgtcatccagccccttggaatacccaagttcttgcatcaagggcctggacgtaaaggacaacagggcagcaaacattgagaaggcagttcctcatggagagatgagacgggatcctagccgttcatagtggggtgcattattgaggtgatccgtccccaacgacgattgacatgtgggaggcagaaactggtccagaagccctgaaatggaactcggagctgagcggactccgcagcaggagcttgggaagggcccatggatcccaactgggccccagcaagagccaccaggaacagtcattcctctcccgcaagcactcccatcccaggaggcccctgggccctccagatgccttcccccgtggaataagcggtgtgtcctgagaaaatcaacagaaagcagaaattaaagaagaaaggccgagagggatattaaattttcggtggccgaataaaccagacgtctaagcagacctcggcacattgaggtaatacgcgagtcccgagagcaggtgattcttgcgacacgtgatacgcattggccggtaccacatatagtgtatcgttgtaattcccagaaacacagtttcaccgtgttatggagacggaaggtcttacggcggaccgcgagcgataccgggg

SEQ ID NO: 646408 - DNA, 446 bp, Homo sapiens
  misc_feature (281)..(281): n is a, c, g, or t
  misc_feature (295)..(295): n is a, c, g, or t
  misc_feature (410)..(410): n is a, c, g, or t
cagcctgggcaatgtaacaatacctcatctctaccaaaaaaaaaaaagaaagaaagaaagaaagaaaaaaaacccagggcatggtgatgtgtacctgtggtctcagccactcaggaggctgagaggggagaatcacttgagcccaagagctcaaggttgcagtgagctatgatcgcaccactgcactccagcctgggccacaaagcaaagccctgtctctaaaaaacaaacaaacaaacctccaaaacttctttcccttccttggtctgccctaggccctnctgagtatagatancctctcttaggaggcagctgggcaaggcggttcaggagcccaaatggggaaaaagatttaactgggagaccacgtagggggttgagttcctctttacacacagggccatttattnacacaggacaaaatttagtttattggggcaggggag

SEQ ID NO: 646409 - DNA, 482 bp, Homo sapiens
  misc_feature (23)..(23): n is a, c, g, or t
  misc_feature (50)..(50): n is a, c, g, or t
  misc_feature (66)..(66): n is a, c, g, or t
  misc_feature (93)..(93): n is a, c, g, or t
  misc_feature (181)..(181): n is a, c, g, or t
  misc_feature (219)..(219): n is a, c, g, or t
  misc_feature (223)..(223): n is a, c, g, or t
ggcatcttttccaaatagatgtnggttgaccccagaataaatggttaacntcctagaaagcaaaancgataccctgaaatgattcaaactganctttaaaaaaaattttttgaaataggaatgagtgtaaactcctagacagtatttctagttgcatatatgagtattttcccctgggtanagcaccctttgggaatgagtgggccaatcaaaaaatgnccanaggccgggcacagtggctcatgcctataatcccagcattttgggaggccagagcaggtggattgcttgagctcaggagttcaggaccagcctgggcaaaatggcaaaaccccatctctactaaaaatacaaaaattagccatgcatggtggtgtgcacctgtaatcccagatacttgggaggctgagacacaagaatcacttgaacccatgtggtggaggttgcagtgagccaaagatcatgccaccgcactccaagcc

SEQ ID NO: 646410 - DNA, 121 bp, Homo sapiens
gcatgtcagttggcatgcggagaaacatgataaacaagcatggccttacgtctatgagaaacattaagtcaggcatggtggctcacacctgtaatctcagcagtttaggaggccgaggtgg

SEQ ID NO: 646411 - DNA, 215 bp, Homo sapiens
cggttgggaatgtgcttggagcggtgacgctgcgggcatcggactggtctaccagctcaggaagatagaatttgaaagagggatagcgtgaaggggaatcaaggaggaggtgtgatatggtcgaaggtgcctggtttagtgctgtaatggtgttattattgctactgctatatactatagttttctgcgaggtaaacacttttacagtagagaag

SEQ ID NO: 646412 - DNA, 323 bp, Homo sapiens
tataactcgcatcagggagtatcaatcaccggagctcaccatagtctattaagaaaacaaccggaaaccaaataattcaagcacggtttattacaatttcagggggtctctatttacccctcctacaagcctcagagtacttcgagtctcccttcaccatttcggagggcatctagggctcaacatttttgggtagccacgggcttccagggacttcaggtcataaggggctcaattttcctcactatcggcttcatcggccaactaatatttccttttacttccaaacatcacttgggcttcgaagccgccgccggatacgg

SEQ ID NO: 646413 - DNA, 81 bp, Homo sapiens
ccatctcaaaccttttctctgcctgggaaattattttatgtttgtttttgaaataaaggatttagtttaagattctaaaaa

SEQ ID NO: 646414 - DNA, 369 bp, Homo sapiens
tgtatagttgaactagacacatgtaaatattataacatgagcagacatattagaggcacgtagcaattgaggctcaagacctctgctataccttcgagctatccaaacccagaggtgctacttcctgcaaagtggcagaatccaccgaatctacccataacatgcttttgatttttgtactcaaggacatctagggctagaaattgctaaagtacgcataataacatggcttagtatagaaaccaggagctgcagcccaagatctcggcagtaccatgtataggttatatgactctgagttctctctttttattagagatggagcctcgctctgtcgcccaggctggagtgcagtggcttgatctcagt

SEQ ID NO: 646415 - DNA, 157 bp, Homo sapiens
atgattgctcacgctcccaacactgtattcctcatgctgcacatgcctagtgctgagccaggatgcccgcacaccggtacagtcgtggccacctacacactccataggagatcctatttattacctcagaagtttttttcttcggagcggtggagca

SEQ ID NO: 646416 - DNA, 110 bp, Homo sapiens
catctcccactcactcactccactctgtccactccatcccccgtcactcactccactctgtccactccatcccgtcgacgcggccgcgaatttagtagtagtagtagacc

SEQ ID NO: 646417 - DNA, 590 bp, Homo sapiens
  misc_feature (103)..(103): n is a, c, g, or t
  misc_feature (435)..(435): n is a, c, g, or t
tctacacacacacgcacacatgtgtatacacacgcggggcacacgcacatctccactatctcgcgatatcgacagcagcggatatcgtctcgcacgaggcgcncacacacgtcgcacgagagcaccacagcggcgcctcgtgtctatatctctctacagcgcgcccgcagagagagatgctgcgtctgtgcacacagggctcgtgcccacgagagagtgtgtgtgtgtgctacagggcgctctagatatcgtgtcgcactagtgtcgctgtgcgcacaccagacgctgtgtcgcctttctcacacaccacgagacaccacacgtgcgagcacagagcctctgtgatcacgcgcgcctgtgcgctctctttgtagacacagagtgtgaatatcacacagcgtgtagagagcctatagggggccctttcgtgtctcncctgtgatatacgctgcgctcgtgtctctacacgagacgcgggagagcccctttcagagggcacgagaagacgcatcactcttctcacgatgtcactcatctgcagcatcgtcgctgtcgtggccgattattcgctacgaagcgccgggagtgat

SEQ ID NO: 646418 - DNA, 111 bp, Homo sapiens
  misc_feature (2)..(2): n is a, c, g, or t
  misc_feature (14)..(15): n is a, c, g, or t
  misc_feature (17)..(17): n is a, c, g, or t
  misc_feature (20)..(21): n is a, c, g, or t
  misc_feature (47)..(47): n is a, c, g, or t
gnaatccaagattnngnttnnaataacactgctgtagaacagtttancagctcttcagcatatgtccattttccttgaaggatgagcctttagaaacctctgacaataaag

SEQ ID NO: 646419 - DNA, 519 bp, Homo sapiens
  misc_feature (20)..(21): n is a, c, g, or t
agctcgcaccctcaatgganncttttaaagctcattatcaaaaagcactatcatagccagatgcggtggctcatgcctgtaatcccagcactttgggaggccaaggtgggcagatcccttgaggtcaggagttcgcgatcagcctggccaacatggtgaaaccccgtctctactgaaaatacaaaacttagctgggcgtagtggtgggtgcctgtagtcccagctactcaggaggctgaggcaggagaatggcttgaacctgggaggcggaggttgcagtgagccaagatcactccattgcactccagcctgggtgacaagagcgaaactccgtctcaaaaacaacaacaacaaaaaatgtatgcaatcttttcactgaagatttctctcctcatttcttgtatcattttttgaattttttaaaagttggacttcacccttctctggtgcctccttgattagcttaataatcacccttctgaattattttcaggtaaatcagggatttcttcttggttt

SEQ ID NO: 646420 - DNA, 253 bp, Homo sapiens
ttagttgtactgaacactagttcatactcgctgtcataaacgacctgtgtgtgatatttgttcccaaaaaacgtagcacccttcagcaggaccctataaaactttcctccagcccttgcctctttgcaggtagccccttctctgctgagctgcccactgcaacatattttcacaatttctctaataaatctgcccttctttacctacaactatcttggtaaatggctttaccacctgcaaaactgaccctagg

SEQ ID NO: 646421 - DNA, 1000 bp, Homo sapiens
actctgtattacgtccgtgttgccgggaagaaggaggactattacccggtagtcgttaagagctacatcgcaacaattcgcattgtagaccaatagcttggccgaccaagtagcccaagcaatcaccatgatgcttgagcacggaaggcagggaggggttcgtggtgaaggtcaggggcctacgcctggtcctgttcacccgagtcgagagtgactcgcgcttctttcttctcgattgcaaagatccgatttgatggccacgatcgaggtcattcgttctctagtcgtacgacccagagaacggccagaaccaagtggtgaatgcgatttgcttgaatgtatgaatcgtgaagcgaggaagtgaagattgggctcttgaagaaagggacaggagtcaaacctatgggacacagatacggtagagagtattcaatgtcgtaaccagtagtcgaaaatggcgattgggtgtgtggaagacattccaggtccgaataacgtcctagcatcactggtccaactgattggcttctgtcgcggcttcatagcgactcccaatgttcggctgtaagcaaacggaagcatgattagtgtccagtgtacttattcaagggtatggataattgtgcccagacattgggattgacaactagtcgagatgtgacgtttcaggggaggcgaagccaagagggtgaagccatcttgtgcacgtttgcttcacaggagatatgctgataaggccttatcagaaagctacaggtacccgaataggggcagcggtaccttgcagactcttccatgagtagtccgagcctggagttcgaacgaagtaattattaccccttggaaaaggttcatggataagaaacgggcaagttccctatgaaaaggcgggggactggtcaagggtctatggacacttggccacgggctgggtttgcaacaattcagggtaagcgatagagcgggattgagcgcaacaacccgggggcataagtgccat

SEQ ID NO: 646422 - DNA, 398 bp, Homo sapiens
taaattcgcggccgctcgaccatttaaaaaccttttattttacaccagctgcagtggctcacatctgtaatcccagtgctttgggaggctgaggtaggcagatcacctgaggttgggagttcaagaccagcctggccaacatggtgaaaccctgtctctaccaaaaatacaagaattagccagatgtgatggctcatgcctgtaatcccagctactctggaggctgaggcacaagatttgtgtgaacttgggaggtgcaggttgcagtgagccaagatcgtgccacagcacaccagcctggcacagagtgagactctgtttcgaacaaaaagaaaagtctgggcaaggtggctcatgcctgtaatcccagcactttgggaggctgaggtgagtggatc

SEQ ID NO: 646423 - DNA, 774 bp, Homo sapiens
gagctgagactgttaggagttgactctgatataccatatctcaaaagctgcacaggaggaaagcactgacaaagaaagaagtggtcattctttgcacgaaactggatggcttctacaggggagccaggcctctgatatagacgagatttttggattcttacaacgatggcgaacctcccaccaaaaagacccaggaagctgcttccaagcttaaaaactaagaagcctcgagaactagtgctagtgattggaacaggcattagtgctagcagtacgaagccccaagttccagccctcaaatcctggaaggggttaatatcaggccttacatggatgctgccattgattttgatcttaatagaagatgaggagagcaaaaagtttcagaaatgtctccatgaagacaagaacctggtccatgttgcccatgacacttatccagaaactctactcctcgtaccagtaatgttcgatccacattctcaaggactgttatatgaagtatatgatgacttggagtcacacgatggaagattctggaaaacagctaatatcagatcagttctcccacctgatggcaaaatggagccctacgtaataaaatacaaattttgctaagtctcttgggaactgtatgcagcagatcaggggaaacagcttgaatcccttgaacttactgatgaaaaccaggtctcgatggctcagaacagcgtcagcggccgtgtagatatacaggagattaacaagctacggcaagcttaaacggcggcaaac

SEQ ID NO: 646424 - DNA, 351 bp, Homo sapiens
  misc_feature (20)..(20): n is a, c, g, or t
gagagtctcactgtgtcacncaggatggagtgtagtggcaccatctcggttcactgcagcttccacctcctgggttcaatcagttatcctgcctcagtctcccaaggagctgaggattacaggcgcgtgcctaatcctggctaatttttgtagttttagtagagatgaggtttcgccacgttagccagcctggtctcgctcgaactcccaacctcaggtaatccacctgcctcggcctcccaaagtgctgggattagaggcatgagccaccatgcctggcaccaggtctcttttcattgtatactagaaaatgttgtttggacagaaccctccgagatgatagagtcaccg

SEQ ID NO: 646425 - DNA, 178 bp, Homo sapiens
tacgatgtagttcatccattgtggaaaacagtgtggtaattcttgaaagacctagaactttcattttcttatattgggttttttttgttgttgttgttgttttgagacaaggtttcactctgttgcctaggctggaatgcagatcacgggtcactgcagtctcgacttccagtgctca

SEQ ID NO: 646426 - DNA, 91 bp, Homo sapiens
gttcctgtttgggggttgtgagggaaaatcagcgcggattttaaaaagatggctgtgcctgcccggcgtggtgggaggggagctggtttcc

SEQ ID NO: 646427 - DNA, 254 bp, Homo sapiens
gtggagccgggtgagggcgccgagaggctcggtgggcgcgggcggcgagatatgccacacttctgcctgctgatggcaaccctcctggactaggctgctcttgataatcacatggatgttgctgattactctgagtgctaaccttttcactgttccagagaggcgcctgtcatcctcattctccttctcatgatttatgagttcggtccgaccagctcacttggtcagcttgctgctcctctgactcgctctcg

SEQ ID NO: 646428 - DNA, 159 bp, Homo sapiens
tggccgctcggcgccgccgccacctcgttagcagcttccgcgacttgggagctagaggcgagcagctatgttctgcaaggccaccctcgatcacgcccatggggagtccgtcgttctcgcggggaaagaacttcgaggtgtggtctacacacgcaccag

SEQ ID NO: 646429 - DNA, 1227 bp, Homo sapiens
caggcctcctggcagcacctgcgcagtgaacaggctggctgaggtgcacgggagcccgcccgcctctctctgcccgtgtcagtccgtgaaattccggccggggctccctgagatggccctcctgacagctttggacgacaccctccccgaggaagcccagggaccgggaaggcgaatgatactcctttcgaccccgagtcaaagtgatgccctgcgagcctgctttgagcggaacctgtacccgggcattgccaccaaagaagagctggcccagggcatcgacattccggagcccagggtccagatttggtttcagaatgagagatcatgccagttgaggcagcaccggcggcaatctcggccctggcccgggagacgtgacccgcaaaaaggcagacgaaagcggactgccatcaccggatcccaaaccgccctgctcctccgagcctttgagaaggatcgctttccaggcattgctgccagggaagagctggccagagagacgggcctcccggagtccaggattcagatctggtttcagaatcgaagagccaggcaccggggacagtctggcagggcgcccacgcaggcaagcatccggtgcaatgcagccccaattgggtgacaccctgctctctcgtgggtcgcctttgcccacactggcgcatggggaaaggggcttcctgcaccacacatgctctcccacagtgggctttcgtgagccatggattgagggccgtccctgtgctcctgcccagccaggccgcgcaggcagaagggatctcccaacctgccccagcacatggggattttgcctacaccgcccaggctcctccagaaggggcgctctcccacactcacactcctaggtggcatccacacaagggcaaaatccggaaggactgggacgcgcagcgcgacggccttccgggcacttgcgcggtgggacagcctgggccctctcaagcggggccacagggccaaggtgtgcttgcgccacccgcgtcccagggaagtccgtggtgggggtggagcaggggtacccaggtcgccggtgtggcgtggaacctcaagcaggggcaattccacctcaccagcccacgcccccagaggcctccacacggcaggggcagatgcaaggcatctcagcaccctcccaggcgctcctggagccagggtgctcgtctgcactccactccatcctgctgctggatgagctcctggcga

SEQ ID NO: 646430 - DNA, 233 bp, Homo sapiens
catttgtacttagtagagatgggttgccatgtgcaggctactcttgaactcctgagctcaggcgatccacccgcttcagcctcccaaagtgctgggattacaggcgtgatccactgcacctggcctcaggtatgttttctatctacacacaaaaagtttattttccttcctcttatctgatatcagaagaatgacaggaatgaatacttctggtccctttgcgatataggttt

SEQ ID NO: 646431 - DNA, 431 bp, Homo sapiens
tgaaacagagtctcactctgttgcccaggcgggagtgcaagggcgcgatctcagctcactgcaaccttcaccttcggggttcaagcgatcctcctgcctcagcctcctgagtagctggaataacaggcatccatcaccatgcccggctaattttggtattttaagtagagacggggtttcaccatgtgggccgggcgggtctcaaactcctgacctcaggtgatccactcacctcggcctcccaaagtgctaggattacgggcgtgagccaccatgcccagcctagaattgtttcactaattagtaatgtagtcttctaaagggaactattactttgtcatatggtgtttccagacagtattttttcagttaaagccaagggaataacttcaggatcctctgcctggggacccctctcgttcagctgaaaa

SEQ ID NO: 646432 - DNA, 247 bp, Homo sapiens
tccttaccaggtgtggccaaagtcagatattcttcttttgcagggattgttaccccttcctgccttcttcatgctgttatttgttattcttgatacattgatgttatgtgttgtggcgactgtccctgatagttctcattttcccagaaaccctgttactgatataactgtgcagccttggtgaccttaaatgttcacgcattggcactaatttctgcatgggtcatggtgcccaacggagctgtca

SEQ ID NO: 646433 - DNA, 1472 bp, Homo sapiens
  misc_feature (1326)..(1326): n is a, c, g, or t
gggttcgtctgtggtgtgtgtggttgtttgtggtggtgtgtttgggtgcggtggggtggtgtcgctacctttaatcagagtggtcggcgaggcgagcgaggaggacgagagcaggcgggcgagcgagcggagggaccgccggcagcaagaaaaaaacattgtcagactctctctatatactggctggttgagtcgatggaggtgtcgtgcttgctctgtcgcgtgttgaggtgatgaccagccccccgcctgtcctttgttgtttgtagtagtaagcgctgtcgtttttgtgtgttgtctcacccccttctttctgctcgctcgcccggtagaagtgattattgctgctcgtccgccgggcccgcgcccctcatagtgtgtgtgtccaagaaagtgtcctgcggtgcgcccccgaagagtttgtcgcccacgaaagtgcgggggcgcgcgcaaaaaaaaagactaccgagggtgtgggtgcgtccagacccacacggagtggtgtgtcttgcgcgcccccttctctttttgtgttggcggccccacaaaaaatatatgtggtgatgataaacaaaaggccggtccccgccacaaaatataatatgtgggggataaaatatagggggagagaagcttgtctgccacctctgtgggaaagactctcgtgttttaagtaagggtagctgctcggtgggtaccccccccaaagggggggaccctgggggagcacacacagtttgcgtaacacgtcgggtggtcgttataacacgacgggttggttcccacaaaggagacgcctgtttttgtgtgtgaagacaactgttggtgtggcccgcctctccctctggatggtgttccctctagagaaatggtgagaaatacttctgcgtgatggaaatagagatgtcgctagaaatgtcatactccccgtcgtttggcgacacagagtttggcggaaaagttgggggcacccgccctttgtttaaccctggaggcgcgatatatatttctcccacagagagcacctggttatataaattttttatctcttggggagtaacctacttttgtgaaaagatgtgatgagatgagatgagcttatatgagatgagaagaaaggttgttaaaaaccccggcgatgtaaggagaaggggcggaaaaaaaaaagtgagaaaatgtgaggaaaatatgagatcccacagcctattgtgcgcccacacgaaagggagagccacaaccccccccacagagggggcgcacagcacccacacgtgtgaaccaccggagaggggtcgaacaccttctctgcgctctctcccgctgganaaagagataggaatttaacacaccacctttttccacacagcctctctttttcacacaatatatattgtttgtgtttttttgtgcctgtgtttttgtgtttttggccacccttaaaatataaaaatttccaacttccccacaaaaaa

SEQ ID NO: 646434 - DNA, 544 bp, Homo sapiens
  misc_feature (27)..(27): n is a, c, g, or t
  misc_feature (110)..(110): n is a, c, g, or t
  misc_feature (118)..(118): n is a, c, g, or t
  misc_feature (120)..(120): n is a, c, g, or t
  misc_feature (134)..(134): n is a, c, g, or t
  misc_feature (137)..(137): n is a, c, g, or t
  misc_feature (140)..(140): n is a, c, g, or t
  misc_feature (145)..(145): n is a, c, g, or t
  misc_feature (149)..(150): n is a, c, g, or t
  misc_feature (171)..(171): n is a, c, g, or t
  misc_feature (174)..(174): n is a, c, g, or t
  misc_feature (182)..(182): n is a, c, g, or t
  misc_feature (201)..(201): n is a, c, g, or t
  misc_feature (204)..(204): n is a, c, g, or t
  misc_feature (209)..(209): n is a, c, g, or t
  misc_feature (215)..(215): n is a, c, g, or t
  misc_feature (221)..(221): n is a, c, g, or t
  misc_feature (224)..(224): n is a, c, g, or t
  misc_feature (229)..(229): n is a, c, g, or t
  misc_feature (231)..(231): n is a, c, g, or t
  misc_feature (359)..(360): n is a, c, g, or t
  misc_feature (386)..(386): n is a, c, g, or t
  misc_feature (412)..(412): n is a, c, g, or t
  misc_feature (462)..(462): n is a, c, g, or t
  misc_feature (483)..(483): n is a, c, g, or t
  misc_feature (509)..(509): n is a, c, g, or t
aagaaaaaaaggaccaattgttctttnatcacacagccaaaaacagagagagagagggcagaccccacaatttccaggggcattctggaatggttgagatatggggtttngggggggngnaatgtattgtgttnaanatngaagnggannatgagatgtaaagaaaacaanaanggcaatancttatattcaaatctgtantantgttnctttancaagtnaanctgcngnggaccttttgtctaagattcagtagtgttttaaggttctgatatcgaattaatgaagtaaagttgttgatggtggtgaaacaccgtagggcatgtggttcaaagagaagcaggagggcaagggaaagnnaccctgatcttagtttgtagcttatnacttatttaatgaatggatgcccagncaagctcagagtaggcgcccaaagcatgtggattattttcctgttttgtnctttttttttttttttttttnagaccataacattcccagaagagganagtgaatgactacgctaggtcggctcttatagtgt

SEQ ID NO: 646435 - DNA, 933 bp, Homo sapiens
aaggagccctcaccagtgaaacaagtcaacccctagctaagcgtctagatcatttgcagcggtgctcgtacgaacactttataaactacttaactcagtgccattgctatcatgtggcacgcagtttgagctgcgccaaaaccatgaagcaactctgcatgaaaatcacactgccaacttcctccatggcttatcctagtctcgttgctatggcatcctcagaagtactagtgctaagacatacacgagtatacaagctagaatgaagcgagttggagcataggttgtcttgcaactgaaatctgctgtgcgcaagtgtggtcaagcagatgatcgagcgtgttcgccgaatattatcttcttcaccttcagcaggtggattcgcactcatccagcgttacgatacgatgattgcagagcattgaccagcgaaagtaaagatcctgagagaaagagactcttcaacgagaggcatcaacttctaactcatctcgccaggagaggcctccatgtgaaacccttcagttctcagctcggaacatggctcagatgccaaagtatttggagctggttatccaaggtctgtccaagctatgacggtgagtgactgtgtatgagcaacatcgcgaaatatggatgcattaccgtaatccgggacactagccaacggcagcgaccagaggaattctgaaaagcagctcagcaacaggaagaacaagaagcaaaaggaggaagcaggatgactgaacataaatccacagagcccgggagtgggatgactggaaaggacacccatcctaggggctatgggaaccgacagaacatgggctgatcttcccacaattaccacaggactgcagggtgcacgaattcccctgccaaggaaaaccatgcagtccttccctccctggtctcctgcttccagtctgtaca

SEQ ID NO: 646436 - DNA, 233 bp, Homo sapiens
gggactagaaggcctcgcacaggccaggcaagcagtggctcacgcctgtaatcccagcatttggggaggccaaggcgggcagaccaagagttcaagagatcaagatcatcctaaccaacatggtgaaaccccatctttactaaaaatacaaaaattagcggatgggagaagatgcgccaatcttcgtcccatcagtacctaagtgatggggagtataaggcatgaagggtgtt

SEQ ID NO: 646437 - DNA, 504 bp, Homo sapiens
  misc_feature (94)..(94): n is a, c, g, or t
  misc_feature (97)..(97): n is a, c, g, or t
  misc_feature (100)..(100): n is a, c, g, or t
  misc_feature (105)..(105): n is a, c, g, or t
  misc_feature (109)..(110): n is a, c, g, or t
  misc_feature (131)..(131): n is a, c, g, or t
  misc_feature (134)..(134): n is a, c, g, or t
  misc_feature (142)..(142): n is a, c, g, or t
  misc_feature (161)..(161): n is a, c, g, or t
  misc_feature (164)..(164): n is a, c, g, or t
  misc_feature (169)..(169): n is a, c, g, or t
  misc_feature (175)..(175): n is a, c, g, or t
  misc_feature (181)..(181): n is a, c, g, or t
  misc_feature (184)..(184): n is a, c, g, or t
  misc_feature (189)..(189): n is a, c, g, or t
  misc_feature (191)..(191): n is a, c, g, or t
  misc_feature (319)..(320): n is a, c, g, or t
  misc_feature (346)..(346): n is a, c, g, or t
  misc_feature (372)..(372): n is a, c, g, or t
  misc_feature (422)..(422): n is a, c, g, or t
  misc_feature (443)..(443): n is a, c, g, or t
  misc_feature (469)..(469): n is a, c, g, or t
gttcttatccagccaatactgggagtgctgtctccacaatttcaggccatctgaatgtatgatgtggttatgtgtgtgtgtatgatatgtgttnaanatngaagnggannatgagatgtaaagaaaacaanaanggcaatancttatattcaaatctgtantantgttnctttancaagtnaanctgcngnggaccttttgtctaagattcagtagtgttttaaggttctgatatcgaattaatgaagtaaagttgttgatggtggtgaaacaccgtagggcatgtggttcaaagagaagcaggagggcaagggaaagnnaccctgatcttagtttgtagcttatnacttatttaatgaatggatgcccagncaagctcagagtaggcgcccaaagcatgtggattattttcctgttttgtnctttttttttttttttttttnagaccataacattcccagaagagganagtgaatgactacgctaggtcggctcttatagtgt

SEQ ID NO: 646438 - DNA, 407 bp, Homo sapiens
  misc_feature (61)..(61): n is a, c, g, or t
tgaaaaatccttctggaaatggcaggcctctgggtaacccaccctgaaacatggcacctanaatgtaaaaaaacaacacataggcctccccaagacatgcacccctcatgggattcccagacccccctgtatgatgccttaagtagtagtggccctacaaatctgtgggtgaacagaacaggagacttctggactgacagcccctgtcacaagggggcattatctgagatattggccagggcatatcgtgtccctggtcttttgaaactccatttgtcggccaggtgtggtggcttacgactgtaatcccagcactttgggaggctgaggcaggtagatgatgaggtcaggagttcaagactagcctggacaatatggtgaaaccccgtctgtactaataatacaaa

SEQ ID NO: 646439 - DNA, 827 bp, Homo sapiens
cttggtggctcatgcttgtaaccccagcactccgggaggctgaggtgggtggatcacctgacatcaggagtttaagaccagaccggccaacatggtgaaaccccacctccactaaaaatatgaaaaattagccaggcatggtagcgcacgcctgtaaccccagctacttgggaggctgaggcaggagaatcgcttgaacccgggaagcagaggttgcagggagccgaggtcacaccactgcactccagcctgggcaacaagagcgcgactccatctcaaaaaaaaaaaaaaaaaaaggtttgggccattttcttcccattacggctaattgagaaggctggtttgggccaattcttggtgcgcagattttgtgggtattaaccggggaacgctctcccacggattggtcttagaaaaagggcgccttggcctcgtttaaccaaaagaggggctggcgcaaggcgttaaacttggccattactcgggccccctggtagggacgtttctaaacttgtggcgtcagttaaaccccaggaagggggactcggcggtgtccctacccatggaagggaggaagggcttcttaactaaccaggggcaggtcctatgtctcctctaccacaggactgcgatcatttatggtaactgtttccagcgcctaacattgagggacgttcttcctaatcgtggctacactatgggcaatttttaaaatactcttaaactcggaaaaccctcttttgtgtgtccatttccataaaatccaagcgcctaaattttaatggctcaccattttaggaagcccttttgaaaagtccctgtgcagg

SEQ ID NO: 646440 - DNA, 341 bp, Homo sapiens
  misc_feature (49)..(49): n is a, c, g, or t
  misc_feature (68)..(69): n is a, c, g, or t
  misc_feature (230)..(230): n is a, c, g, or t
  misc_feature (301)..(301): n is a, c, g, or t
gatgtactagaagatgaagtgtatgacccagaagatgaagtgacaaggnccattagcgaggaactggnncaacgcactcaatgacatcacctaccctgctgagccccacgccaacgtgaccacctcagctctcttctctcctctcctttccattctctgctatggggaggggagcaggcaggaggagcagaaattggccaacattgcacagccaggctggggagcagccnagggagagcccccatgcatgcccaccacccactctggcactggcttgcatacctttaacctatgccccttnccaccctcctttggctgctttaataaattctgaacttgga

SEQ ID NO: 646441 - DNA, 252 bp, Homo sapiens
agtgtggtgttatgcatataatgtcagatcatttatgttttgctattgagttgcatacattccttatatggttttagtactaactccttatcaggttgtgatttacaaatattttctcccattcagggtgttgccttttcattttgtcctttctttggctgtacaggagctttttaatctaatgtaatctcacttgttgatttttgcttttgcctttgttttttgtacattcattcataacaccacacaatt

SEQ ID NO: 646442 - DNA, 1005 bp, Homo sapiens
  misc_feature (519)..(519): n is a, c, g, or t
gagcgggttctcagcgccgcgttggaattcggggaggagcggaacggtgctggagtgctctgctcgcgatcgccaggtctgcagtcgtccagtgttcgcggagcactgagatgctgcaggtgactgcagggcacagcgtggcagcgggcaccggtcgatcctggaaagaagccggggtcccggtgagttggcatgctcccggagctcctgtgcgagcggacatccaccgtgccgagaagagatcccggaggctcctaggtaggaccctacgacagccacggccggtagcctagtgtgcaggtggactcgacttgtattctgtggacataaggcggcgtgctctctaggcccaaggatggcgtgtacagaagtactccgtcggtgaacgcagggacctagcgcaacggggagggctgggtctcctgcgtgtgcctagaaggaatctaggtgacaccgttaacgttcattcgtaggacttggctttgcgaatggcccgtcacctcgaagaaggggcaggtnacgaactcgttgcgcaacttgggacatagtgattcgcagttgtcaaaccctgggaaaggacattcggctcgctccaaccacaacgtacagcgatacggataaagtgattttcacatacagaggtgtatggtacatacgagaagtgaatcaaacatggagagatctccatgtgttggtttcgcgatggaagttggattgtgggtaagggcgtacttggaccttcgagccagaggaagggagatcgtcctactctgtagtggcaagtccgttggaccatccatacggacgacgtgaggagtagagaaggcggccctggaactattgcacggtcgctttggaggcggccgccagggagtaggcgttaacccgttaccagcggtggaacagttggtggtagcttggaggggtgtgtggccgaaaatgaccgcgtgtgcgacccggagatagcgccggaagttgttagtgtacaatacggaaagacccgtc

SEQ ID NO: 646443 - DNA, 119 bp, Homo sapiens
gcatggttctgttcacaccctcagccttcctgagagcacactgctgcaggctgtcgacgcaacactcaggtcattgatggctttttttgtgcagctgcacagcatgacacttaatggag

SEQ ID NO: 646444 - DNA, 203 bp, Homo sapiens
tcatctcgctcagaaccaaattcctcctcactgtcctcttttaatcttcacaacaatcctgtgatagtaactaattttttatctcctttttttttggggagggggttttgggctgtgcccccggtgggggtgggcgggggggggtgctcggtttgctgcgggttcccccccccgggtgggtgcctgccttttgcctcactctc

SEQ ID NO: 646445 - DNA, 1002 bp, Homo sapiens
tccccccttttttttcctttgtgcctcctctctcctcttttttcctctcccggggggggggggcccggggggccccctgggggggggtccccaagggtgtccccccttctttaaagaaaaaccccacccgagagtaccctcaaaaaaaagagggggggtcgcacaaaagagcacgggaaagaaacgacttcccacgaccctgaggcattccccacaccccctctcttatagggagacagggaagaccgaacagaaacggagaacttacgagcgagtagatcaggggcagagagagaagaaaacgggttcgccaacaacacaaccggagaacaccaacacgcaatgtaccgcaaaacaaaagaacgcccacgaacatcacacaaacagagtggggggtccacaccacgaatggaggcgacgagatgtaacccggccgcataagagaaataaccgacaagcaagcaagatcacctacaagacaaacatatcaccccagaaggaaaacataccaatgtgacgcatacgcggaaatacacaacctaccaacgcgaacgacccacgacgcccctatatgtgcgggacccacggaaaaaccccgccgagagttaggagacactcacccccccacaaaggggagcattctgtggcacgcacatcacctacacacaaacagccccctcacatcaaaagacaagcggggagacaagaaacaccccacacgtggggcgacgtccacacagaccaccttcactcatgagaacgacaacgacggcaccgactggggggacaaatacgacgcaggacaaactgggacaatacataaaactaccccctacgacgacgagcagggaccccgccccgttagcaccccctttgggagcgacagcacgaaaaacaaaacagaacgacacagcacctaccaaaacacttattgactccgccgccgcagggagtgaactaacacccgcggacaacacgcgggacatagaacttaagaaaccc

SEQ ID NO: 646446 - DNA, 123 bp, Homo sapiens
tggcgatcatggcttgggccttcggcgtgtgcagtgtggtgcctcggcgtgtgcatgcacacgccgatcttcacgtgcacacgccgaaaaaccatacgccatttcagggagtcaccgagctcg

SEQ ID NO: 646447 - DNA, 706 bp, Homo sapiens
acttgtgttacacagttgtcactgttcctagatgcacacagcttgtcatggaacagcacgctcagaacgatgtgacgtagagtactgctgctcacctttggtgacctgatcaatcccaggccttttttaaattcgtaatcccacaatgcagcacatgatgccagaaatagcactgaatcaagaaaatagccattgcggagctgccctcttgagtctttctgtccatcccattctattctgtactgtgacttcagttcaggaagtttggtaaggtgtattaaataaaaggaaagagcaagtttgctcagtcaagtgatcagatcccgaatctagattcccagttctaaggccttatcacctcccctgcccataggccaacaaccatagttcctcacattagtgattagcagactctttgtggacgagtgaatatcacaaaacagcacaatttcagaagagatcgagggcacaggcccctcatttttcttcttttgacgcatcatcctgtgatgttgaaatgtcacttgcaggatgctattgttgtgcacgtatatcacgggcactgatactctagaacagtcgactggaactgctttccttgaatctttgggtgcccaggattcgtaggccggattaaaggttttcccactaggaaaccttaacaagaggatggaaaaaaccctttttaaaaggcaaggtatagtca

SEQ ID NO: 646448 - DNA, 1668 bp, Homo sapiens
ggcgaggcgctagtgtgggaacgctggcctctgaaactagctctgggaccggggtctgctggccgtgccctagactggcacccgtctcccatccccagaagggatactcagatggggattcatgagcctattggataatcaagatattacacaagacacgagtgattcccatttcgtacagaatgcgtggaggacatggacatgcatactcactactcaatggatgatggcaaggagcagacgcaatccgtggccagcacctgcacagcaacacaccacttgcgcacttggtcagcgcagcacacacagggtcacacagcaagtcaaagcagcaacagcagttggcgtctcagtcgcacagccaggcctcgcacacgcccactgggagaaacatacaaccagcatgtgagaagaagacaccatgactggtggcccagagcgcatgccagcccaaccaataccactcatcaccaactcattcaagcgggctgtgacaccggcgacaagcatgagccacacaccacccaacgtctcatcgagtggacacagggcacctcgcgcacgccacaccactcccacccaaacacacgatcaccaccgcgccaccgcgacagacacacgacggcccacagcgagcacgaccatcacacccgccacacaccacaccccactccaccacacaccgcgccaccagcccccaccccgcgactccccccgcccccgccacacccccgacccccgagccgcggacgaccctcacgactcacttgcccccggagaacaacacagcaggaacaacgcgccaaacaacagcccagcccgcgccgcacaagcagcaagagcaagacgaaaaaccaccaacgcggcaacacaccacgaacaccagaccaccacaccacaagaacgagcacacacaacaccgcaacacacccaccacagaagacgcacaggcacacgaggcacacggaacgagacgacacaaagccgccgacaccaaaacggcaaaaccgaacccaccaacacaggaagacaaaagacggaccacagaacacacgcgcaagagccacaagggtacacagagcccgagaaggacaacgaacacccacaccaccaacaccagcaagccggatccacaagaccgcaacaacaacgagacaccacgcacaccacacgacgacaccacacactgagcactctgacaagacacacccaacgcgccgacgaccgagaacacacgaaaacaccacacaacacaaaccccgccggcaccgcgacccacgcaggggagagcggagcaccgacagcgcacaatgacgagccgccaccgccagacgcccgtcagcgccggcaagcgccacgagcgcgacgagcaccggctgccgcgcgacacctgagcggacgaaggacaggagacagtccagagaggagagagcgcgggcccgcccagcctgagaccgcggagcggcccatgaaccagacgcacggagaggcacggacgccaccgagacgacgagacgggcagaagcagacaagccgagagaacggcccccaccgcaggcccaacacagcacgcgagcggcaccgggcagacgagcacgacacggaacccacagacccagcgacgaccgacgacacggacgagaccagaccgacaagagagcgagagaa

SEQ ID NO: 646449 - DNA, 123 bp, Homo sapiens
attacgaacacaaacttgtgtaacctagcaacataaagaataaaataggaataagcttcatcacctagttggaagccttgtaccattgaaaattataaaacactgcttaagtaacttcaaaca

SEQ ID NO: 646450 - DNA, 145 bp, Homo sapiens
  misc_feature (95)..(95): n is a, c, g, or t
  misc_feature (143)..(143): n is a, c, g, or t
taattgtggtataagatggtttcagttgactggcttcatttttggaagatttcaggggccagggctcagcccaaacactcctggactggtgtganttaatgctaaaaggctggtactgggccccaagtctatctggctccctnga

SEQ ID NO: 646451 - DNA, 416 bp, Homo sapiens
  misc_feature (75)..(75): n is a, c, g, or t
  misc_feature (101)..(102): n is a, c, g, or t
  misc_feature (145)..(146): n is a, c, g, or t
  misc_feature (243)..(243): n is a, c, g, or t
  misc_feature (318)..(318): n is a, c, g, or t
gaaacactacagcaacccaggttgtcctgaaacagacttttatacttgaacatggagactgcacatggactttangcggtttgtgctgttggcgactaaanncggaagcctaccaagtgagaaccataagggccagtcccaaaanngacaatttccaacacgaaaaacatggacaagctaaacgattttaagcttggggcaaggttaaggtttcctttttcttgggaaccaaagggttggggntttttaaactttctttgcggaaattaacctttggttcttcctcaaagagtttgcgaaacgcgagattggtacaangctcattaagccggctcaggattagccttttaaaaacggtttgctaggaaaccctttcctttggttaaccaattggaaagtccttttccttaagggcc

SEQ ID NO: 646452 - DNA, 420 bp, Homo sapiens
catacgtcgacgagtcgaggccagctatgtcggtgtctatgcgtgcttgcttagcacagccctcatcactgcaatgctatttgctttcatgatgatgacgggcctgggttctctcggaagcaaggtaggtagcgcggtcggtctatcaccttcatatgcggcgtgcaaagcgcagtatcagaaatcaatcgagactggatcagatgtaaatccgaagtgccaagaagttatggaaaaggcgggtgaactatgatgcccaccatattccaagttctgagcgttctcggaaaaattccggggttgaagcgatttgttgatgttgaagcgtcaatacaagagcgcaccaatgaagtaattcatgaagtggtcggcgcattcgatgacttcgttaaagtcccagtcgacgcggccgcgaattta

SEQ ID NO: 646453 - DNA, 520 bp, Homo sapiens
ctgtcctatcaagacagtgtggtagtcatgtcatgatggacaaacagatgaagggaaaaaaataagagagctagataacagacccacacataggtggacagctgatttttgacagaagtgcaaaggtaatttagtggaaatagtcttttccaaaatgagtgctggaataattggatatccataatcaaaaaatgaactgcaagccatactttgcaccaaatacaaaaattatctcaaaatgagtcatagacctaaatgtaaaacctgaaactataaaacttccagaagaaaacataggagaaaacctctgtgacctatgattagtccaagatttcttggctccaaaagcatgctccataagagaatgaatcgataaattgaacttcacaattaaaaatttacattaaaaaatactctttagagactgaaaagacaagcaaaatactaagagaaaatatttgcaaataatgtatttaatgaatgacttgtattcagaatatatagagaattctcaaagctc

SEQ ID NO: 646454 - DNA, 498 bp, Homo sapiens
atcccagatcacgagcgtcttaaaccccgaacgaccaaaagatagtaatgtacctgtgcccaggtcctgaatcactcgcagaattatggaggcttactgtggcctcacaccactttagaattgggtctggaaatcaaacttaagaaacaagagattgtaagccattttatactatcgacctaaattccagtctaacagttcctttacaaagttgcgtaaagcccccttatatgctagttgtaggaaatatagttattaaaccagactcccagactataacctgtgaaaattgtagattgcttagttgcattgattcaacttttaattggcaacaccgtattctgctggtgagagcaagagagggcgtgtggatccctgtgtccatggaccgaccatgggaggcctcaccatccgtccatattttgactgaagtattaaaaggtgttttaaatagatcccaaagattcatttttactttaattgcagcgattatgggct

SEQ ID NO: 646455 - DNA, 549 bp, Homo sapiens
tggggcgggatttcttcctccccgcttcttccccctctcagtccagttcatgtggttggtggtcagcaggcttggagagtggttctgtgctttttggatacattatctgttgtggtggccccaatgggacgggtcttgtggagccaccttgagccccaaaggctgggaaattcctcacgagctgctcatgtcaggagccgttctcgacttgctgcgggcgtgtccaggttgcgtccctgcaccacaaagcctctggaaggtgcctatggcctcttcggtggtgcggggggttacattgtatacctgcagcgcctcattgtccaccatgtcagctaggtattcctcctcgagatagaggatgtggtcgagggcttcctccacattctctggggagccccgtcacagtgaaccgcagttggggtctcggggctccggctcgtgtgggaagggaatgtcccagcttgatttcggccaatgatttatggacaatgggtttgcggtggccaccattgattcgggtgtagacgcgggtggtcccagcgggacgtc

SEQ ID NO: 646456 - DNA, 422 bp, Homo sapiens
  misc_feature (377)..(377): n is a, c, g, or t
taataactttaaatatttaaagattaagttaattaagggtaaaaaaaaaaaaaaaaaaagaaaaaaaagaatgtttaaggatggtaaatgaatatgtcaggtgtggtggggcatgcttgtaatttcaacactttgagaggcttaggtaggaggattgattgagtctaggagtttgagataaggtggggaaaataggggaaatctctatttttatccaccctttagaaaaaaaaaaaaaaaaaaaagaattagctggtgtgttggtgtgcacctttggtcccagctcttcaggaggctgaggcgggaggatcactttagtttcagcctgggaggttgaggctacagtgagccataatccgtgatcacatcactgcacnccaccttgagtgacagagtaagaaagaccctgtctcaaaaaaaaa

SEQ ID NO: 646457 - DNA, 219 bp, Homo sapiens
tagaggactccccctgtgaggctgcagtgcagctagaaaaagcaggcagaaaaatgtggaatgagaaggcttgctgagtcttctggtcttcatctttctcgcatactggatgcttcctgccctcaaacatcggactccaagttcttcagcttttggactcttggacttacaccagtggtttaccaggggctctcaggccttccatgacagactgaagac

SEQ ID NO: 646458 - DNA, 162 bp, Homo sapiens
gatggctgatggtgatatcgtgataatgatgatagtgatgatgatggtgatgacgacattgatggtgaatggtgatgacagcaatgacggtggtgatggtgatgatgatggggatgaggatgatatgatgatgatgatgatggtgatggagaaaggtgatgg

SEQ ID NO: 646459 - DNA, 1792 bp, Homo sapiens
gaaggcctgtgatcagagaccgtggcatgtagtaacgagtgatgcatacgggatataaagggaaatcctggtattgctggccaagtggagtgtgagtacactagagcccatgctaggacaacagtgcgagtatgcacaaaacataactcaggcacaacgaaaccgctagacacgcgatgcctgcgaatgatgtctccatagtagacacggttgtggtgtccttggatcgagtacactcgtgtcgataacgctaaacttgcgttcgcactctcggtatgcatgagtaatgtaagagtaatctaagtatctcatctaaatccataggtttgttattaagagagatagtagctaggaaaagtttattagatatgtttgatcctttttcttgtttatctcttttatgtaatataaaagcagacatatctttgtgtgtgatctattaggcatacacgctaagcagaatacatttttttcgacatggggagcttgtatctaatgagagtgagagaattagtgtgtgctgataactgagatatatttatatacttaatgacaaatggagttacctacccccaggatgagtatgcgttgttttatgggacatgatgattctgagtgacgaaacacagttcattgctccttttttcttcccttcctaatcacagataagatatcactgagataagagaaccacggttgttttctctgatccttcagtagcagcatcatcaaccaccacaatagagagaggacgcagactgtgacgaatatattacccatctgttgagacgtccttgttgtgtagaaacacagcaccacaccatatttggggcataatcctcctgcttgttgtgggacaacagacgaaacaatgaacgacccctgatgtgatggtgaagcctacatgttaatggaacacaacagcagctacaacatcttgtagggggagttctaccactactaacgtggtggtgcgcccctcccaatataacaatttcgccactgtttatttcccccacagataacatttattctacaaaggacacgcatcatttatggcacaccactattagagactgttcccccccctttatgaagaatgtcgccccccaagaaaagcctacttttccatggtctcagtgcggacaggagaaccaccattggaacaaaccggccccctctaaggctctgctcaatcgtggaggtcttacaaacctgcccaacggcttggagtttggctcacccaggtggtgcacaacaaatttcccgtagtggagacatgcttatttgtgccgaccaaggagttagaacaattgggtgcgccgacacacgttgtgatacagatcagttggtgtgtccacacccgtcgtaggtgtttcaccaaacaccataagaaacaacggcgcacagtagatgtgaggtgattccccacacttattcttcattcaaacacagtttgcgtgctgggcggcaactcctttcttcacatggacaacttaagacaacgttaatcaccatgtcgcccaccacaatttttctgtccgaacatttagatccacgctgattttccccgctgtgcagaaacgccaccaacagcggtggacagcgggacgccactactgtgtggtcgacaacccactacagctgtctgtgggtctatacacacccacacacaagcagtcagttgtgcctaatacacgtgggtaaactcagtcgtgatgctacgttacaaatacacacagctcatagcaagcatatccattaatgaaaatttattttcccccacctgatg

SEQ ID NO: 646460 - DNA, 204 bp, Homo sapiens
agtgtaaaaaccaacagtgatgaactatgacaacccaaatgtccagtcagtgaacaaatggatgagccaaactgtggtctatctatacagcagaatacacttaagccaaagaaaggaacaaggcactggtacatgccaccatgtggagtgagcctggaaaacatgctgctgagctggaagaagccagactatagcaaggccact

SEQ ID NO: 646461 - DNA, 389 bp, Homo sapiens
tcgacggaggccacagttgggcccaggacggacctcagatctatccacaaagagctctgccttagggatccatcccatatagaatcacaaacccaggaaacttttgtggatgtcaacaagtgcttgctgacattagcctgaaatagctgtcttctgagaggctctaccagtgcctgacaaatacagaggtggatgttcacagccatccattggactgagcacagggtccccaatgaaggagctagagaaaggacccaaggagctgaaggggtttgcagcccactaggaggaacaacaatatgaactaaccagtacccccagagctcccagggactaaaccaccaaagagtacacattgtgggactcatggctccagctgcagtcgacgc

SEQ ID NO: 646462 - DNA, 108 bp, Homo sapiens
tgtggtgtagagtctagaggatcccacttcggtccggtcggacacagcgcataaatggaaggggctcctggtcacagcatcacttttaaacttctgaagggagccacg

SEQ ID NO: 646463 - DNA, 701 bp, Homo sapiens
agcgatgacgctctgtggaacccacgtttgtggtgggagggctaggtgctagcggtggggttgacctgggtctttaaccaggacggcttattcgcagccctctacggactgagcagcaaggcacccaacaccgagagacgacaaagtgcaggggacactctacctactcagcgaggggacctagcaaggctcaagacaggctagccgcaagcaccgagatgaagtggcagccccagttgctagagaccagcccagctagacctgttttggggtaccagggtgtggctcgccctctgccacttactcgaatattctgtggtggctgctttttaggacccaacaccaggggcccagcagcctggtgaccaggggacaggtgcctgcacagagtccaagaggatgcctgccacaacccagtggcaaccaacagctttcctgttcctgagtccccagaagttccgaggcccagacattaccccatgttatgccagattttagggtccagttgcccatttaaagacacagtcagagtcacgggcatgaaccagcccgtgacacgggcacccggagtaacttctagtgggaggtcttagggtacagcccgaccacgcagcacgtgcgcacacggtgacatggcaagcaaccagcacctgagccaagtgcacaacctcagactgactacgcaacacgaggaaccagta

SEQ ID NO: 646464 - DNA, 1139 bp, Homo sapiens
tcgttttttcttggcgttgcctcccgctctgctgacgtgctcttccctccttgtgtggtcgtctgtcctctcgtgttgtctcttgcttctgtctcctctgttcgtcccctcgtgtttgtcttctctcttgtggtctcgctcgtggtgtccccctctgtcctttgtctctctgctattgtgagcttgccttgtggttgtatcctcctttatattactcccttctatgtctgcttcttttcttctgttgcgtctgtggccttccattgcggttattgtgtttttttttgtgctggtggtctcctcttgggcgtgcctcgttttgttttagttttcttctctctctcatttctctctcgtgttccttcctctgtctttttgggtgtgttcttgtcttccgttgctcatctatgtttgtggtctatgtcctatgtgtccctcttcatatcggtttgtttttcttcctcgctgttgtctccccccctctttcgctccagtcgtgttttcgcgtctgtgccctactgtttgttggccctctcctattgtgatggtcgctgttgcgttttgatctttagcccctttggcgtggaaactgactggttaatcgctttcactcgagtgctagagtgtcctccctttgctgcattgatggtcgtcggtggacactctagccacgtttgccttgctcggtatctctattctctgtgatttggctcccttgggttcgcggtattgtctttgcgcgctcctgtgtctctaccttgctaattcctcaattgtccgttgggcgtccatcacctggcctctctctccatggggtttggtcagttcctccgctgccgagagtgttcactcgccaagtagcgatggcaagtcacgattccttgtggaccggccattggcggacccgtgatccacacgtgatgtatgcttgctattattatctcagtccttgatctcagacaatttcaaccttaatctatttagtacagtatattctatacaagctgtttttaagccattttaccatttgaaatgcatgtcgttgtgcgcgatgtgggagtgggaggacgggggctgacggagcggactcagtgtcaccatcccacagtccaccggacctgacccttaatccagacaca

SEQ ID NO: 646465 - DNA, 818 bp, Homo sapiens
gggtttcggagttgtcttctttgatacgggagttcctccttgctctcgcccctactctttctggtgttagatcgagctaccctctaaaagcagtttagagtggtaaaaaaaacaaaaaaaaccccccaaaggctcgaagccacaaaagggatgaaatttcttctggacatcctcctggttctcccggcacttgatcgtcctggtccctaagaagtccttcgtgaagctttaaatccctaagcaggagaacattcagtcaccggcgaaatcgtgctgcatcacaggacctgggcttggcaattggggagactgattggcctatgaattcggctaaacttaaaagcaagcgggtactcggggatataacataagcttggacctggacggaaacagttgccaaatgcacagggcactgggttgcccagcgttcataccttgacggtacaactgcacgcaaccgagaaagatattttcacagctctgccaacccacggtcgcacggccgaactctggcgactgtcagcatatttccaggtacacacactgccagggatgtagctctatacagtcacaattggatcggcctacccaaggacccttcgaattgcaccagacctttcgaacctcactggtacctcggcaccattattcttggggacctagcacaagggacatttcataccgtcgcaattgcgaagtgaataaccccatgtggccaatattttgccctctgtagcgtttccggcactctgcacctagtctcggagcccccttcttcaacagcgatactggtccacagaacattcgtggattagggg

SEQ ID NO: 646466 - DNA, 360 bp, Homo sapiens
tctagaggatcgtggctcccacttggttgctaaggagggatgaatggccaggttgcaacggagcagggcagcactcccttgctgatcagcagtagtgtagtgctgtgaataggcactgcactctagcctgggcaatacagcgagacctgtctaaaaataacaaaaaagattggcatcagacagataggatgatgaacaaagggagttggactgtgtcttctgacctggtagtttttatgatttctagcatgaagaaaactggtgtaaatatttcagagtataccacttctttaatgttgtactcttgcaactttccctttcttcactttagcggtgaagtcgaacacggcatcacccgtg

SEQ ID NO: 646467 - DNA, 443 bp, Homo sapiens
  misc_feature (356)..(356): n is a, c, g, or t
  misc_feature (429)..(429): n is a, c, g, or t
  misc_feature (439)..(439): n is a, c, g, or t
attcggcacaggtctgggctcaagtgatcctcccatctcagcctcctgagtagctgggactacaggtgtgcagcacattacctgactaattttttttcatattttttgtagagatgaggtttcatcatgttgcccaggctggccttgaactcctgacctcaagcagtccacccctctctgcctcccagagtgctgggattacaggggtgagccaccgcgcccggacagatttttttatttttgagacagggtctcactgtcgcccaggctggagtgtagtgccactatcctagctcacagcatccttgacctcgtgggctcaagcgattctcctgcctcagcctctcgagtaactnggaactgacaggcaagcgaaccatgcccagccaaaaaactttctttttgtagagacgagatctccctgtgttngcctagccangtgg

SEQ ID NO: 646468 - DNA, 1476 bp, Homo sapiens
gttttcgtccgccttcccccgtggtttttatccagctgtttgggtggaagtgttttgtcttctcgtgttgtttatctgtgttgttccgccgtgtgtgtccccttcctcgccggtcgtactattgctcgtcgtcggtgttctcattgctggggtcgattaccctcttgtaatcaggtggctctttgttatcccagcggtgttttcccccggtggggtgttctttctgctgaaaaggtcccccctgttggctcgccgggttttactcttgggggaaaaactttggtgcatagaaaagttgttgtaaacgacgtcacttgtcgcactgggagtaattcctacatgggtatattttgggggggataatatgaatgtctcgtcctacccaggtggtgcctcccatcccgcccgatatagtgtgcgtttttctccccccaaatggctgctcggtgtaatctgaacggataatgttcctctttgctaatcgttgccattcatcttttgccgttcatacacagggtgtaacacgcccaacgagctttggggcgcttcccgctgtgtaacccgcaggtgttcttcttgtttacacagggcctgtgtccacaatactttgggcctccccacggggccccccaatttgcgctttgtggcggacgtgtttcacttcgagtgggtttcttccacatgtcacgtctatcgcggggggaacagcactcttcgttaagatataccccgtgtctatgtctcgccgtgaccccctcgtgttttgttctgcgggcggttgttcgccacacttgggggccaaggatgtctctaagagcctttgtggtggcacaccctctatgcgctcgagatctttgtagcggcgccgctctctgggccgcccaataggatcgcagtccctcatgcggtctctctctcacgaatatgtgagacagacagtgagtgctctggcgcacacacacataggcgtttataggttttttgcccgcgcacaggaacatctttcaccgaataccctcctttggccacacagtaacagctggtgtgcgcacagcgcacaacccccttcttgggtcaccctcgtgtgcgctatacaccacgagcccctgtcccctgtcgtggtcacagcttcacaggcactgcttcgagggcctcccgagccaaacacacttgcacggggtgccctcggctatagtgtatagcgccccaccccccctgggagagtgttagtaccgcttctcttagaaacattttaccagaaaaccctagacttcctggagcccctgttggccagactcttagcctttgccagatcgtgtaattggcccaagatccattgtttttttctcgcctccacatggcccaccacagatgtttagagattatgtgagccttgtgtcattctccggggtggcccccagctagatccccggtggttttgtgctccaaaattaaaagcctcagtgacccctgaga

SEQ ID NO: 646469 - DNA, 142 bp, Homo sapiens
ggtgcagggaccttacctgctccaaggccagaggggacctgctaaacggggccaaacagaatcacagatgaacgggagagagccaggcatggggtcagaaagactaaaattacggtccggttcacttactctgcctgggctg

SEQ ID NO: 646470 - DNA, 167 bp, Homo sapiens
cgttctagcccacgactcgggaggctgaagtgggagatcacttgaactgagaggtggaggtcttgcagtgaaccaagatcacaccactgtactccagcctgggcaacagagtgagactgtctcaaaaagaaaaaaagactgtctagaaaaaggtaatctctcagaat

SEQ ID NO: 646471 - DNA, 424 bp, Homo sapiens
  misc_feature (424)..(424): n is a, c, g, or t
ccttgaactctactgtaattggtggctagctatcaggcctactatgggtgtaaaataccttactctctctacaaggtatataccatactgtccaaagagctgtgcctctttggactaacagttcaaatttacacggggatctcgagggttctgtgggcgaattcaaagttaaactaagattctatcttggacaaccagctatcaccaggctcggtaggtttgtcgtgtctaccaataaatcttcccactattttgctacatagacgggtgtgctcttttagctgttcttaggtagctcgtctggtttcgggggtcttagctttggctctccttgcaaagttatttctagttaattcattatgcagaaggtataggggttagtccttgctatattatgcttggttataatttctcatcattcacn

SEQ ID NO: 646472 - DNA, 193 bp, Homo sapiens
  misc_feature (25)..(25): n is a, c, g, or t
  misc_feature (31)..(31): n is a, c, g, or t
  misc_feature (170)..(170): n is a, c, g, or t
caatatagtgacaccccatctctanaaaaanatttaaaaatgagctggatgtgtgggcgagcacctgtagtctcagttacttgggaggctgggtgggaggattgcttgagcctgggagattgaagctgcagtgagctctgatcacaccactgcactccagcctgggaaanaaagccagattctgtcttaaatt

SEQ ID NO: 646473 - DNA, 162 bp, Homo sapiens
gccagaggaccgggttccttgtctaagtgattataagatctgtcttcaagctccaagatctttcctggctggactattctgttgttatgcttcaaaatgtattaggtaatttttgtagtaattttttcaattccagaagttccatttggttctttcttaaag

SEQ ID NO: 646474 - DNA, 315 bp, Homo sapiens
  misc_feature (175)..(175): n is a, c, g, or t
gccccatgcccttttttccccccaaatatgccaagggaaaaacatagtaggccttttgtataacctgttttgaaaaagaaggggtaaagcccccatatttttttttcccctcaaacggggtttactggttcagatttacccgggttggggttttaccggaggcattttcctttgncgatttttttgtgggcttccccccaaaggaggggcaggttctgggtccccttccaaaaaatttttacaaggatgtggtggtggggaactaaaacaccccagggtccctggggaataaaagccttttttggggccctggga

SEQ ID NO: 646475 - DNA, 434 bp, Homo sapiens
cccagcacacaccagtagtaggaggaagttaaatggtggtgaaaaaataggtactgtttatccttttgtctgtaaaataaattctgaaagctttttgaataatttaactttggatttgttgttgcttcaggatctaaggaataatactaattgtacaaatctgtgcagtgaggtgtagttgcttccatgttatttgagcctgaatgtgcgtgcataattggagagattattggagagagagtgttttgctgtggtagatgtggtttaaatcctagcactgagcatagcatttactttctcagcttacccacaaaatctgtgactaatttagtgaatgtgaagatttttgtccagatggttaggtttaattgtaaaaactggaaagatttcaaagtaccctttgggggagtgtgggaaacaacaagtaaacaaca

SEQ ID NO: 646476 - DNA, 200 bp, Homo sapiens
ctccagctctccctatgccttgatccctgccagtttgtgcactagccttcccggttccttaaggagggaatggagggggaaagtttgtggtgttcctacttgttgggaagtaaggggaacgttgcatgatgagattggtgtgaccacccaagagaaacgattgttaactggaagaaaaagtgtgtatataaatctcttga

SEQ ID NO: 646477 - DNA, 253 bp, Homo sapiens
atagtctctataattttttaggatatgctgaatcgaataacaatatggtagaaacaactagtgggtaccagtcttaatacctcggctgattaaataatctgtacaacaaaatcctgtgatataagtatacctatgtaacaaacctgcactgatacctaggagattaaaagttaaaacacaacaatatagtgaaaacagattcttccctgagtctttaatataccaacatgacaagtgttctggggagtttgca

SEQ ID NO: 646478 - DNA, 335 bp, Homo sapiens
  misc_feature (174)..(174): n is a, c, g, or t
tcccctttccccctttcctataacccaaatagacagggaatggaagattctccctcggggcctgaaagcttgcgggatgaataactcctcctcctcaggcccagtcccaaggtacaaacttgcaccagcagcaagatagcagaggcaggaagagagctggctggaagacacgtnccccctgaagatcaagagggaggtcgccctggtactacatagcagtcacgttaggctgggacaattcctgtttacagaggactataaaacccctgccccatcctcacttgggctgatgccattttaggcctcagcctgtctgcatgcaggcgctcattaaa

SEQ ID NO: 646479 - DNA, 1027 bp, Homo sapiens
  misc_feature (246)..(246): n is a, c, g, or t
  misc_feature (428)..(428): n is a, c, g, or t
  misc_feature (836)..(836): n is a, c, g, or t
attattttttatttatttaacagatataatcttattgtacaattttcctatttatgtttgttatatccatatttattctatgacactataattactttttccatagagccaacaactctgctcatacccaagcatcattatagatccctactgtttaaacatgcatgctcgtacataccactactcgttcgcacacgcatggtgactttcgtatatctctacattgtcattcttcctaatggcagntgcaatacattctatgtcgcacgcggccacaattacacagcgctgctgatgtactcagtgaacctctcacttgtactgtgtctcccagtgatgggacagctcacttactctacctgatcggtctaccagactacatggtaatcacgaccacatagggagtgattcatctcatatccttgacntaggattcacaagcatcgataacgtcagtgaacataacttcccacatcaactacttgtatattcatgtcatgtctgcgtcattccattactactattctggtactccactgaccacaatataatcacgctcacactcttgcgaccaccatctgcccccacacttcttgagctgtattcttctgatcaggcgacacatgatcgacttctgcaatacctgacgccatatccccattcactgtctcctccatttcggttgttctcacgtacgcattctcttcatcctcaatccttcactcatgtcatttatcatcgcgtaatcatcacatgcacatcgtcactatttatcctttatcggtcattcctttttatccgtttcatatctatcaaatgtgtttatcgcatcgganttcgcattagatccttatatcacatcgtgcaatcgtatccattacgcttcatgtacatacgtccctattccccccgtctcgtgattatccacacctgattcaatatttccctattgttcagtgacctttgatagttgaccatatttacttctttcatcatattctttcatctatctccacatcatctcatg

SEQ ID NO: 646480 - DNA, 110 bp, Homo sapiens
atccctggttcatcttgtctacacactacacaacgattataaataagaaaagttagccaggcatggtggcagtgcacctgtggtctcagctgcccactactcaggaggct

SEQ ID NO: 646481 - DNA, 536 bp, Homo sapiens
  misc_feature (292)..(292): n is a, c, g, or t
ctctagaggatcctggcaggctctctacctcaagatgtcagcgcttatgtataacagttcaaatccggtgctcaagattatgtggccggagggcaaacggagcatacagaggcgaccaagcgacctcggacggcggctacctggtaaaagaattctatgatggctctagtagacaaccttgcatcaaaggaaccatatgacgtgcgtggcatcaaacccaaggacaagaaatctccagggatattggacgatgaaggcggccggcaccaagtagaatatctgggactacggnaaaaggtgagagtgcgtcgggcaggattggccttccgccagacatacgagaagttccttcacaggtataagatgatctctgaattcaccgggcccaaccatgaccttccttcagacaaggaggcggtcaagaaactaatggagggggggggtccccaggatgatgtagcttaggggaagaccaaaattttcattcgaacaccccgaacatggtttaccttgaaagaactccgtgcccagatgct

SEQ ID NO: 646482 - DNA, 228 bp, Homo sapiens
  misc_feature (68)..(68): n is a, c, g, or t
gagagggggtccccctattttgtcccgggtaaggggccggggttttttcccaatgggaatattggacntttgggccccccccttcttacccccaagggttccccctttttcccccccccaaggggggtttcaagggggggccggggtggccccaaatcccaaatttttttttttcttttcccccccccccttgttttggaaacggatttttttttccccccgaaccca

SEQ ID NO: 646483 - DNA, 487 bp, Homo sapiens
ttgcctggcccctttgtgttagcgctcagcacacatgtgtccagtttaaattccacccaagattagccagggcatggtagctgccgcctgtaatcccagcttctcaggagtctgaggcaggagaattgcttgaacctgggaggcggaggttgtagtgagccaagatcgtgccactgcactccagcctgggcgacagagtgagactccatctcaaaaaaaaaaaagtccgtcgagagagcaggtggcggatgcagctgagagctccaggaatgggagggccacgtggtagccactggcagccttgactgaaagatgaaggagtccatggtgctaggaggaggagttgcatcccagcaggctcagctcctggagctgcctctctgcactctgaagggaggcccagtggctgcaatattcttctttgggaagtacaatgccaagtaaataaagatatttggggtcattctagttacaacgtatcataaac

SEQ ID NO: 646484 - DNA, 109 bp, Homo sapiens
tgctaaaaatgcatcagctttctttccattccctctctgcaaaagtcattcccaacggtgcatattccttgcaagtagcatgtggcatgcatgtcaggcatgtggcttc

SEQ ID NO: 646485 - DNA, 914 bp, Homo sapiens
  misc_feature (310)..(311): n is a, c, g, or t
  misc_feature (325)..(325): n is a, c, g, or t
  misc_feature (336)..(336): n is a, c, g, or t
  misc_feature (389)..(389): n is a, c, g, or t
  misc_feature (436)..(436): n is a, c, g, or t
  misc_feature (533)..(533): n is a, c, g, or t
catctgccagtaagtgtggacgtgctgagtgaattcgtacaggaatatgactgaaccaatctggacacgtctgggaggatattaaggtgaaatttagctgaccctgggagcagcctatgtctgttgtgttagagttccattttgatacccagcgattacatttaccaactcaggtcgctgacaagaaagcgtacaagatgaaatggagaagccagataaggggtgatcccctttgccttgaaggtcctgagatgtggactgtgacagggtgtactatggactggaagaagggaaagaatgtactgtcaannaccatcaagaaaangcagaagcatnagggtcgaggcactgttagaacaattacgaaacaagtacccaatgagtccttnttcaacttcttcaatccattgaaagcatccggggatggagaatcacntggatgaagattctgaattcagcattagcctctgattttgaaattggacactttttccgtgagcggatagtcccggggtgtgctgtacttcactggnggaggccatagaagatgatgacaattttgaagaaggtgaagaaggtgaagaggaggagcttagaaggtgacgagaagggagaagacgagggatgatgctcaaatgaagcccaaggtgtaattttgtctgttaatcattccatacgtctctagaagggaacccagcagccggcggaatgcacgccagaaggaggacgcgacccagggtggctggcacagcggctgcggaatccggctggggcgaggctcggtcgtgccgaggaaatccgggacggagtacaccaccaacggagaggcagcaacacttcacttcttactaatgggtatgacagcatgaagcgtacaagggtcgacgacccgacggggacgaaccggcccggaa

SEQ ID NO: 646486 - DNA, 117 bp, Homo sapiens
atgattctgttccaacaccccaagtacgacatctcaaacatgacttctattgccagtgatgttcaagtgcgcagggacatgagtggagaactcgataagtgtgccccgttatgctcc

SEQ ID NO: 646487 - DNA, 424 bp, Homo sapiens
ttacaagcgcgcataaggaggaacttctgtcattttgccatttttttctatgtgctttgtagctattttgtccttatttcctgcattactgtctcatttctttttgtgtgtattctataagctattttctttggttactgtgatgattacacttaatatttaaaaattacaatatttataccagcttaatttcagtaacataaaaaaattatgcttctttacaattccatccccaccacttattgatgttgcagaattatatctttatacattgtatgtcaaaaaatataaactaattttttaatgtgttagtctcaagttatgtaaaaaacaaaatgtggagttccaaagttacaataatactagaatttataattgcctatgtatttactgtcactgcaatttttgttttttcatatagcta

SEQ ID NO: 646488 - DNA, 262 bp, Homo sapiens
atctgcccacctcggcctcccaaagtgctgggattacagacgtgagccaccatgcctggccggatttcttaaataactcaaagttgatctaccattcgatccagcaatcccactactgggtatctactcaaaggaaaagaagtgattatgtcaaaaaggtaccttgaatggtaatacaaaaaggtatgtttattgcagcacagttcacaatcgcaaagacatggaaccaaccaaagtacccgctgaccagtgagtggataaa

SEQ ID NO: 646489 - DNA, 989 bp, Homo sapiens
gaatttctgtgaactcgtgcaaattggtgtagccaccgtcttgctgtaccaagaataccatcaccctccttagaatatgtcacgtacttgagacgcgaagctgtgctgtccagtcgactacatggttgtcaaaagagcgccgtgctaccacttaactcgagccagtacgcgtcatgcatattagtcaactgtgggcctcgtataaaataacgggacgatgactttgaacaatgtgcgtacgcagccctagcgagttacgatttggtcatgctttcacatgtccacaccttagatcgtacaatttggtcatcgtcaccgcgaagcatgtgccgaacacctgaacgcccaattatacgaaaggagcacaataccgcatactggcagactcaaagttcaattgaatagctaagggagcgtagaccataaagaaaggccccgtggaggctgcgcttacttggtgagcctagagagcactggcgattacatgtggatttttgcgggatgccgcgtgcgactgcacttctgcgtggagttcgccaaaggcacacccccccttccatattgcaagctcaacactaggccttaacatacttctcataccagcgctaaaattactggaaacttatgtacctaatctcagagattgactcacctaggtgagacttctgtacgatcctggaatacagataagtcaaatccccttagggtgacttactaagggcaatgcccgaaggctgccagtgttcaataattacccaaataagggttccaccgaagtctcggattggcgccacgcgggtacctcggacccgatgaccgtccgccaggcaggcgtgcggaaaggtggacgagtcaggctggcgaggatcaagagttcaaatcggtgaccacgaccaaagacgggtaaacctaactaacaaataactccgcggcgagaagcacacaaaagaaataaggccaccctcaaaggggcgtccccgaagggaacg

SEQ ID NO: 646490 - DNA, 184 bp, Homo sapiens
attcgcggacgtgtcgacatagagtttacctcttactgcacaggctggagtgccgtctcccaagctcaagcgattctcctgcctcagcctcccgagtagctgggattacaggcacccgccaccacacccagctaattgtgtacctttagtagagacggggtttcatcatgttggataagctctt

SEQ ID NO: 646491 - DNA, 863 bp, Homo sapiens
ccctgtttaatgggctcccccttcctgagttccctcctggggggaacccccccattctcaaccgctgtgtttgtcgccccccccccatagggacgccccccgggggctcgagtcccagcgccttcgcggagtctcttatacccttatggcctccgcggggagccggagatacaccatgttcacacacacacggggaacaccgccttattggcccccctctaggcccccatattttaggggggaccacctatatatgaacacacaccttgtgtgtaccacaaaaaaacacacacgctctggggataccgcgttcccgcgaaattctccccgcggagatatatctggtggaacccacaccgggttccgcaggagaactctcacaccacaattttctcctctgagaaagaagaggcgtgcgcacgaaacgccacaaggcgcacatattttttcacacactggtgggagaagaaaagagactcacacaggtgagcgcgaaataatttttttcctcggtgtttacacacactaaatgggctggaggtgtaaaaagcttgaaaaactccacagaactctttcgtgttctttggtgtttgccaccccactctgggtattgagaggagggcccccagaggcacacgggataggtcacacctctcctggcctctaacttttcctgagatgggtaaaatcgggaattatcttcccacggtatgcctggccacgctatataagaccccccgcccgctaagagataccacacctatatgagggaacacttcccactgaggtgtgggatttttagttttaactggtaaatttgttttttttacggggcagatttttaataaagggcttggttttta

SEQ ID NO: 646492 - DNA, 131 bp, Homo sapiens
acaaaactattgtataaaacagctgggttacctagcttatgattaataaccaaaggaaaagatataaactgggaaatgttaacataatagctcattcaattttcctgattttctactatagctctttacgt

SEQ ID NO: 646493 - DNA, 257 bp, Homo sapiens
caagaatacactagggcctcagtcttacacttcttgaccacacctcgaatgcttaaagcgacactttgaagtctacatcctacgttaaaaggatctacttgccagcattttagggcgttaaacaattttctgtttgggggagaaacaatgggatttggcagcttaaagggttttaaatggtacaaaagttaccaaagcaaaaaactttaccttctacctgcctatatctcacagagcctcagcagctaggcagtctc

SEQ ID NO: 646494 - DNA, 401 bp, Homo sapiens
taggggagggacacccaggttatagcaactacttaagcgcctatgtgtaaagctctcctacttcaaagaactacccagcaagtagttcctcccctcatctctctaaggtggtagtcacccaaggaaggtacagggtcagcactctgaggcctggtggaaaagagctgatgggggcagaacgacctgtgggtgagagatccattccctagaactaatgagaggaacagataaattaaggtcaccattggaatctcctcacattgtaggcatccctgcccaggcctgggacccagaaaacatgattcttgagaataagtgggttctggcagcctccattgtgaaagccagacatacacatgactagcagtactgcatgggtgtgtgaagacttggggaacttg

SEQ ID NO: 646495 - DNA, 114 bp, Homo sapiens
cccttagtgtcactgttcatcaataggcacgtctcccattacgccatctgttgagctcattttcaagccactgaatagtgttccgcaggatcttatttttttctttttattttc

SEQ ID NO: 646496 - DNA, 914 bp, Homo sapiens
attctagaggccgaggcgggtggatcaactgtggtcaggagtttgagatcagccaggccaacctggtgaaaccccgtctctactaaaaatacaaaaattagctgggcgtgatggtgggcgcctgtaatcccagctacttgggaggctgaggcaggagaatcacttgaacccgggaggcggaggttgcagtgagccgagatcgcaccattgcactccagtctgggcaacagagtgagattccgtctcaaaaaaaaaaacagaaagggaaaaaaaaatagctttatacctcttcctgtgtctcaaacccgccatgaaatttctgaacgcctccaaatttcagtggaataatccaaacacaaacattttatacgtataaaaatagtttttcctttcttatagtaatagtatactctagaaaaagcctcagggtatatacatcttctaaagcagctacaattccagtgcagctacattaaccaactatgtcctctagttgagaacacctaggcctattttcacggctgtgtagcctcagtgcctaacaatgggtgccacataaatatcgtaaaatcaccctgattgtaaaaccattcgtttttgttacaatgtgccaaaaatcttcaacaagggcctgtgttaatgtaactccttggaacgattaataatttaagtggatttctcagatatggacctggctgggtgttgacttagtcataggtcctcaattttttaaaactcaactatgcgtgatttcaccaaaatctccccttctcacgtaatttcaaacaagtggggacccaaaggtatcacaggtctaaacagtcaaatcgtcttacgcaatgttacttccccgttagatcacaatttgggattgcaggcgaccaagtgtaaattgcgcgacagtaggcgcagaa

SEQ ID NO: 646497 - DNA, 81 bp, Homo sapiens
cccgaggacacggctgtgtattattgtgcaagagaagttccaacaccagtgcctggtaattttgactactggggccaggga

SEQ ID NO: 646498 - DNA, 112 bp, Homo sapiens
gaacctgcgcctcctagagaaaatggtatgtttacaggagaatgtatattttgcattagaaatacaagctatatgttcaaatcgaatttgcctcctccccccaattcctcat

SEQ ID NO: 646499 - DNA, 322 bp, Homo sapiens
cccctgtgttagcacaacctagggtcacttttgcatgtgtaaagccatttaccaagatagttgtaggtaagaagggcagatttattagagaaattatgaaaatatgttgcagtgggcagctcagcagagaaggggctacctgcaaagaggcaggggctggaggaaagttttatagggtcctgctgaagggtgctacgtgtggaatgaggtcattgtgcccgcaggttgtttgtgattagctgtctctaacaattgttcatacaataattgttcattattgttctcaacttggggctctccccaacctggggacccttcctta

SEQ ID NO: 646500 - DNA, 479 bp, Homo sapiens
cccgggctgcgggcattccttggcccggtggccagatttccaaaacttgtagcaagctcctgggggaggaggttctggaggaacccctggcagctgcggttcaggcgtttggagttcttgtgttctggagatgtggctggggtttgtctcacggtggaggcaaggaattgcaactcagaaatacattgctacgtggctgcttctacttttaatattggaccaccttgaaggcgaggttaattaagtcctgttgtggggtatgagggccggaatttaatttttggagctttatttaatgtcaggagcagattgggtaataaaataaaatgcattttgagaataagacggcattgtgacctttcagggtctagggctgtaaaacatctcaggattgctgccaaatgggccatgaactgggctgggttttatatttgatgaaaaagagcctaaacgctaactgatctgggagaggtcggata

SEQ ID NO: 646501 - DNA, 1225 bp, Homo sapiens
gcgcactctgtacttaccgtcgctccgccgtcgcgtttctctgccgttcgcactggaacgaagagatcgccgagctggtcattgacagatggctccggcatgtgcaaagcttggttttagctggagtgacgacgctcctcctgagcacgtcagtatctctttgccatctgttcgtgtgcgccccaagatcagccaggcggcgtcattggtaggagcatgtgagtccatgagacggactcctaacgtaggcgtcgatcgatgagctccataagtcaacgcgttggcatgtctcgagccctgaacttaccccacttgatgcactggcaagtctgctcagcgcagagctggggactgacactggtacgtaaggcactcgtggtcgactcatagccatatactatcgaactgagcgtgcggcgtgagcctccgggaggacgacaacccagatgcttgcttgacccgaagggcccttccccttgaactcgccacaggaccacacacagaagacgcaatgcactgcatcttcatgaattcaatgcttctgaggatcgctctcaagcaccctcacgcgagcaattgtttagctgctgggctcattcccaggtccgttggcttagttcgcacgtcataagcgcccttctagagagtctgccaactcagctttgggctatttagtccattggagcttcgtgggaagacagggggtacaccccaacacggatgctccattctacctgagtggctacgacctctcccgccatcggccattcctagtcgtctggaccttggtcgtggtcctgggaccttgtagccgactagcctcatgacagatcctcactgagcgaggcgtacagcttcaccagcacggtgcagtcgggaaatcgtgcgcgacatcaagtgagaagctgtggctacgtcgccctggactttcgagcaggagatgggcaccgccgcatcctcctctttctctgggagaacaagctacggagcctgccggatgggccaggtcatcaccattggcaatggagcggttccggttgtcccggatgcgctgttccaggcttccttccctgggtctggaacttgcggattccacgatacccccttaactcctcctgacgtgtgacttgacatcgaacacctgtagccacacgtctgtggcggacccccagtattccggcttgccacggaatccgagggaacccgccctgcccgccttaataca

SEQ ID NO: 646502 - DNA, 741 bp, Homo sapiens
agcggagccggcgcgcccgcagtcccggaggaaatggaaatgtacatctaacagtatacaagaagcgtacagaagaagaaaataacttttctggatcaaattaggaagtactagtatgatattagatggtctccagattcaaatatattcagaaagcaggcgtggagacaaccatctttattcagggcgagatacctaaagcgcggctcatggcattagagctacagacaaaccctgatgcgacctctcgcagaatgtcccaagtcgagttgattgcccagctactattgtggccgtgaaggccatccagagattcagacagacgcaccaggattggcactgaaacatgggctcgggccaatgtgtcaagttatggcagcatcatcagagaagcttattttgcaaaagagacaagagcgacagtagatcagtcagtcttcacggatgcttggctgatgaggtcgcagtcagaaggtggttgataccagaatcattctagcacgagacgctggacggatatcattggcagaacgcatggcaccagaccgcaggtacctctggacgaagtcaaccctagggcaccttaatgcaccgaggaacaccagtaaccgcgggtagtaggagaaagtaactagaccaactgaccgaggggaggagggtaacataggcggcagacaaaggagccccacaagtccggcgacacccgacgacaaataaaagccgaaagtgtagaagaacccg

SEQ ID NO: 646503 - DNA, 378 bp, Homo sapiens
taaaagaatatcatagtccaaacagatcacacgaggcgaacccaggacaaatgctgactttggcattatctaggtcacccctattttctgtcatatctgtctctcctgttagaactattgttgcaaaaccagtcaaaatcctaccaaattaaaaagaagtccctcattgacttgttgggtgtaggtggtaccccatgtcctcccacaccaaaagagatcagttctggcaagaaagctccaacgtgccttgatggtgctgttggtaggatgccttaggccaggcacgtcccagcgatgttctgctggctgaggtacaaggtgggaggagaatatgcctcattcattactcaatcaatttcttggccttgccatatgcaa

SEQ ID NO: 646504 - DNA, 1334 bp, Homo sapiens
gcggtctcagagctccggcagcagctgcgcctgcgtgggcctcccagtgtcggggaccaagtctatgctcctggagctgcatgctgcggcggctgcgccgaccctgacgagcggccgaagcctgcggcgcgaggacagtcccgcgggtgctccctggccgagcctcaagcccaaggaccctggcagccgcccggcgtacagggctcggtacaagcccagcgcagcatactcacagtgccacgctacttaccacgacgccgacggataccccggggacggctaccggataccaacatccacactaccgacatcctgctgcagatccaagccctgaccccttcctacagaggccgtggactcagctggctctgactactaggcagggacggagctgcagggaagcgcatcctggagcggcgcagttagcttcctaaccggggacatcgaatgacattcctgggaggatcagggtggaaggcctgatgaacccccactggcaccactaatatccaacttggaattatagccatgagaaaccctatcggacaaatgacatgaaaccaaacatacaccaggaacatagatgcaacagggcctactacgaacagaagaagaagcaatcccaccatagaaaatcaccacggaacaaacgccaaacgaaaaagttcggtcgcaacaccgagaaacataaccacaaagagaaaccacaagagggaacaatcagcaatgagaacatggagcagaggaaatgggccgcctagaagcacgcgcggtggatacaatacccaaacaggagagagaacaaagagtaacacgcacaaagcgagcacagaagcgaagagaaaacaacaggaaagaacaacaacaaatctgagcacacaccacagaaggggaagacacagcgaaacgcaggacagaacacaggcaaaggaaagagagacacaacggcacgcaacgcgaaaacaacaggaatagaagagggaaagaacaggagaagacacatgaccagagagggatggaccgaaaagaacaaccatagaagagcaaggcaacagcgcaaacaaagcgagaaggaacgcacagacgacgagggaagagaaaggggaccgaggcaagacgaagaccaacacgcagggcaggacgacgcagcagatagcggagaagcgaaaagccggcagaaaaatcggagaaaaccgggacacaacaaagaacacgaagcggggagaagagagaagagagacaaaaggaaggcggcgggccaccccatgcccgcgactcgccagcgcccatcgagaaaacgcgcgcggagcaggagaggaacgcgagagaggcgg

SEQ ID NO: 646505 - DNA, 135 bp, Homo sapiens
gatcactgtgcattgtggaatgtggtatgaggagaaaaagggagggtgatgtagaaccaaaagcatgtctgggcgtgtacagagctggtgttacatgtccaaggggtatatccctcttaaaaaacccctctctct

SEQ ID NO: 646506 - DNA, 631 bp, Homo sapiens
taaaaacctattttgttagcccacaaaacacttcattgttgttttggggggaaggggcatttgtcctaataaaatgtctccaaagcgggtttgttttggaaaaaaaccttcccttttattttggaaaaattcctctgggctcccaggaggagggattccctgacttggaaaccaacatggccaccttggtgcacaaaacagcctgggggtatacaacaaaacaaattggtttttatatgtcctcttctccctttccatcttatcacgcatagacttaactcccttaagccacagacatctgtggagacctgacccctagtcactgggtctaccagtgtgtccggccatcgtgactatcccagtgatgccactgagagtggcaccgtttcaaaagagcgggggtccattcactaaatggggggccctatcaaataaattcggccattatcaattacacaattcctgaaagtcacgggccggttgtgaaaaagttgtacacaacactgtgctaacaggtcaacatgtcaccctcaactcataaacttcccgtgtgtaagagcatcacatgacagcactcatggcgtttaaagggccaccagattacgggacgccattgacaacggggtttgac

SEQ ID NO: 646507 - DNA, 440 bp, Homo sapiens
tcagcgtgaagcagagcttcatcaggaagaaacaaataaacaaagatagacaaattggacatagatcacaagtcaaaccttaagtctcaaaagacaccatcaagaaagcaaaaagaggctgagtgtggtggctcacgtctgtaatcctagctctttgggaggcccaggcggacggatcacgaggtcaagagatcgagactatcctggccaacatggtgaaaccccgtctctactaaaaatacaaaaattagccagtcatggtggcacacacctgtaatcccggctacttgggaggctgaggcatgagaatcacttgaacctgggctgcggaggttgtagtaagctgagatcatgccactgtactccagcctgggtgacagggagacattctctctcaaaaaaaagagaaaaaaaaacccacacgacaaaacgaaaaaaag

SEQ ID NO: 646508 - DNA, 269 bp, Homo sapiens
  misc_feature (243)..(243): n is a, c, g, or t
ttagagatcccgtctcacacccagcatagagtcagtgatgtcacactgagtatcaggtctcaagagagcagttctgtagagcagagaaggatgcaggtgtgctgtgataacactattctagcggatttggagttgtaaggagggaaggagctggatggagatgtgctggttctgggatgaagtccagtgatagaggactggggtcttggcttctcgtggtgatttgcctaagcgaggctgtgnggcatttgggggtgggtggggagcgg

SEQ ID NO: 646509 - DNA, 351 bp, Homo sapiens
gatgagggatccatacggaaagtcagtgctgaagtataacctggggtggtcccctcggtatgtttcgaagggtttggggtctcttttggcttcggtattcccttaaactgtttttccactcccactggggcatttgggaagcgggtcagctagcaggttttcggggatgtcgggagacctagatgaccttatcgggtgcaatactagctaaggtaaagctagaaacctacagggtgcactttcacggagatttctggagtatacttttccattatggccttaaatggtgagcagtaatgtggtttatcgctattggtttctatggcaccagacttttgggtgcaaattatt

SEQ ID NO: 646510 - DNA, 396 bp, Homo sapiens
  misc_feature (54)..(54): n is a, c, g, or t
  misc_feature (119)..(119): n is a, c, g, or t
  misc_feature (247)..(247): n is a, c, g, or t
  misc_feature (307)..(307): n is a, c, g, or t
gccccagcggctgagggcgggcgggcgggcgcccgggggaagggacggggggcncggtccggcgacgactccccgtgacggtgcggtttctcctccgtagctggctgcctgtgtttctngtgcttggtgggtgggctggtgtgttacaggcccctccaatttcccattgaccaaaatggtgctgaaacaatgaaatgaaagccctgaacccaagtgcccaagataaggaacaatgcctgataacccntgccctgccaagtactgcatagggcgctctcatataggagaagaacattctgggcttaanggcccggggattttccctttgggccataaacccaccaatttttttccaaaggggacaaaaacaaccaacaccccacaaggcgccctatg

SEQ ID NO: 646511 - DNA, 116 bp, Homo sapiens
tggagacagggtttggcctggtcatccaggctagagtacaggggcacaataatagctcacggcagcctccaacggctaggctctagccatcctccggcctcagccgggatctccag

SEQ ID NO: 646512 - DNA, 1591 bp, Homo sapiens
  misc_feature (238)..(238): n is a, c, g, or t
  misc_feature (864)..(864): n is a, c, g, or t
  misc_feature (883)..(883): n is a, c, g, or t
  misc_feature (1032)..(1032): n is a, c, g, or t
gtgtataagatgtcgcccccggcgccacagccttctgtggtgaatcacctccctcccccctcaccgcatcggagtagtgcaccacaacatgtgtgtggcaaacaaagcggaaagtttcttgctaatgtttaagtagccgcctccctattcttaaagtgtgctggtagaaaatataaatttggagcacagagggtttctttcgttgttgagaagaaccccccctcacgctgcgtttgcnttaacagcccagcgacgaggggggggtagcgagtctgctcccacaccttagggttgcgtaggtgtgttttttaagaatagtagatacggacgcagttttgtagataatttgtgcgtacgcccccgcgtctttttaatgtgtcccccacgctggtagaggggctctctttgaaaagaagaagttgtggggtgtgtgcagacccactagtggtgtgcggttaatgaaagaatattcttgtcgtcgagaagtacccgcccccccccttgtgggagggtgatgataagttgtcgcgcccccctctcgatgttgttttaggtgctgccccccccccgcttgtattgtatcccccttaggctgtccacagaaaaaattgttgatggttggggatttgatgccgcgaacacatttctgttggtgtagaaaaacaggggggccacccaccttcgggtgaagacaagagaaagttgtgtgtctcccccagctcttccccacggaaatgagtgaatacccacaccaatccttcgtgtgagaggctctttacagaaacaacacatgtgtgtggccatacacataggtctcacacaattatgagaggaccaccaacattctgatatgtgggggttttntctccacaaaactttgtgnttaaataaacccggtgaatttttctccagagaagacccccggttgtctctgaggcaaaatttgttgttcctccctcaagatatcgtaaacgttctctctcctctatttgtgggaaagaacacacacgcggtttacaggcagagaggggnggtatatttctgttgggcccgcccccgagcgaacacattgttatgtgggtctttctcctcaaagagagagtttctttgtgataagagagagagttgtgacacactttgtagaagagacagctgcgccacttttttcgtcacacagaagatactccagagggcacacgatgagagaggtatctctattttccagagagaggacgccactatcttgtgaaacgcatctttcgtccggagacgcacacagtggtgatctccgagtgttacgacacctgggccacgatatataagctgttgtgattagccgactttcacacaggcatatttaaagatctggaaatgccctcttgggtagaacagaccgcggcattttaggaagaataggccccccagcggcacttgatagagacccctcgctcttcagtaagagatagacttcatcttggaaccccttaaggaggataaacaaaaagtggggtgaaaaatccttttttttggaaaaaaagtttttgtttttttaaaaaaggggaaattataaaccaccatggggcaccgggga

SEQ ID NO: 646513 - DNA, 149 bp, Homo sapiens
ccgctggagctcatggcatctgccagtgttaagtgacatgccctgtaacacagcctcagtgtgctcctgacaacatgtgcccaaggtggtcagtgcacagcctggttttatacattttagggagacctgagacaatccaattcatttat

SEQ ID NO: 646514 - DNA, 341 bp, Homo sapiens
  misc_feature (1)..(1): n is a, c, g, or t
naccacatgggttagctcaggtggtcctgtggaagccaattgttccgtggatgctgcggaggagtcgcagaacggtatctttccgtcaggattgcggcagtagttttcatccaaattttagcagcggaagtcttatggtgtcctgttatgtgtgttagcggtctgtgcactccagtgcttacaggtgtgcccgcacacggtaacagccacattccagcgatagttttcacctgttcccttcagacaatggtaggtgggaccagaagatggtgtaggtgttgtccagcggcggatgtcacaaagttaccagcgcatgttagggtcggtggtgaaacagcaag

SEQ ID NO: 646515 - DNA, 303 bp, Homo sapiens
cacgagggtgatctgcgtggacgtgtgggtcatcaacatccggcacttcgccgacccggcccacggtggatcctggatgcgtggcgctgtctactacttcaagatcgccgtggccctgctggtggcggacatccccgatggcctcccggatgtcatcactacatggctggcactgggcacgcggtgcatggcatccaataacgtcatcgtgcgaagccttgcgtccgtggagaccctgggctgcaccgcagtcatctgccccgactcagacgggcacgctcaccaccaatcagatgtctgtct

SEQ ID NO: 646516 - DNA, 119 bp, Homo sapiens
attacgctcctagacggaaagtgttgatattacaggtgtgagccacttgcacttggcaataacttttttaaaaaagtaaccatggccaggcacggtggctcacacctgtaatcccagca

SEQ ID NO: 646517 - DNA, 85 bp, Homo sapiens
tttttgggttttccaagggaatgggcttgcaggatggagtgtttgtaaaatcaccaggaaataaaactgtgtatgagccccggca

SEQ ID NO: 646518 - DNA, 522 bp, Homo sapiens
ctttgtatagtctgcagatatggatcctgactcctgcaagaaatagctcaccgtgacaaagctgcccttgcttttatcgatttgcaaatcaaagaagggggacatgttgggagcaggccccccacccccccaaaatctggccataatctctgcagcactatgacatgttcatgacggccataatgcccacactggaagattgtgggtttatgggaatgagggcaaggaacacctggcccacccagggcggaaaactgcttaaaggcattcttaagccacaaacaatagcatgaacgatctgtgccttaaggacatactcctgctgcagttaactagcccaacctattcctttaattcagcccatcccttcttttcccataagggatacttctagttaatttaatatctatagaaacaatgctaatgactggcttgctgttaataaatacgtgggtaaatctctgtttggggctctcagctctgaaggctgtgagacccctgatttcccacttcacacctcta

SEQ ID NO: 646519 - DNA, 169 bp, Homo sapiens
gctctaggttatagggaatatctagttttttactttttgacgctcgttaaaaccactgacgaatacctagcaaattccgcgtcatgtggcatcgtgtactcgcactgtgacgttggaaatcttgtgattcctccctgtccagccggccctagaacacggaatttgctag

SEQ ID NO: 646520 - DNA, 636 bp, Homo sapiens
  misc_feature (138)..(138): n is a, c, g, or t
ggcacggggtccttgggtcggtaggcgcgctgagaattcctgagggccgtggccctcggctacatgcatgccatgcgcgcatactgccgtctggcgggcgctgtggctgcagcccaccgttctggggcccaagtccanccgttcgcaaaaggcgggaccccggctcattcaccggaaaatttgcttttacaccgggccaaagggggctggggccccccaccggccccaatttttgggcttgggaagccggtgataatggggttccgggacccccccccccccagaaggggggggtgaaatccccccccaattcctccagccccggagtcggcccaaacctggtgtttacggggtgcccaattcttaatcggggggggggaccccccgtttgggccgggggaccttttttttaaaaattttcccaaaaaacccttgtggttggtttggtacaaaacaccggaggtttctcaggccccttaataaaactaaaaaagggggtaaaacaaaatccgagggacaccttggggggctttttcacccttttgctgggggccccgttgcccccccaggagtgggggggttttcccccttttttttaccgggaacctttttttggttctttcacggggctttttt

SEQ ID NO: 646521 - DNA, 432 bp, Homo sapiens
  misc_feature (33)..(33): n is a, c, g, or t
ccggatatccccaaaattctggaaaaaatcccnaaaattcaaaaatgccttcctggcccccaagcatttcaaaataatgatattcaaccctgtaatataccttaaagggccccacaggaaggcatcattaaacaaaaacaagttgagggcccaggcgcagtggctcacacatcaaaacttcaggatgcctaaggtgggagtacccacttgaggcccaggagtttgagatcagccctgggtaacataaagagaccccatcccctacaaaatgtacagaaattagccctggtatgatgacatgtgtctgtagtcctagctactgaggaggctgaggcagaaggattgcttgagtctagaagttccagactgtagtgagctgtgatcgcaccaccgcactccagcctgggcaacagagtgagatcctgtctataa

SEQ ID NO: 646522 - DNA, 476 bp, Homo sapiens
  misc_feature (436)..(436): n is a, c, g, or t
  misc_feature (452)..(452): n is a, c, g, or t
  misc_feature (475)..(475): n is a, c, g, or t
tgagctggaggtatctgagcgtttgagtcaacctggagtggcaatagggttagcatggactcccttgggtggcaaaatcatgtttgtggaagcaagtagaatggacggtgaaggccaactaacactgaccggccagcttggggacgtcatgaaggagtctgcccatctcgccattagctggcttcgaagcaatgcaaagaaataccacctgactaatgcttttggaagttttgatcttcttgacaacacagacatccatcttgcacttcccagctggagcctgtcacaaaagatggaccatctgctggtgttaccatagtaacttgtctcgcctcacttttcagtgggcggcttgttgcgctcaagatgtagccattgactggggaaattacgctgagagggctttgttcttccagtgggtggaattaaagacaangtcctagcagcacacngagcaggactgaagcaggtcatng

SEQ ID NO: 646523 - DNA, 178 bp, Homo sapiens
ggtgtctcgggaccccaagatgagtggtgcccgtgcgccgcgaccccagcccagcgtagcccagcccatcggttggcttattcagggcttggggacccagttgcgttcgtcatctctctcaaccttccttcccctgtctaaaaaggccatcggggagttcaatttgtgtgtgacacag

SEQ ID NO: 646524 - DNA, 126 bp, Homo sapiens
acatatcggaaggacgtggacagagtgacctgtctcaagcaggaagctggggatggggagcaccccaggatgcatcgacataacaagcagtggagaagtcgggattcgaactgactatcagggcac

SEQ ID NO: 646525 - DNA, 84 bp, Homo sapiens
  misc_feature (61)..(61): n is a, c, g, or t
tctaagagatgcaagaaacagtctttttacaggtgatacacttggggctggccaattcagnttccagaggcccttattagtcct

SEQ ID NO: 646526 - DNA, 163 bp, Homo sapiens
ggtagacgattatatcccactatgtagccatgactggtcttgaactcctgggctcggtgatcatcctgccgtggatacccaaagtactgggattatatgcttgagccagcgtgcctggcctgtgatcagatttctcatttttttagtcactaaacatgctggt

SEQ ID NO: 646527 - DNA, 116 bp, Homo sapiens
  misc_feature (31)..(31): n is a, c, g, or t
  misc_feature (82)..(82): n is a, c, g, or t
  misc_feature (91)..(91): n is a, c, g, or t
ggcactcgcacctgcgctgtccgcgcgcctnttttcgcgccgcagccctgccaagctgcatgagctctacgagaaggttttntccaggcgngcggaccggcacagcgacttctccc

SEQ ID NO: 646528 - DNA, 482 bp, Homo sapiens
  misc_feature (347)..(347): n is a, c, g, or t
  misc_feature (459)..(459): n is a, c, g, or t
agcgccgagcattatacataaaacatagctcagtatatcagatgagaaaagggcttaatactgggtaatcatccacaccgttatagagtacataaatccggggaaagacatcagttccaaaaattaaaaggtaatgaatgacagtgacataaatttatctgtaaataatagtaaaattttcttataaaaatcaaataaccggacaggcgtggtggctcatgcctgtaatcccagcacttttccaggtcaggggaggcagatcacttgaggtcaggagtccgagaccagctgggccaacagggtgaagtcccgtctctacggaaaatacaaaaattagcctggcgtgntggtgggcgccggtaatcccagctactcgggagggtgaggcaggagaatcacttgaaccggggaggcagaggtggcagtgagctgagatctggccacggcactccagccggngcgatagagtgagaccctgtctt

SEQ ID NO: 646529 - DNA, 103 bp, Homo sapiens
tgtcgcccctcttcctctgccttgccctaaaatgtgggcatgtcccatgcaagggtcttgagccctcctcattctcttatccacactctctccttctcgcagt

SEQ ID NO: 646530 - DNA, 1000 bp, Homo sapiens
gaggagttctccaaacccgcgctgcggaggtgagtgaccaagttccggccagttcgacctcgaggatccagaggtggagactggtactagctcccagctctgttttcacataccccttcaggtccttcctcgtggaggctggctgaagtgctggtccacactcgtgctgcgtgatcctgttatgacctcggaccacctgtctgccctccctcctgtgggtggaacttcacacaccatcacctgaccaggacttaagactgaggatcgtttggatctctggcaggggtgcagaactgagcccaggaccatcagtaccctattcacagctcctgtgctatgattgcccaatggtgggcaaattggcggcattccatgttgttctacgtggcacactggggcagaacgactgcctctgaatctggttctgtggtaccatgtgcaaggaagtggaggccctgggttcaagtgtaaccaaggcaggatgtctacaagtatgcccttatgcgtaggctaccagacaaacattggattgttgctgctatacatacggcaatgagcgctgagataggggaggccctgaaggaggacagtgggaccaggccaaggctgcgatgcctacggggacggagacatgaaaccggagaacagtcacaagcctggcgcgacacaccaaaagaaaccaagccccgcagggcacagtgagagccgtgcccatcgccggaaagcactactgggcctgacgcaccaagcgcgggacgacatcgtggaagcccagtaccctgcatgccaacagagcccacaaagaacctaacgaacacgcagggcagaaccaaacccccctaacacccccaaaagaaatggctggaccagggaacaaaacgacgcaacgcatccggacccacaacacagggaagaccaccgcgccaagcggccctcggcaggaccactgggaggcgctcaagggggactagtgccaagcagcccgaggacacggagcaaa

SEQ ID NO: 646531 - DNA, 130 bp, Homo sapiens
cggtggctctgcgccgccaggccttccaggtgcgcctggtgctcgtgcgtctgtgttcgggccggtactcgcgcatgcggaccgccctgccgccgctagagctgctgcggtgttcagctggtccgtgtag

SEQ ID NO: 646532 - DNA, 250 bp, Homo sapiens
ttctcagtgagttaaaccattaccctgttaaatggagtttgcaagaagccgtttggagctagagcaggacttgctatagacgccaagcagattccaaatggcatctcctcaaaatgagaggagaaacacagagctagagaaaggctatccctggggaagtaggagagaccaagcccatgttctacgggaggaggcaggtaggtctgtgctgcgtctctctccatctcagctgtggatgaagatgcagcca

SEQ ID NO: 646533 - DNA, 414 bp, Homo sapiens
ttcgcttgtggtcgatctctagcacggatcccccagcaagaatggcatatcagtggcttgctgaataaaaattcggataatatgtttgttaaaaagacaataaagaataacgcggtggaaaatccttagggtattactcgtgaacctaccacgttcaaaagcagattggtgacctttgattaattccatttacttatgtagtgagctaaaaggaggctccaagacagagtttggttcccaacatgtgtccgttgcccacagggcacactcagaaggtctcctcctctcgtagtaactgtaacacggatgacatagtgaagcctggctctggatctcagggcttcctgtggtgagtgactatcatatgtttaaataggtcggtaatggtcattgggtttgagaactgtgggtttc

SEQ ID NO: 646534 - DNA, 108 bp, Homo sapiens
atggaattcaatggaatggaatcatccggaatggaatggaatggaatggaatggaatggaatggaatcaacccgagtgcaatggaatggagaggaacggaatggaatg

SEQ ID NO: 646535 - DNA, 223 bp, Homo sapiens
catgagcccagactttacagtcttcatgatcaagtatctcatgacgctgattgtgggcatcacatcgggcttctggatctggtccggcaagacactgaattcctggaggaagttctacacgaggcttaccaacagcaaacagggggagactaccgtctgaaacccagactcttaccgttacccgttttttggcccgatccgtagccatcgccctgggaaaggg

SEQ ID NO: 646536 - DNA, 655 bp, Homo sapiens
cgtcgagctgttctagagtatccctggtgtacgcaactggatgacttgatgttgaggcgggcagaatgtcttccacggtctcattgccttctgagatgatgcccacacctttggcaatagcatttagcgtgtgatttggatggtctccttgtgaccatgcatgacctataattccatgcacttctgacattttgcccacgtgaatcagtgaacggcctgccctgtgaaggggtcaactcaatggatgatgcatgcccaacaaatgcacatgattatctgatacgggaaattcacattcgtcatgtgtcaacactggaacccttatcaggaaaacttgttcatcttggcagaacagaggtggcagaaaacctaggactcgttctcctgtggccccccagctccaaataggcgtcctgaagggcgtctttcagctcctcatccaggggctgctccttgccgtggaggaggatagagctgcaacggtcctaggatccttttctggggcgcccttcatcaccaacaggtgttggggctcagatgtgttggggttcttatgaatagacaactggtacttgttggtggagttgaagggtatctcgacgatttggggaatcttctctcatctccttcagggaacacagcaagtctatgcact

SEQ ID NO: 646537 - DNA, 316 bp, Homo sapiens
  misc_feature (44)..(44): n is a, c, g, or t
  misc_feature (52)..(52): n is a, c, g, or t
  misc_feature (96)..(96): n is a, c, g, or t
  misc_feature (215)..(215): n is a, c, g, or t
  misc_feature (221)..(221): n is a, c, g, or t
  misc_feature (259)..(259): n is a, c, g, or t
  misc_feature (290)..(290): n is a, c, g, or t
  misc_feature (313)..(313): n is a, c, g, or t
aagggagttcctaggattaaccatctttctaatggctgggagcnatgactcntgcctgtaatcccagcactttgggaggctgaggcaggtggatcncctgaggtcaggagtttgagaccagcctggccaacatggtgaaactccatctctactaaaaatacataacttagctgggtatggtggcaggtgcctgtagtctcagctactcgggaggntgaggnaggagaatcgcttggacccaggggggagaggttggagngaaccaagtttggggcaatggaatccaggcnggggtaacaagggaaaatcttgnctt

SEQ ID NO: 646538 - DNA, 199 bp, Homo sapiens
  misc_feature (15)..(15): n is a, c, g, or t
  misc_feature (57)..(57): n is a, c, g, or t
acaggatctcgtgtnatgcacttggacaccagtcgataatagagtaggagtcgtacnaaatatgcaattttttttaatggtactttctgtgtcgaagttggaggatggtatctttattggtcctctccttggtgcaatgcaccaaggaggtccttggccaatcttgccatccactttgtagtggatgtcaagatttgga

SEQ ID NO: 646539 - DNA, 573 bp, Homo sapiens
agctggtgtagccgtggacgccgatgtccagttgtttaactgcacgagccaagtcctgagggctgtgtacagcgatcagtgttagcggtcccactttctgtagtcttcctcatggtactccttataggggccctcaaacacccgctggatctcttccaactggtactcacagatggccgacaggttacatgtcaccgccactgtgcttgaaaaaccccaaagaaggtggtgttgttgccagagcatgtgtcctggcatggtgtgcttcgcctgcagctggttgaagtaaatctgtcagtgcggggcagagcatgccaaccgcgccttcaggaacgtggtccacttcctctgcaggttccgtgcgccccccatatcgcccttgcagacacgggccacactgagccgatcacctgctcggcatagcagtcggactccactgcccgctccctgaagaaaaagtagaccttatcgtcgtcccccgtgaagctgtccaaactctcaggtacattggcagagcctacatcgtgaggttcgttgacccagaaggccatgttctctgtcttcatggagtga

SEQ ID NO: 646540 - DNA, 711 bp, Homo sapiens
tgtacttactcatcacccaagcttcaacatttatcaacatcttgccaatcttactgaatctatccttccttagcttttataaaaatgtttcctagaggtgtgtcaaagctcatcccagaatgtcctaatgtatctagtaaatgcttctgcacaattctaaaagacaaggatgtttttaaacccagccccgacactatcatacctcacaagattcatgctaattcctcagtgtcttctagatcccaagtccatgctcaagtgtccccccctgtccaggcaccctcttcaggggtcctccatgtttcatagcgagaaggggccctgagagattgggcaccccgggcaggctggctggagggggctttggaaaggaacggctttggccagcgtgtgatgggctgcaggtctcaccagcatccatgttcggatctgttatcacgcgaacaaatgtggttatactaggcggctgcgcggtgctgacgaacatggaaactgtaagtcggctacgaggccaaggcaggcgtaggctaagggtggcgggctgggggtaggagatgaggtccaggaactcaggctccatctctcacatcctagtcccagagtagcccctgggctctgggaaagccctgagcgatttgtgggaactcatgcgggcctgagtgcccagacccctgcggagtacaccaggctcacccacaatcatgggcaccg

SEQ ID NO: 646541 - DNA, 117 bp, Homo sapiens
  misc_feature (1)..(1): n is a, c, g, or t
ngtagaaataattttcttttttggcgacacgggcttgttctatgacccaggtatgagtgcagtggcgtgatcacagctcactgccgtcttgacctcccaggctcaagcgatcctcca

SEQ ID NO: 646542 - DNA, 216 bp, Homo sapiens
agcagactagtgctgtgggaggaatgggggattgggaggtgatggctaaggggttatggggtttgggggaggtaatagaaatgttttaaaattggttgtgaaggtggatgcccaactctgcgaatacactaaaaggcatcgaattgtatactttaaataggtgaattgtatgctatgtgaattatatctcaataaaggtattttttccctgctgtt

SEQ ID NO: 646543 - DNA, 100 bp, Homo sapiens
gagacatctattgcttctccatcccagtataatcactattaacaatttctcatccttaaggatgagaaattgggggctccgtgaagtcagaaacagtaac

SEQ ID NO: 646544 - DNA, 490 bp, Homo sapiens
tcattagtaactacataagatgcatccaagatgagaatctataacatgcatctcagaatgggtactatgctgatgttttcaattagtcttcaatgccattttccaattacagtgttttctactgaagtttgaaaccccccataaaggcagaaatgagcctctcttcccctgaaacctcccattatggcaggaatgagcctctctttccctgaattcctagagttctacaatggaaaggctaaatctgtggtagctccattcattttaactttgcctctggggagatggtgaacctttcctaatggactttgcttgtactacctttgtgatctatcatattctgttgtttctggtaaccatttacacgtatgacaatagatttttaagttcatcaatggcaggaatggtattttatacattcccaagttttaagatgtgcttttaaaaaagatgggaccaggtgcagaggctcatgcctgtaatcccagca

SEQ ID NO: 646545 - DNA, 572 bp, Homo sapiens
tgttgtcgtgcaggtagaggcttactagaaagtgtgaaaacgtaggcttggattaaggcgacagcgatttctaggatagtcagtaaaattaaaattgtgaaaatgataaggtgtaaagggaaggttaagtggttgatattgcttaggggtggcgcttccaatttagggtgcagtgagttagggtggccgtgcagtaagtgttagcggtttaggcgttacggccagggctatatgtggtttagaattgagtatagcgctgtgagtggtttccgatataatatacacatagttatgtggggcattaagggggtgttaggtgtgtgtgcctttggtggttaaaaagtgtgggcttagggcatttttaaactctctttaaacagcgcaaacctctattaatccatctgcgccccgcctccataaaagggagattggccatgggtctaacggtgttatataaaataagttgggtgtgggttcgtggtgtaatatggattggaggcaggagtccgagaggaagtgttaatgtatggtggcgacatcaaacatatggattcaagcgatcactaatgttt

SEQ ID NO: 646546 - DNA, 726 bp, Homo sapiens
  misc_feature (169)..(169): n is a, c, g, or t
  misc_feature (180)..(180): n is a, c, g, or t
  misc_feature (189)..(189): n is a, c, g, or t
  misc_feature (211)..(211): n is a, c, g, or t
  misc_feature (281)..(281): n is a, c, g, or t
  misc_feature (286)..(286): n is a, c, g, or t
  misc_feature (607)..(607): n is a, c, g, or t
  misc_feature (681)..(681): n is a, c, g, or t
cggaagtcccgtctcacggttgccctggcagcgcgcgaggctggtgagtcggcagccctgtggcagccggcgggctggtttccatggttgcacgattaggaaccaccagctgctgcatcccatggccagtggtggcgtccaggtggcagagcagctaggaacgcaaggnctgaacctggngccagacancctgctctcccggccatggtcnacgaccctccagtacctgccttactgtgggcccaggaggtgggccaagtcttggcaggccgtgcccgcangctgntgctgcagtttggggtgctcttctgcaccatcctccttttgctctgggtgtctgtcttcctctatggctccttctactattcctatatgccgacagtcagccacctcagccctgtgcatttctactacaggaccgactgtgattcctccaccacctcactctgctccttccctgttgccaatgtctcgctgactaagggtggacgtgatcgggtgctgatgtatggacagccgtatcgtgttaccttagagcattgagctgccagagtcccctgtgaatcaagatttgggcatgttcttggtcaccatttcctgctacacnagaggtggccgaatcatctccacttcttcgcgtcgtgatgctgcattaccgctcagacctgctccagatgctgnacacactggtcttctctagcctcctgctggtaccgagctgatata

SEQ ID NO: 646547 - DNA, 164 bp, Homo sapiens
cttcgagataatcccgtgtatagaagaggccgtccctcagtgagtcgctgacgtaacttgggagtttcttgtagaagggggaatctgcgtatgcggtcagtgacaccgaggcttgatctccagccttcgcatgaatttcatttactgcgtcagccttcgcgggg

SEQ ID NO: 646548 - DNA, 1596 bp, Homo sapiens
gctcctgtatgcctgccgcctgccgctgacctgccgtccctctgccagcagctccgtgctgccacctctgtggcctggctgtcttcctgtgctgggctgtggagccagtgctgctagactgtgtgctgctggcgtggtgtgctggcctgagctgctccatgctgtgcttgcgacctcagtgctcctggcagtctgctgtcttcccacatggtggcttggaccatgcctgagaagccattggagcacgctcgtgaagactttgtcaacttgacttgttcccacatgtgtgccaacacctgcacgaacgcgtcgactcttctggcaaactctcgctaggacgacggtatatgcacaattatgtaggacgcacatgctaggaccacatatactcctttgtcacatgttccaaatcctcgttataagactttatcacacactcatgggaagaaccatatcaacgcaacacacttccatttgcaacccacacctcttgggctcaacttgcacatagacagtatggaactttgaccaagccttaccccatccgcaattgacaccagcggctctacccaccttcgtccccaaaggcgcaccacatctcctgcgcaagcccaaggaagacacactttacacattggacacgctaaatccatatacctttcctttgacattcgcactcaacgctgcaaattccccccatatactcaacttggctggcgagccaaggaaacccattgggtggcacgccaaccaatttttccgttaaacgacgcaaagccaatcaatttcctatggacgacggctggaagattaacagacaagggccatcctttaccccccttcggctaggttacaagcccacagcagattatcatcacaattgcgcggcgttccagacacatgggtacaactaggaataaagagacaaaacaagagccaaattacggatcgacacgcaaacccccctttgggcctttggcaataaaccctggcggagaaccacaggcgaacatactgagaaccattgagtagacctaaacccacaatagaaaactttgcgacaacattcacccaacgcatctggtgattggccaacaaacggtactttggagactacgcggttggacccttcccacaatcaaagacagcacgacacttcacactctacacttgcccacaaccaatccccttttggtaagcacaacacaaacgagataatttctttccacaacacgtaaaaacgctatcattgccactagcccaacaccctaaaagtggggacaagtctccccagcaacattgaattgcaacatctactgcagaaaccgtatcgcaacaacagtcaacctccaaactcaaaccacctgagaaaagaaaacccaaagattatccccataatatacacaaaaactaggacaacgacatgccacatatttacacccgatcacacatcattatccaacccacaccacctgagagacacaacaacgagagatcacaaacatgcgaaaccatacaactcacaaaataccacacacatcgatcaacatatcacaaccatcgtccaacaaacagctccgatctccacacgtatca

SEQ ID NO: 646549 - DNA, 2465 bp, Homo sapiens
ctgccccctcctcgggggcaaaggctttgtgaccaagcagacgacgaagcatgtccaccaccactacatccaccaccatgccgtccccaagaccaaggaggagatcgaggcggaggccacgcagcgggtgcactgcttctgccctgggggcagcgagtattactgctactcgaaatgcaaaagccactccaaggctccggaaaccatgcccagcgagcagtttggcggcagcagaggcagtaccttgcccaaacgcaatgggaaaggcacggagccgggcctggccctgcccgccagggaaggaggggcccccggcggagctggggccctgcagcttccccgggaggaaggagacaggtcgcaggatgtctggcagtggatgctggagagtgagcggcagagcaagcccaagccccatagtgcccaaagcacaaaaaaggcctaccccttggagtctgcccgctcgtctccaggcgaacgagccagccggcaccatctgtgggggggcaacagcgggcacccccgcaccaccccccgtgcccacctgttcacccaggaccctgcgatgcctcccctgaccccacccaacacgctggctcagctggaggaggcctgtcgcaggctagctgaggtgtcgaagcccccaaagcagcggtgctgtgtggccagtcagcagagggacaggaatcattcggccactgttcagacgggagccacacccttctccaatccaagcctggctccagaagatcacaaagagccaaagaaactggcaggtgtccacgcgctccaggccagtgagttggttgtcacttactttttctgtggggaagaaattccataccggaggatgctgaaggctcagagcttgaccctgggccactttaaagagcagctcagcaaaaagggaaattataggtattacttcaaaaaagcaagcgatgagtttgcctgtggagcggtgtttgaggagatctgggaggatgagacggtgctcccgatgtatgaaggccggattctgggcaaagtggagcggatcgattgagccctggggtctggctttggtgaactgttggagcccgaagctcttgtgaactgtcttggctgtgagcaactgcgacaaaacattttgaaggaaaattaaaccaatgaagaagacaaagtctaaggaagaatcggccagtgggccttcgggagggcggggggaggttgattttcatgattcatgagctgggtactgactgagataagaaaagcctgaactatttattaaaaacatgaccactcttggctattgaagatgctgcctgtatttgagagactgccatacataatatatgacttcctagggatctgaaatccataaactaagagaaactgtgtatagcttacctgaacaggaatccttactgatatttatagaacagttgatttcccccatccccagtttatggatatgctgctttaaacttggaagggggagacaggaagttttaattgttctgactaaacttaggagttgagctaggagtgcgttcatggtttcttcactaacagaggaattatgctttgcactacgtccctccaagtgaagacagactgttttagacagactttttaaaatggtgccctaccattgacacatgcagaaattggtgcgtttgttttttttttttcctatgctgctctgttttgtcttaaaggtcttgagggttgaccatgttgcgtcatcatcaacatttggggggttgtgttggatgggatgatctgttgcagagggagaggcagggaaccctgctccttcgggccccaggttgatcctgtgactgaggctccccctcatgtagcctccccaggcccagggccctgaggcctgctagaatcactgccgctgtgctttcgtggaaatgacagttccttgttttttttgtttctgtttttgttttacattagtcattggaccacagccattcaggaactaccccctgccccacaaagaaatgaacagttgtagggagacccagcagcacctttcctccacacaccttcattttgaagttcgggtttttgtgttaagttaatctgtacattctgtttgccattgttacttgtactatacatctgtatatagtgtacggcaaaagagtattaatccactatctctagtgcttgactttaaatcagtacagtacctgtacctgcacggtcacccgctccgtgtgtcgccctatattgagggctcaagctttcccttgttttttgaaaggggtttatgtataaatatattttatgcctttttattacaagtcttgtactcaatgacttttgtcatgacattttgttctacttatactgtaaattatgcattataaagagttcatttaaggaaaattacttggtacaataattattgtaattaagagatgtagcctttattaaaattttatatttttcaaaaaaaaaaa

SEQ ID NO: 646550 - DNA, 2270 bp, Homo sapiens
ctgccccctcctcgggggcaaaggctttgtgaccaagcagacgacgaagcatgtccaccaccactacatccaccaccatgccgtccccaagaccaaggaggagatcgaggcggaggccacgcagcgggtgcactgcttctgccctgggggcagcgagtattactgctactcgaaatgcaaaagccactccaaggctccggaaaccatgcccagcgagcagtttggtgcccaaagcacaaaaaaggcctaccccttggagtctgcccgctcgtctccaggcgaacgagccagccggcaccatctgtgggggggcaacagcgggcacccccgcaccaccccccgtgcccacctgttcacccaggaccctgcgatgcctcccctgaccccacccaacacgctggctcagctggaggaggcctgtcgcaggctagctgaggtgtcgaagcccccaaagcagcggtgctgtgtggccagtcagcagagggacaggaatcattcggccactgttcagacgggagccacacccttctccaatccaagcctggctccagaagatcacaaagagccaaagaaactggcaggtgtccacgcgctccaggccagtgagttggttgtcacttactttttctgtggggaagaaattccataccggaggatgctgaaggctcagagcttgaccctgggccactttaaagagcagctcagcaaaaagggaaattataggtattacttcaaaaaagcaagcgatgagtttgcctgtggagcggtgtttgaggagatctgggaggatgagacggtgctcccgatgtatgaaggccggattctgggcaaagtggagcggatcgattgagccctggggtctggctttggtgaactgttggagcccgaagctcttgtgaactgtcttggctgtgagcaactgcgacaaaacattttgaaggaaaattaaaccaatgaagaagacaaagtctaaggaagaatcggccagtgggccttcgggagggcggggggaggttgattttcatgattcatgagctgggtactgactgagataagaaaagcctgaactatttattaaaaacatgaccactcttggctattgaagatgctgcctgtatttgagagactgccatacataatatatgacttcctagggatctgaaatccataaactaagagaaactgtgtatagcttacctgaacaggaatccttactgatatttatagaacagttgatttcccccatccccagtttatggatatgctgctttaaacttggaagggggagacaggaagttttaattgttctgactaaacttaggagttgagctaggagtgcgttcatggtttcttcactaacagaggaattatgctttgcactacgtccctccaagtgaagacagactgttttagacagactttttaaaatggtgccctaccattgacacatgcagaaattggtgcgtttgttttttttttttcctatgctgctctgttttgtcttaaaggtcttgagggttgaccatgttgcgtcatcatcaacatttggggggttgtgttggatgggatgatctgttgcagagggagaggcagggaaccctgctccttcgggccccaggttgatcctgtgactgaggctccccctcatgtagcctccccaggcccagggccctgaggcctgctagaatcactgccgctgtgctttcgtggaaatgacagttccttgttttttttgtttctgtttttgttttacattagtcattggaccacagccattcaggaactaccccctgccccacaaagaaatgaacagttgtagggagacccagcagcacctttcctccacacaccttcattttgaagttcgggtttttgtgttaagttaatctgtacattctgtttgccattgttacttgtactatacatctgtatatagtgtacggcaaaagagtattaatccactatctctagtgcttgactttaaatcagtacagtacctgtacctgcacggtcacccgctccgtgtgtcgccctatattgagggctcaagctttcccttgttttttgaaaggggtttatgtataaatatattttatgcctttttattacaagtcttgtactcaatgacttttgtcatgacattttgttctacttatactgtaaattatgcattataaagagttcatttaaggaaaattacttggtacaataattattgtaattaagagatgtagcctttattaaaattttatatttttcaaaaaaaaaaa

SEQ ID NO: 646551 - DNA, 455 bp, Homo sapiens
agctatatccctttcttaaggtgtataatattaaagcagctgtgacggagtggaaaaaaaagaggatccgcacactccgcgatgaggtgaaaataggagcacatgggacaccagtgacccttgtccattctaaagactgtggtggaggccttgtggaactggagcaagcttgaattatatttgcaagcaactaaattaattgacctgaaaaagcctatcaaatactatcaaaatgtactatgacattgagtccttcactgtttccatcatgtaaaagatcacagttcaagactgagttacagaaagagtaagatatatacatatatcaatacataaagatgtatattatgtagattaacaaacatatttgttaattcgaatttgaagaaaatcttgattactaattacttagggaacattattaaaatcatattgaaataaattattcctcttct

SEQ ID NO: 646552 - DNA, 2337 bp, Homo sapiens
ctgccccctcctcgggggcaaaggctttgtgaccaagcagacgacgaagcatgtccaccaccactacatccaccaccatgccgtccccaagaccaaggaggagatcgaggcggaggccacgcagcgggtgcactgcttctgccctgggggcagcgagtattactgctactcgaaatgcaaaagccactccaaggctccggaaaccatgcccagcgagcagtttggcggcagcagaggcagtaccttgcccaaacgcaatgggaaaggcacggagccgggcctggccctgcccgccagggaaggaggggcccccggcggagctggggccctgcagcttccccgggaggaaggagacaggtcgcaggatgtctggcagtggatgctggagagtgagcggcagagcaagcccaagccccatagtgcccaaagcacaaaaaaggcctaccccttggagtctgcccgctcgtctccaggcgaacgagccagccggcaccatctgtgggggggcaacagcgggcacccccgcaccaccccccgtgcccacctgttcacccaggaccctgcgatgcctcccctgaccccacccaacacgctggctcagctggaggaggcctgtcgcaggctagctgaggtgtcgaagcccccaaagcagcggtgctgtgtggccagtcagcagagggacaggaatcattcggccactgttcagacgggagccacacccttctccaatccaagcctggctccagaagatcacaaagagccaaagaaactggcaggtgtccacgcgctccaggccagtgagttggttgtcacttactttttctgtggggaagaaattccataccggaggatgctgaaggctcagagcttgaccctgggccactttaaagagcagctcagcaaaaagggaaattataggtattacttcaaaaaagcaagcgatgagtttgcctgtggagcggtgtttgaggagatctgggaggatgagacggtgctcccgatgtatgaaggccggattctgggcaaagtggagcggatcgattgagccctggggtctggctttggtgaactgttggagcccgaagctcttgtgaactgtcttggctgtgagcaactgcgacaaaacattttgaaggaaaattaaaccaatgaagaagacaaagtctaaggaagaatcggccagtgggccttcgggagggcggggggaggttgattttcatgattcatgagctgggtactgactgagataagaaaagcctgaactatttattaaaaacatgaccactcttggctattgaagatgctgcctgtatttgagagactgccatacataatatatgacttcctagggatctgaaatccataaactaagagaaactgtgtatagcttacctgaacaggaatccttactgatatttatagaacagttgatttcccccatccccagtttatggatatgctgctttaaacttggaagggggagacaggaagttttaattgttctgactaaacttaggagttgagctaggagtgcgttcatggtttcttcactaacagaggaattatgctttgcactacgtccctccaagtgaagacagactgttttagacagactttttaaaatggtgccctaccattgacacatgcagaaattggtgcgtttgttttttttttttcctatgctgctctgttttgtcttaaaggtcttgagggttgaccatgttgcgtcatcatcaacatttggggggttgtgttggatgggatgatctgttgcagagggagaggcagggaaccctgctccttcgggccccaggttgatcctgtgactgaggctccccctcatgtagcctccccaggcccagggccctgaggcctgctagaatcactgccgctgtgctttcgtggaaatgacagttccttgttttttttgtttctgtttttgtgttaagttaatctgtacattctgtttgccattgttacttgtactatacatctgtatatagtgtacggcaaaagagtattaatccactatctctagtgcttgactttaaatcagtacagtacctgtacctgcacggtcacccgctccgtgtgtcgccctatattgagggctcaagctttcccttgttttttgaaaggggtttatgtataaatatattttatgcctttttattacaagtcttgtactcaatgacttttgtcatgacattttgttctacttatactgtaaattatgcattataaagagttcatttaaggaaaattacttggtacaataattattgtaattaagagatgtagcctttattaaaattttatatttttcaaaaaaaaaaa

SEQ ID NO: 646553 - DNA, 380 bp, Homo sapiens
  misc_feature (189)..(189): n is a, c, g, or t
  misc_feature (209)..(209): n is a, c, g, or t
  misc_feature (275)..(275): n is a, c, g, or t
tactcctcaatcgctttgccgatggtcggcgtgtaaacgattgcaagcatctcctcaatatgctcggcaaggaggcggaaatacagcacctcattgcggtcatgcatgtggttgaggtacaggtacttggctaggtcatcaggctgcgccgaatactgtgcgtagacccgcttgagctgatcagtgatngtcatgacacccgacggcancaggccggtgagaccaagcgcctttcgctgctcgatagtgaaggcagtgccccgattggccagagngttcgtcaacacctcctggccacgggccgcaatccttagaaggcctccgtcgtcatcatgcgcatactgaaagggaactgacatatcccttagcttatgcggtca

SEQ ID NO: 646554 - DNA, 573 bp, Homo sapiens
  misc_feature (24)..(24): n is a, c, g, or t
  misc_feature (174)..(174): n is a, c, g, or t
cggcacgaggaccgcatcaacatntacgactggggagatgatgtgagattccacagcagccccagccagccgaggccccagtgcttctgtgttcctgagggctgatccctgcggctataaaagagcacacgcgaggtgtggggtgcgggtacaggtgtcagaaccggcctcggntacagccgagagcaccctcctctgtccaggagaccaccccaggttcttgaccgtctggcctctgggcagtgtggcggcccctctccctccctctgacctgtccagcgtagttgcagcttgcagtggggctcccagggctcatgctgagcatcaggaggtgaatctcggctccaacagccctcgtggccttgggagatgctgccctttctaaacctgaactttttcaagtgtaaaaatgaggatatttaattttctgagatgtttcaggtactaaatatgaaataattaaaggaattttggaaaaggacaaagctttatgcagtataaggaatgtcctgaagttgaaacttatgtacatattttgatcaaaggtgaaataaaattgcatttaaatctgca

SEQ ID NO: 646555 - DNA, 201 bp, Homo sapiens
atgatctaaggatctttggcgaatcctcctcctcctgggcgtaatacttgagcccgggagtcgagaccagtctggccaacatggtgaaaccttgtctctactaaaaaatacagaaaatttgccaggtgtggtggtgtgcactctgtaacccctagctactccagtaggctgagtgcagcgagaatcacgtggaacccgatg

SEQ ID NO: 646556 - DNA, 185 bp, Homo sapiens
taaatgaaaggttttcctggcgggtgtggggggcccacttttgggccggggggggttccaaaaaaaggaccctggtttcttttcccaataggttgactgggctttcccctgcccaacatttgtgctggaatccacagagggttggccttgcagggccctgctttgaggggcccctggcttttgct

SEQ ID NO: 646557 - DNA, 641 bp, Homo sapiens
gatctccctgagcatcaggctgccaggtgcgcgtctctggtgagcctctcacgttggcgatagctgcgtcgtaggagacaatgatgtctaaaggtcggattggctgcccatggctaaaaatcgaagagttgagcagagacacgtatcgagtaaatccggagggggatcatgatgctgcattactggtgtgctctaacggttacgtgaggaaccgaagaccagcaacgctctctgaagtttacgaccgcacgcgtgtgagacgcactgcaggcaggcgcttctcaatttgaaacgagcgcagccaagttgaagaggaaatatggtggaagaattgcaagatgtgggcaatcgggattactgttctggttatcttcatcatcatcatcatcgtgtgggttgtctcttcatgaagaaccagcggaactcaaaactgctgtctcaagaaacctcttcaagactttgacttagaacctgctatattatcaagcttacctactgttatctctaaaattataaggtgtcaactgtaagagttgacattctctaggaaacgtgccttggtatattaattatgcaactccaaattagaaggcggcccgttccacattttgcaccagggccttacaggaattcacgtatgg

SEQ ID NO: 646558 - DNA, 551 bp, Homo sapiens
aaaaaaaaaaaaaaaaaaacaaaaaaaacaaatcttaaaattaaccacacaaaaaaaaaaaaacaaaaaaagggcgataaataaataaaaaatcgcaaaaaacaaaacaaataaaataaaaataccctttttccgccctttcccccacatcatttttaaatctcaccaacttatcccatccgccccaattccaccctcattggccaattcccccttataggaagcgttttaaaattcaatcgcccggtttttaacaccgtgcacctggaaaaacccttgctttcccaaaattaaatccttttgaaaaaaattccccttttccacattggcttaaaacaaaaaaagccccacccaatcccccttcccaaaattttgcccacctctaattgcaaaacgaaaaatttaaacccttaaattttttttaaaaatccccgctaaattttttgtaaaaaccaactatttttaaacccaaatggcccaaaatatggaacaaattcttttataaatacaaaaatacaccccatgggtttggttttctctccccattttcc

SEQ ID NO: 646559 - DNA, 250 bp, Homo sapiens
  misc_feature (237)..(237): n is a, c, g, or t
aagcggatcttccccggggagcaccgttcgatctgcaggtactcgaaaccttcggggtctcgccccagcttgccgcccgctacgtggagagtggctggctggtgcgcatcggccatggaatctatgcatttcccaatgacaacttcgatgtcaccggtgcgctgcggttccttcaacagcgtgttgctggcttgcacgtgggcggtaagagtgctctagcgacgcaaggtgtgcggnacaccttgagcaa

SEQ ID NO: 646560 - DNA, 186 bp, Homo sapiens
tgtacctaggatcaaggaaagaaccagtcaaacccaggacagtatcgatatatcaaagcaaatggatggctcttagcttcttcgcggatattagtgactggagattccaatataagggcatgttctgcccaaagcatcagggaatcacaggtcagtcacagccatttagggagggcatgtcaccca

SEQ ID NO: 646561 - DNA, 660 bp, Homo sapiens
atgcagacaattaagtgtgttgtcgtgggcgatggtgctgttggtaaaacatgtctcctgatatcctacacaacaaacaaatttccatcggaatatgtacgggctgtttttgacaactatgcagtcacagttatgattggtggagaaccatatactcttggactttttgatactgcagggcaagaggattatgacagattacgaccgctgagttatccacaaacagatgtatttatagtctgtttttcagtggtctctccatcttcatttgaaaacgtgaaagaaaagtgggtgcctgagataactcaccactgtccaaagactcctttcttgcttgttgggactcaaattgatctcagagatgacccctctactattcagaaattggccaagagcaatctgaagcgtatcgctccagatagtgtttaaaagatgggcggtcccttcaaggatgtcgagtatgtggagtgttacgcgcttacagagcaaggcataaaaaatgaattgggcgaagcgacagtgggtgcagtggagcgtggtgaacgaaaggagtgtcgccggtgtgcgtccatataggggtctctccatagccagttgaggtgagggggtggcggcatcattctaagaacaaggttaaaatcaatctacagattaggaatc

SEQ ID NO: 646562 - DNA, 1179 bp, Homo sapiens
taacagaggaggggctcttaatggtgggaggtgtctggaactgcgaggaaggtcagcagcgcagggggtgcgcgaccccagccagcgtggcagtgttagggctgggctgtgggcgccattccgcccgcgatttcccattctccctcgggagcattccctgggggagccgccattcacctcggaagatttccgcattcaaacctaggggctccgtggagaacctcgcgtgattcgccatcacaggggttataatataccattcattttcacacgcgtgcgtgcatctccgatacaggcgtcctcgcgtgtccccgacacagcatcgtgggcgttcttccagtacaacgtgacagaaagggcccacgcggtgcccaagccggcgtcgtgacctccagtctccgtgacacggcgtgcgcccacggtgtgcccgcgcgaagacaaggcggtgtgcctggcgaaggcccgccacagcgtcgtggcattccaccgaccgagccaccttccgcgggaagagtcggccggccgaaaggccctgggttacacccccggtgcaccgtgggcactccccgggatacgccgccgcagaaacgtcgcggaaaccgctcagggggcccaagaatcgcagcaaaggtgtacttgagggcggggaggagccatacatggcggagccatatttgtggggagaccctcttagaagcgcccagcagacccacaccaggggcgctccatccagggggccccatggaaaaccgcgcggcgaggcccaacaccacaagtattcccttccacagagatcctcgggcgcggaaaaaaacgccccacgtggcgtagtccggccggcactacaccgcactttggcaacgcccatggggatgggaaaactgcacgcccgtggacccaccacacacaccgttgacacaacaacagtatacttgcacaccacagaagccctcgattggaaagaacccacgacaatgatgtgacacgcgcaacacacttcggtgggatgccgcgtctgcccaattatcacgtggggccccccaccaagcaagagtacgcattaggggcactaacccacggcacgtgcaggagtaacgtggaactaccacgtgtctcaataaattgtccccccaccagtcacatatgagaaacccccccaaacgccttcccccaaagcta

SEQ ID NO: 646563 - DNA, 147 bp, Homo sapiens
ctactcatgtacacagcatactagaggcctgcactactgcacaaaccagctactatctagcgtggaaggaagcaggatatcctgtcaggaccgtttgaaaagtggagcatattaacaaggtcaaaatgtgggtggggataccagggg

SEQ ID NO: 646564 - DNA, 536 bp, Homo sapiens
catatgcccagcatttcttcatgagctcatacagaggggcagggcaggccacaggaggggggcaccggtacccatcctcaatgctcttcataaccacctgattgctcatctccccatgtggcttgtccgcatagctcagacacctcccagatcacaatcccaaagctccatagatcgctggctgtggtgaagaatccgatgggcaatggattctaggggatgctccaacggatagggatcttttctccctgtgtttctgtatgtgccatcagagtcatccaggaggcgagtcaggccacagtcagacaccttgcagcacaggtttcgattcaccaagatgtttctggcaggcaggtcccggtgaacataattgtgattactgaggtagtccatgccatgtgctatgcctgcagcatggccactagctgcccagggaccagctggtcctcccgctccctcaggaaggcatccagggctccattctccataaattctgtgatgatcatgatcggctttcgctttgtgacgacgccttc

SEQ ID NO: 646565 - DNA, 109 bp, Homo sapiens
acgctaagagggccgagacgccgagcgtgacgtcatcggcgcgcgcgctctcgctctctctcgcgcgcgcgggggctcgcgctccctcccttagtctctctcgttttat

SEQ ID NO: 646566 - DNA, 90 bp, Homo sapiens
gtttttttttacccccccccccccccccccccggggttttattttgctttttggggggggggggtgtaaataaaatggtttttttttcca

SEQ ID NO: 646567 - DNA, 588 bp, Homo sapiens
aattggcttagacctactgtttaaaagttcgtagtagcatagacacaacagtgataagagaatcttactaggagctgtgttgttaataggctctttaggctgctctctagtggaaatgctgtgaggctgtggcctgcactggctcatttggagttgacagtgatggggagcttggtaagggattgatgcttacaatggccgtaccttcatactgggattctttggaaaataaaaagccttgttgcttcatatcacattgttcatagtaatctcactctctgggagagtcattttcttgaagcaccaggaagtagctatcacaaatccagaagaggatttgaattcaacccccactccccaatttcttctccactctctttcacactttagctggccacactggccttttgtttcagtttcagtctccctgatgtaaactgccttcttgattgcttctttacttttaaccacctctgctgtgatttgtattgttgaaataacttctacccactccaatagaatgctaaatgttagattaataagaggaatgcctgtttctggctcaaagaattagtggttagtgcaaaa

SEQ ID NO: 646568 - DNA, 236 bp, Homo sapiens
ctgtaatcccagcacttttggaggctgaagcaggcagatcacaaggtcaggagatcaagaccatcctggactaacacggtgaaaccccgtctctactaaaaaaaaaaaaaaaaaaaaaaaaaagatctcatctacaaaaaatgaaaaatttccccaaatgtggggccaactgccccaattccaagctacttacaggggtgggggagggggtttcctgggatccagggagtctaagg

SEQ ID NO: 646569 - DNA, 395 bp, Homo sapiens
ctcaccacaacctctgcctcccgggctcatatgattctcctgcctcagcctcccgagtagctgagactacaggcatgcaccaccacgcccagccaattccgtatttttagtagaggcggggtttctccatgttggtcaggctggtcctgaactccggacctcaggtgatccacccacctcagcctcccaaaatactgggattataggtgtgagccaccgtgcgtggatgcattattaattttgttaaaatacttataacaaaatgttccatgttaacagttatttagtttgtaattcagtggtgttaattacattcacagtgttgtgcagccatcacctctatctactttttcatgaccctgagcagaaactccgtagccatgaaaaaataactc

SEQ ID NO: 646570 - DNA, 196 bp, Homo sapiens
aacgggcattgcagcttgctgctgcaggtcgttgctaagatccccactgaaattaactaattatcctaagtctctatctacagacagtgctttgcccctattaagtgacactttacaaattagaaaaacgctagaacaatgaagtacccataaagtggccaaatcttttcatgaatggaggaaacacatttgtatg

SEQ ID NO: 646571 - DNA, 698 bp, Homo sapiens
gctgcgctggctccgctgctgcccatctgtcccgccccttgactggggccggctgcggtggaagcacacgctcctccctgaaggtggccaacgagcccgtcttaggcttcactgcaggacatgcctgagctgagatgccctgcaaaaggccttgaagtgacctgaagggcctggatgtgaatgccatcccatgcgtggttggggtgatgaggagtgtgttggactgtcgtgacgtgcagtaccaagtgtacgccttttaaccatggacataagtgtggccaagttctgttatgcagacaagagcctgctcaacaaagccattgaggctgccctggctgcccggaaagagtgggacctgaagcctattgcagaccggtgcccaggatcttcctgaaggcggcagacatgctgagtgggccgtgcatgtctgagatcctcggccatgaccatggtgggacagggtaagacctgtgatccaagcggagatatgacgctgcagctggaactcatcgacttcttcaggttcaatgccaaagtatgctggtggagcttgtgaggtcaagcgaggcccatcagcgtgccccgagacacaacagcctgtgtaccgggtctgatggcatcgtggaggcatccgcccttaatttactgcaatctgggcacctgctgaggaccggcctgtggcaacgtgcctatgagca

SEQ ID NO: 646572 - DNA, 248 bp, Homo sapiens
gatgagttttctttcttctgttctggctgaggctcactcaaatggagattaaagatgcctattgcttctgggagaaagcgtctgagggggcagaactgaaaaatagaacatggagagggactgcaatcagcctgttccgtcttcagatttttggagagaacagtaaagacaatccttgacggctctattttgtctgtcttagctcagtagggtagaaaacctaaaaacaatttaggcaaaatctatag

SEQ ID NO: 646573 - DNA, 826 bp, Homo sapiens
aagcatattggagatggtaaacgctactgtctgcgatgtagtaggcagatgtggtaggataaagatggaatgcgctaggtcgaatttgcgaagaggaaaaatgaggtagagagatgctaacgctacaaaatcgatatagtgtgcttgcaacggtgtcatgtccatcaggtaaactagaatagatggagaatgaatagacggtctggtgggatgattcggatactatagtttgtcgggtgaatgacattagtcataaaagatacatagagacatctgatttccaaagtgggtatactatgaagttacattcggactatggatcgatcgatctaatctttgtgagatcatcattattaatatctatgttggctcataggttcggggtacttctccatggccactgggaatttctgagggatcattttacttaggtgtttattttatctgttactaataattatcgatgagacagttatgtttaactgactattcataatagatcaccatacatttcggggtgtcaaagtcttggaagaaattgatattttgcaccggagaatatgattcccaaaagttggaataaaaatgacaaaacaacgagggaaagaagtgaaaccagaccttagtggcacatatttgtggctctaggggtcgtaaggtagtctcctgtttccagaagagtttatggatatttcacttatagagcgcgattttctggtgtaaaagtcattaatgtgtcatgctgaaggtgttagcctaaaaagccaaaagaaagtgcgtcctcgtgcgaacatattcaggagtttaacagagacggaccaaattg

SEQ ID NO: 646574 - DNA, 158 bp, Homo sapiens
  misc_feature (117)..(117): n is a, c, g, or t
  misc_feature (131)..(131): n is a, c, g, or t
cagtgtgcgagcgatgtagcgcaagatggcatagtctgggtgatcttgttcttcccatccaggaggtagggcagattaggaaagtccaggtctagcttgaatttcacatccagccantggcttcgatcatngtcaggagcacccagcacgaattacct

SEQ ID NO: 646575 - DNA, 299 bp, Homo sapiens
gagaaatgcaaatcaagaccacaataagacaccatctcacactagtcagactggccattttttaagattgggagaaaaattattttggccaacgttccagagaaaaaggggaaacttatacactctggtggggatcgaattagttcagccactttggaagcagcttagagatttctcagatgcaattgaaacagactctatttgatccaccgatcccattactgggtatatacacgaggcatatagatcgtctatcagaagcacatgtactcgtctctcatcacacactatcacatatc

SEQ ID NO: 646576 - DNA, 218 bp, Homo sapiens
ggcgtgtctgcgagtaccccttgagaaggtcttgaagggatccccgagggctgagccatgcgagagagaggtgggcatggccctggatagctccacagtggaatcacgcctccggaagggaagtggagaaggttttcaccggacttagcaacatggggagccacaccggccaggagttggaccaaggcgtccaggcgctccaccacggcatagaccag

SEQ ID NO: 646577 - DNA, 838 bp, Homo sapiens
gaatgcgtcaccctgcttcggtcgcgcacggtgcgtgcacccatgacctggaccactgttggcactccctagtgagatgaaccctgtacctcagatggaaatgcgaaatcacccatcttctgcgtcgtcatgctgggagctgtacggatcgggagctgtacctattcggccatcgtgtggctcttcccccgttggacaatttaagggtaaagaccttcacaatcgggaacccgtagatgggcatcttctgaaaaccaatcagagagaagactatctttgacatccacactacagtaaaactttgtggagccttgaacctttggatttataatctcacaagtgagaagggtccctccatactcctgggactgtacacccatgagaacgtcttaaggtaaaactaacgcaggaaagtttctccccagaaaaaagagtggcatccttgagtgtgaacagcttttttcccaagatcacaggtcaagaagttctactatcatgagactcttacctttgaatattttaaccgttgtttatgcctctatgagcaaacagaaatgaaaagtgggtctataaatggtgcacttaataggggtataactttcatttgtgaagggattttgcgggaagccaggcttatacataaaattaacttattactttaattagatataaagatgagggcccaggtgggtagaaacttagtggctcatatgttgattcaataataggcaaattctttaaccaattagggttaaggaagactggcagggcgtaacttaaagagaaatggaggccctcagggcaacaacagggaataaaagtccctaagggggacaaa

SEQ ID NO: 646578 - DNA, 669 bp, Homo sapiens
  misc_feature (33)..(33): n is a, c, g, or t
  misc_feature (35)..(35): n is a, c, g, or t
  misc_feature (70)..(70): n is a, c, g, or t
  misc_feature (76)..(76): n is a, c, g, or t
  misc_feature (78)..(80): n is a, c, g, or t
  misc_feature (91)..(91): n is a, c, g, or t
  misc_feature (102)..(102): n is a, c, g, or t
  misc_feature (135)..(135): n is a, c, g, or t
  misc_feature (138)..(138): n is a, c, g, or t
  misc_feature (145)..(145): n is a, c, g, or t
  misc_feature (158)..(158): n is a, c, g, or t
  misc_feature (162)..(162): n is a, c, g, or t
  misc_feature (169)..(169): n is a, c, g, or t
  misc_feature (191)..(191): n is a, c, g, or t
  misc_feature (194)..(194): n is a, c, g, or t
  misc_feature (197)..(198): n is a, c, g, or t
  misc_feature (200)..(200): n is a, c, g, or t
  misc_feature (203)..(203): n is a, c, g, or t
  misc_feature (205)..(205): n is a, c, g, or t
  misc_feature (207)..(208): n is a, c, g, or t
  misc_feature (211)..(211): n is a, c, g, or t
  misc_feature (213)..(213): n is a, c, g, or t
  misc_feature (215)..(215): n is a, c, g, or t
  misc_feature (234)..(234): n is a, c, g, or t
  misc_feature (236)..(236): n is a, c, g, or t
  misc_feature (247)..(247): n is a, c, g, or t
  misc_feature (257)..(257): n is a, c, g, or t
  misc_feature (259)..(259): n is a, c, g, or t
  misc_feature (261)..(263): n is a, c, g, or t
  misc_feature (272)..(272): n is a, c, g, or t
  misc_feature (274)..(274): n is a, c, g, or t
  misc_feature (281)..(281): n is a, c, g, or t
  misc_feature (285)..(285): n is a, c, g, or t
  misc_feature (289)..(289): n is a, c, g, or t
  misc_feature (297)..(297): n is a, c, g, or t
  misc_feature (305)..(305): n is a, c, g, or t
  misc_feature (308)..(309): n is a, c, g, or t
  misc_feature (311)..(312): n is a, c, g, or t
  misc_feature (317)..(317): n is a, c, g, or t
  misc_feature (323)..(323): n is a, c, g, or t
  misc_feature (327)..(328): n is a, c, g, or t
  misc_feature (330)..(330): n is a, c, g, or t
  misc_feature (342)..(342): n is a, c, g, or t
  misc_feature (344)..(344): n is a, c, g, or t
  misc_feature (349)..(349): n is a, c, g, or t
  misc_feature (353)..(353): n is a, c, g, or t
  misc_feature (361)..(361): n is a, c, g, or t
  misc_feature (365)..(365): n is a, c, g, or t
  misc_feature (367)..(367): n is a, c, g, or t
  misc_feature (369)..(369): n is a, c, g, or t
  misc_feature (375)..(375): n is a, c, g, or t
  misc_feature (379)..(380): n is a, c, g, or t
  misc_feature (383)..(383): n is a, c, g, or t
  misc_feature (386)..(386): n is a, c, g, or t
  misc_feature (388)..(388): n is a, c, g, or t
  misc_feature (392)..(392): n is a, c, g, or t
  misc_feature (432)..(433): n is a, c, g, or t
  misc_feature (462)..(466): n is a, c, g, or t
  misc_feature (475)..(475): n is a, c, g, or t
  misc_feature (482)..(482): n is a, c, g, or t
  misc_feature (485)..(485): n is a, c, g, or t
  misc_feature (488)..(488): n is a, c, g, or t
  misc_feature (494)..(494): n is a, c, g, or t
  misc_feature (497)..(498): n is a, c, g, or t
  misc_feature (502)..(502): n is a, c, g, or t
  misc_feature (506)..(506): n is a, c, g, or t
  misc_feature (517)..(518): n is a, c, g, or t
  misc_feature (523)..(523): n is a, c, g, or t
  misc_feature (538)..(538): n is a, c, g, or t
  misc_feature (547)..(547): n is a, c, g, or t
  misc_feature (558)..(559): n is a, c, g, or t
  misc_feature (576)..(576): n is a, c, g, or t
  misc_feature (585)..(585): n is a, c, g, or t
  misc_feature (600)..(600): n is a, c, g, or t
  misc_feature (615)..(615): n is a, c, g, or t
  misc_feature (617)..(617): n is a, c, g, or t
  misc_feature (620)..(620): n is a, c, g, or t
  misc_feature (622)..(622): n is a, c, g, or t
  misc_feature (630)..(631): n is a, c, g, or t
  misc_feature (635)..(635): n is a, c, g, or t
  misc_feature (637)..(637): n is a, c, g, or t
  misc_feature (656)..(656): n is a, c, g, or t
  misc_feature (660)..(660): n is a, c, g, or t
  misc_feature (667)..(668): n is a, c, g, or t
ccgcgttcgcagcatggccgccctggggcgcgngngctcggggccgcgcgctgcggtgcccgcttggaancgtganannntggagcggaancgagccaagcnagccgcgctgggcgggggcgcggggcccggggnggnggacaanagcagcgggtgcnggcngaaagcntgggcccgctgcgcgaaaaaangtncanncngcngnannccnancngcggcgcggcgggggcacngngggggcacggntgcagaaacngnannnccgcgtgcntngcgtgcncgcnctcngcgccganagcgtccncannannaaaanagtgcncggnntnacgcccacacancncgcancggnggaaacanaaananangcaacnaaannacnaananacanaacacaactaaaaaaaataaaagcctactggagaggttcnncccgcccgccgcgccgcgccgccgcgggnnnnncgagccccnccccacngcnccncccccncgnnaaangggngaggaaggaanngggcnggaaaaaaaaaaaanaaggaaagnaaaaaaaaagnnaggaagaaaaaaagagnaaaaaaggngaagaagagaaaaanaagaaaagagaaaananganangcagaganngaanangaggggaaagagagagaanaaanggggaanng

SEQ ID NO: 646579 - DNA, 110 bp, Homo sapiens
  misc_feature (17)..(17): n is a, c, g, or t
  misc_feature (21)..(21): n is a, c, g, or t
  misc_feature (30)..(30): n is a, c, g, or t
ttataacctcttctagnttcnttggagtcnagttttctcaattgtaagcaaagactagccttgataagtgatggggtccattcctagcctaacatttaacaggctctgat

SEQ ID NO: 646580 - DNA, 884 bp, Homo sapiens
caagggccatggatgactccagcgtacggagcatcacgaaggtggagcgtgctgcggaaggcgtgcaggccaccgaggactacgaccgaccgggcatccgcggggaggccgttatgatcgacaccatgctggtgctagaaggctgcaggcccatcgaggacctggtgatgcgagtgtccgacatcttcatgtgacacctcctacgctatcgccactgcacttgcagctctcgactcaggcaggtctctgagcaaggacgagactgtgtctatgttcttgcgggcgccggtggtcggccgtaggctacggatgatatgcatataacaccacgatgggaggggcgccagcatttcgaagctttcttccgctggtccgagtccgtagcgaagcgagcgtggcaacgaatagaaaccaatagcgcccagtcacgcacgttgtgacggccactatagccgtagggtatgagagggaccggctccacgtgggacgtttgcctgttgcccacttggcttggcaagcaaagcttgacaccctgtgggctccataggtcctcgaagcaccacctatagttgaactcaagagcgtctggctcaaattttgcgaactaggaacgcaagaggctcaatcgccatgtgcgattgggggccgcaacggctaggccaagggccatcaaagccatccctattgagtttgctccctgactaacccttattgagtatcacccgtacattgcctcgtagggttcccccgctaaaaagtcgtaaacttgcaagcccacggggagaccggcagtacacttccaagggagggtcaatgagaggggcgcccaacggcgaaatttgccataactgtagggaatcattgcgcaagacttggaccaagag

SEQ ID NO: 646581 - DNA, 735 bp, Homo sapiens
  misc_feature (53)..(53): n is a, c, g, or t
  misc_feature (68)..(69): n is a, c, g, or t
  misc_feature (72)..(72): n is a, c, g, or t
  misc_feature (81)..(81): n is a, c, g, or t
  misc_feature (104)..(104): n is a, c, g, or t
  misc_feature (133)..(133): n is a, c, g, or t
  misc_feature (163)..(163): n is a, c, g, or t
  misc_feature (236)..(236): n is a, c, g, or t
  misc_feature (249)..(249): n is a, c, g, or t
  misc_feature (270)..(270): n is a, c, g, or t
  misc_feature (273)..(273): n is a, c, g, or t
  misc_feature (299)..(299): n is a, c, g, or t
  misc_feature (316)..(316): n is a, c, g, or t
  misc_feature (319)..(319): n is a, c, g, or t
  misc_feature (324)..(324): n is a, c, g, or t
  misc_feature (331)..(331): n is a, c, g, or t
  misc_feature (344)..(344): n is a, c, g, or t
  misc_feature (349)..(349): n is a, c, g, or t
  misc_feature (351)..(351): n is a, c, g, or t
  misc_feature (381)..(381): n is a, c, g, or t
  misc_feature (393)..(393): n is a, c, g, or t
  misc_feature (395)..(395): n is a, c, g, or t
  misc_feature (399)..(399): n is a, c, g, or t
  misc_feature (443)..(443): n is a, c, g, or t
  misc_feature (454)..(454): n is a, c, g, or t
  misc_feature (456)..(456): n is a, c, g, or t
  misc_feature (463)..(463): n is a, c, g, or t
  misc_feature (490)..(490): n is a, c, g, or t
  misc_feature (507)..(507): n is a, c, g, or t
  misc_feature (525)..(526): n is a, c, g, or t
  misc_feature (545)..(545): n is a, c, g, or t
  misc_feature (549)..(549): n is a, c, g, or t
  misc_feature (552)..(553): n is a, c, g, or t
  misc_feature (555)..(556): n is a, c, g, or t
  misc_feature (562)..(562): n is a, c, g, or t
  misc_feature (564)..(564): n is a, c, g, or t
  misc_feature (581)..(581): n is a, c, g, or t
  misc_feature (656)..(656): n is a, c, g, or t
  misc_feature (724)..(724): n is a, c, g, or t
tcccacctgtgcataacctttggtccatctgtgctatctctcatatctgcaanaaaaacctaaaaaannaanatttgaatnttaagtatttacatctttttgtnttggtttttaaatgcacaagtacccctgnatggctcaaagggatgggataatgctagcnacactaacttgcaataaagtgcagttttcatgcaaacttagccatcagttttcttcttttagataggtatccnccgtccatatggnctttttttctgatctattttnggnggtcttgggggtgcctcttctgtggnggcttttgctgattttngtnttggntttgctncagaattttttgngctanangctttgcttctttgctgggtatagtttttnattgggatttcntnttcnatcttctgttaccttttccgacagctagtcaggttaagtataangtgtaattttnanacacatncccttggtttctatatcctatattaanaaatagcctaattgtgnacaaaattttgctgtagnnaaaaaaataaaattgggtnttanagnntnngtgaangnaattttgggtttgtaanattaaaaaaaatgatttaatattaggattaagaaaatattaaaataattattttaattaaatgatggaaaatttnaaataattttttaataagttttataaggttgaataaagttaaattttgaaatgtaaagaaaaataagnaaataagtttt

SEQ ID NO: 646582 - DNA, 335 bp, Homo sapiens
gtcgactacaatacaccacaacaaataccatacactaccgtccatttaccacaacaaatacaatacaccaccatacatttaccacaacaaatacaatactccaccatacatttaccacaacaaatacaatacaccacaacaaatacatgggatcagtatgttcccatagcaatacaaacacatgggatcagtatgttcctaatgcaatacaaacacatgagatcagtatgttcccatagcaatacaaacacatgggatcagtatgttcccatagcaatacaaacacatgggatcagtatgttcccatagcaatacaatcacatggtagcagtctg

SEQ ID NO: 646583 - DNA, 389 bp, Homo sapiens
aattaaccttactgcttctctctccattatcttgaatcaagaatatactttttaaaacgaccacctctctttctttaagcaagtatctaaaatagcaatggcaatagaaagcctcagtgaggccttctctgactacactattgaaagtagatttccatctcccagtcattcagtatcccaaagccctcctttatttcctttttttggagacacagtctcactctgttgcccaggttggagtgcagtgggatgatcacagttcactgggctgaagcaatcctcttgcctcagccccctgagtagctgggactataggtgtgtgccactaagcctggctaattttttttttttttttaaacgaggtactgctaagttgcccgccaatcgaa

SEQ ID NO: 646584 - DNA, 274 bp, Homo sapiens
cggggggctgggggactcctcccaagatcccattttagcatctttttttcctcccccctttaaaaaaataagtaacaggtgaaatgtggtttcagtgttaacgggataattttgctcccggctcccccctgatgattttgaaatacactactgaacgagctttggctggtcctttctatcctggatggggtttttttgggtagcaattccttgatgtccagtttggaaaaatggacttttttcaacaaaaaaaacttaaatccgtggggcccca

SEQ ID NO: 646585 - DNA, 554 bp, Homo sapiens
  misc_feature (247)..(247): n is a, c, g, or t
  misc_feature (514)..(515): n is a, c, g, or t
aattcggcacgagggtgttggctgatgctccctcttgccggctcctgctcttgaaacacacccaagtgcaatgttcaatcatctacttgtttccaaagttatttgggtcagcattttcctccacccaccacttaaaactgatttgtttcatacatttgaaatgtatgaaaagccagaaatccaggacccaccctggcctgctccctttttctcacctactgtgttaaggataagtcaattgagcttncttctctattgaaatcaccgtgctgatggagtctgtctgtggaaatgaaaggtggctaccataatctgttgggagttgaattaatcctctgggagtgaggctgacctaattactcagaaatactgggcttgctttcattctgtggaatacagccatgagaaagaggccagcatgccatttcctaatcttttcttgaattgcctgaaactcacctaacatgaaactgagaagccttttcatttgaaagtggtatttcttatgtttttnntctttttgcttgaaagtattcttaaactaaagaaaggag

SEQ ID NO: 646586 - DNA, 453 bp, Homo sapiens
  misc_feature (8)..(8): n is a, c, g, or t
gacttaangggcgggagggagcccatcccgcttgccccaacgaacgcgggcgcggggctttcctcgcaggttacataaggcagccgcgggtggaggcagcagaggcgagcgcacgtccgtcgagggggaaaggggcgtggggaggcggccggggcggccggtatcccccgggcgtgagtgcgccgccgctgcccgaggtggggcgcagcgcgcgggggagcgcagggcgcggcggagtcgggtttcagagcgcgggtgactcggggcgcgggccgggagccgggattctgcccgccgccgccgctgccgagcgccgcctttgttccctgcaggaagggcgagcgcggcggccagcgctcagcgacccttcgtcctccgctaagctccaacgctctgctcgactagccgcgcgccttccggggctccgcagacccgcgagatggcaccaaggag

SEQ ID NO: 646587 - DNA, 137 bp, Homo sapiens
gacttcccacacctgcacctgggctaatggctttacttggctggcagtctcatcggattgggtgcagcttctgggcccccaatgctggccccgcgactcgaagggtgactagggatggtgatctcgtatggacctgc

SEQ ID NO: 646588 - DNA, 374 bp, Homo sapiens
  misc_feature (67)..(67): n is a, c, g, or t
  misc_feature (334)..(335): n is a, c, g, or t
cccataactctctttttcatattcctttccctccaacacaatcacctgctttaaatcattgagcttncttctctattgaaatcaccgtgctgatggagtctgtctgtggaaatgaaaggtggctaccataatctgttgggagttgaattaatcctctgggagtgaggctgacctaattactcagaaatactgggcttgctttcattctgtggaatacagccatgagaaagaggccagcatgccatttcctaatcttttcttgaattgcctgaaactcacctaacatgaaactgagaagccttttcatttgaaagtggtatttcttatgtttttnntctttttgcttgaaagtattcttaaactaaagaaaggag

SEQ ID NO: 646589 - DNA, 735 bp, Homo sapiens
cgcggtggctcacgtctgtaatcccagcactttgggaggccgagggggggcggatcacttgaggtcaggggttcgagaccagcctgagtgacatggaaaaaccccgcgtctattaaaaatagaaaattcgccgggcatggtggcgcatgtctgtaatcccagctactcgcgggaggctgaggcaggagaatcgcttgaacccgggaggtggaggttgcggtgagcggagatcgtaccattgcattccagcccgggcaataagagtgaaactctgtctcaaaaaaaaaaaaccctgagttctctcaaaattggtaggtaaattatggttcacatgtggtcacggttggaaaattatttgggggggagtataacggtagaactacagagatctcctggctaatagctcctacggttatcggggaaacaaccccttgagggctgaaaacgtgatggattctggatggatagtggggatccatctatcggtatcggcagttatggcctgtgcggtgtataaaaagcttctttcaattcatttccccgaaatttttaatagtgctcaacggaacagtgcggggggaactggcagcaggtggggcacttgagctattgggacgcaacgcggtgattaactggattttgagtgagccacagatctggagtagcgccctcgtattagttagtaccaggggtggggggttcaatcttcttaacgaaagggttggtcccttggaa

SEQ ID NO: 646590 - DNA, 309 bp, Homo sapiens
  misc_feature (80)..(80): n is a, c, g, or t
  misc_feature (143)..(143): n is a, c, g, or t
  misc_feature (299)..(299): n is a, c, g, or t
tgaaagaacatttttgaaattattactccttatttagaaatggataactatatcttaaagaacagaggtgggtgtatttntttttgcgcagtgttcagtatagtcagtaccatagaagaatggtaggatttttattataagantcattgtaactcaaaggtttgttttatgactttaaaataactttcttttgtttagtggcttggtgccccttcataatgcctgtccatatggacactatgaggtggctgagcttttagtaaggcatggggcttctgtcaatgtggcggacttatggnaatttacccc

SEQ ID NO: 646591 - DNA, 107 bp, Homo sapiens
tactcggtcagaatctcccaggtcaggccgtgggagattctgaccgagtaggtctggaataggagaagtaggaatttatttagggggctgttatgtctttctaatct

SEQ ID NO: 646592 - DNA, 190 bp, Homo sapiens
ctctctcctgagagtgcttacgtctatgcagtatactattgagtgggcttgcgctgtctgagacatgttcagcctcgtcatggtatggattgtcggatcatgaacaattacatagatgatgagtgtgagatgatatcggaagacctgtatgcagaaatgtttgtttggaggacactattagcctgtattc

SEQ ID NO: 646593 - DNA, 860 bp, Homo sapiens
tgtatattgtcctggtttggtggattctacttcgctatccccaagtattcagaaagcttctccaagtacttctttcaattggaaaagagctgatatagagcatgcatcaaccctgatgaggctgttgcttatggtgcaggtgtccaggcagccatcttgtctggagacaacgtctgacgagaatgttcagaggatttgcatgctcttgggatgtcgactccatctattccctatggatatgtgaaacgttgcaatggatggcagatcagtagacgtagttcacttcgattcaaatgtcagtaactaccaatcgcaatttcgcgtacccaagcaggacaactagacgcttcatcaatacgcctattcgtgtacgaaccagcactggtgtgtcttattcatggttgatgataggcgcagcgtgcccatgacgaaaggataacgaacctgaacgtgggacaggctattgacagctgcaacaggggtcactagcgctactccttgacaaacaccacgcgcaagggatggtctccgctacaagaagtatggaaagtttcagctttaatatgatcactctgcagtgaccaactgggttatagcttccaaattggttcctctgccctggtgcgagcgagagtgagcggggaaacacgatgacacatctgattgactatcactaatagatcgcatggtgccggttagacgccaaggacatacatagatacgtatgggtccccgcgaagctagacgtaagtacgaagtggttgaagatcgatgaagcatagggaccaggtgtccatccgatgaatactacttgagtcctattgccttcgacatgatgggcacctgttgacgatgagaag

SEQ ID NO: 646594 - DNA, 159 bp, Homo sapiens
  misc_feature (13)..(13): n is a, c, g, or t
accacaacattgnctcgaccttctctgattgaggtgagcgtccctcatctcatggactcgagcgcgcagtgctccggcgagggatgctccctggtcatcgagtcgcaatacctcaacgagttcggcaagttctggcagatcaagttcatctgacaactc

SEQ ID NO: 646595 - DNA, 1046 bp, Homo sapiens
gcggaccaggaggggtggcagtatgccagcgacttccctgcctcataccatgggtccaaaacgatgaaggatttgtgaggaggaggtgctgggccagaaaatgcaagctggtgaccagtgggccctggctggaggtgccccccatcgccctcagggacgtgtcatcatcccggagagcccgggtgccgaggggagtgggcacagcatcgccctctgggccgtcagcgacaagggggatgtgcatgtgccagacttgggcagtgtcggagcatcaaacctgcgggactcctcctggactgcacgttggcaccgaaccaagccactatcgaccatccaatctccatcggggacctgcctaccaggatgtgggccgatggcaaggagaccggctccggacattctacacggggatccgtgtaccccgtcggcagaacagaccggtgactgcatggtaccacataccgtaacccaccgagacagaggctgaagcaggtgtccgcggggacagacagacaggagtaatgccctggatgagaatggaaacctgagactatcgccaagggatacacgccacagctaacacgcagggactccagccgggagcacagagtccaacaaaagtgtgccgaggaggtccgggggcccctggaccaacgcctggcgtgaaaccgcaacaaacgagcaggggaaggcaaaaagccctagggcccggaggggcacaagcggtgacaagcgcaaaccgagagatagcagcaccaagaaacacaacacgggcacaagaaaggagaaaacgcggacatcacgagggcacggctggcgacactaacaataaggacagggcccaaagcgaaccaatggacaccaagagaacctaagacagccacgagcaaggaaccagaggtgcaccaacacgagcaggaccatgaccccaggaaatgcagagacaacaccgcgcaagacaactaacacaacgaaagaagccacgacgaaggaaccaagcgaaacaacacaggtgctagaggaagacaagagagaccaaacgaaaa

SEQ ID NO: 646596 - DNA, 145 bp, Homo sapiens
ctcgagtgatctagaggtccccagctccgagtagctgggactacaggcaccgcacacgccagctaatttttgtattttttagtagagattgagaccatcctggctaacatggtgagtgtgactgtggttgtccattcctaaaaca

SEQ ID NO: 646597 - DNA, 449 bp, Homo sapiens
gatcaagggtgttccctgggcttccgttacaaaaaagggtctgtgtatgctccctccccacccaacgttgttatccaggagaatgggtcttttgttgaaatcccaaattttttgggggaaaaaaacaccccagggttcggataaaaccaggggttgcttgttcagttttccaagccccaaaaaatgaattaatccttgaaggaaaagcccttgagcttgtttcaaattcagcggctttgattcagcaagccccccccgttaaaaacaaggatatcaggaaaatttttggaggggatttatgtttttgaaaaaggaactgttcccccgggtgatgaataagatttaaaagttccctgggtccaaaaaaaaaatgcccgatgccccttaagccccccttgtgatttttaaatgatgcaataaaagcccttttgttttggccctttttttta

SEQ ID NO: 646598 - DNA, 189 bp, Homo sapiens
tattatctgattagggttagaatgtgacagaaagctctcatccatcattttgccaaggcttctttccttcattaaattctctgttgttttcctaaaagtcttctacattgaatgttttcattacgtttttttctcgcattatttcctacgcacacgactgaggcaaacacattttacgtgaaaaccctc

SEQ ID NO: 646599 - DNA, 1017 bp, Homo sapiens
gaaagccgactgttgcctggtcagcagataagtcctttcaagttctctatgactgtactcttcctaaggaagtcctgggaaaaggaagcgtcctcactatgtgggtctaccttgcggcgggcccttctggtgggccatgtagcatagcctttcttgcaatcgtgtgatcaccgggaaaaggcaaggtgagtgaagcctacgcctccaaaaacgaagtatatatcatgaatcgacggggcatcgtagactcagagagccttctgggaacctagatctgaggccaagacatgtatgtgatagctagtggaaaggcatttgaatggaggttgcctgggacatagtggttgtcgtagactgggagcaaaggggaggccaggacgtcagacgtggaagaggtgccacgaattgttcattgaacaaagagctgtggaagtacgggatgattcccatgagaagtggttacgcaaaaattggagatgccaaaagtgtgcaagaatactacaatgtggggtgagagggagctagtgtagagagtgacaatccaggatatcgtggggggacgtggttgaactcacctgataatgcaattctttacgatggaaattagcctgtaatgttggaaaatgcgtctgtaaacacactgtaagggtgacgtgcatatgaagattaatgtgcttcaacaggctgtaaggccacttcagtaggatgtggtaacttaccatgagcctgaaccttatgaagtactgttggcttactcttctgtgtggtgaatgggtagatggcatcggggggaatgcacatttgtagaaggtgtcttcacaggcaatgtgccttggtggaacgatgttttgggaactactttttgttaagagaagttgcttcaacttggtggtcgtcctcgaaagttatagagatgagtggcgagaggcctttttggcagaattatactctggaatgcggtgaggaaatcaagcgattgtaggggggtgaaaaatccaggattaggtgggaaagctg

SEQ ID NO: 646600 - DNA, 860 bp, Homo sapiens
  misc_feature (338)..(338): n is a, c, g, or t
tgggaatataaagcaccgccaggccctttgattttaaacctgtggctcgtattgttctggcaaccagttttgttagattttaactgttgaggttaagggtctaagcttagtggggttatctaatccccagtttggggttcttaagctatattggttgttgttccagtattattggttaaacccatctttccgtcagtcttattttggttgtacaactggaaggttttttaacaatctcagtgtgatgtttaagtcttatatgggggaggggtgtagatctaaaacactactttacccccgggcttctcttattgtgactatgttgggttttaacctcnggtgttgcacccgcggtgtggccatgcgcacgaaaattgtgcacccacaccctgtgggtgttatagtatattacgcttatagttataacacttcttcggttatatgtgctataaaagggtataaactccaccgtgctgtgttttccccagtgtgcggcggtgtgtgtgggctataggcgctataaaccgtatttgtagacgcgtgcaattatgctttgcgtgtgcttgtagaatgtgctgttggctcccctttttgagaactcggtggcgtgattcttacaaggggggtgaccttccccgtggaaaacgcggggcgagtgctctgcgctttgtttgataattctttaactaaagaaagctactatagcaacggcgtctggaagttcctgttgtgtttatttgtgaaccagtggttcgtctgtcggtcttttcctggggcccaatcatttaatggcttgctttaccaaagtcagaaaaaaagcccatgggacaaaggggaagcccctatattcattatccttt

SEQ ID NO: 646601 - DNA, 188 bp, Homo sapiens
  misc_feature (71)..(71): n is a, c, g, or t
  misc_feature (144)..(144): n is a, c, g, or t
  misc_feature (154)..(155): n is a, c, g, or t
attcttaacctgggtgggcgtcagcactttgcccagctcgtcgcgagcgcgccccggcgtaggtgacgatnagcgggtgctgcggctgctcgtccacttcttgcaggctcaagggcccggaccacttgctgaggtccaccggcnatgcgaggcnnaagcagagcgtgctagccggggggagcggtcgc

SEQ ID NO: 646602 - DNA, 308 bp, Homo sapiens
gaccagggattgacagggtagaatgggaaaactcacacagctaggggctagaaccatttggcatgtttttttgtttgtttgtttgtttgtttgtttgaagcagaagtcgaactctgctgcccaggcaggagtgcagtggcgtgattttggctcactgcaatctctgcctcccaggttcaagcgattctccctgctcgggaggctgaggcgggagaatcgcttgaacctgggaagtggagtttgcagtgagacgagatcacaccattgcgctccagcctgggtaacagagcaagactccatctcaaaaa

SEQ ID NO: 646603 - DNA, 223 bp, Homo sapiens
ggtatgaagggaaggacatacgtagccaggttatggagtgacgttggtcaggtccagacaagcaggaatgctgaagaaggggatgctgagtagaaccatagtgcgggcagtcctaccgagatgatgtaggcggaggcagatgccgtcggctagttgcatcacgtgcgggtgttgggggtttacttcggcggtcttctacacctttagaggcctgcagcgagat

SEQ ID NO: 646604 - DNA, 624 bp, Homo sapiens
ggaggcgccgagtcaagatggcggcgcgagtgctgcgcgcccgcggagacggcctgggccggcggcctcctgcagcgggcggcccctgaagcctcatgcccaggctccaggacatgttgacatcttccgagcgaactagatctcgagaatgacacgctggataaaatcctaattagtccgggaaatgttgatccaagaaaagatgcccacgtccaatctcctatggccaagagaagggagaacaaagcaaatctatacaaattcacaggttatcacacctgttaaaccgagaatgcctatgagagcatacaactagaatccgtcaagaggtgttgccatagattcccgacgataaacacgtagccttgtacctatggtggggacttggaaccacgtggtatgcgcgagcaggaccaagctgtccatctctggaggtatgaacggaggctatccgagccctcacagaaggtcactgacttagaactcacgagacaaatacacggagatctttggacattccgtaaggcatgaagtgtacatgctcctctccaggaagaatcggctacctgttggagcttcagttctggactgagcctgtgcccagatccggaccgtagtctctat

SEQ ID NO: 646605 - DNA, 114 bp, Homo sapiens
ggatttgctggtgcagtacaactaggcttaatagggacatgtccctattaagcctcgaatttaagcttctaacgttagaagcttgaattcgagcagtagtagtagtaggcggcc

SEQ ID NO: 646606 - DNA, 141 bp, Homo sapiens
  misc_feature (33)..(33): n is a, c, g, or t
cggtatctaagatccgcagtgtgtggtagtttntcatggcttatgacctcctctctcagctagtcagctttagatgcagccagaaggacccagaagccttagaagtccaggctccatccatgcaccgtgatccctgcagga

SEQ ID NO: 646607 - DNA, 128 bp, Homo sapiens
ctgctttgacactagtggttgctacccactggacaccccctctactggcctgaagccgtgaactattcaaccagtaaataaaatactggggaaaaaaatacataagtaaaaagtacacaccacaaggg

SEQ ID NO: 646608 - DNA, 785 bp, Homo sapiens
tggtgtctttaacattttttgacggggtttcccacagggtccgcagtcaaaaaatcgctgaaccgcgtttcctcgagagacggttgtgtggcttgggcgccttgctgctgccccagtcccagagcttctcctgtaggggtgtcggctacaggaacctttatcccagctccaaactggacgccatcactattatcctgtcacctgttcttgtactccccatggggacgcagtaattaatgttcccaaccgagcgattgttgccaagcctgaggacaatcccggccccgtacgaccagcggatgcactcagccagtcttacgatattatgagtctttggggccctccccatatgttgagtgttgcaagaggttccctgctgttgaaaaagaagttgttgtccggaaaagttctccaaagccaccctggcctggccggaaaggtaatgggggttgtcacagaggtcgcagtgccgccggccctagtacgtctttctccactctaggtagttctccttcgctctctggggcccgatgctgtgctatgctgaatccggggacggcttgtggggtcccccggaggtaaaacctatcagcaatgtcttgaacggtcttatcaccaatgggtcaccaactattccgccccagaaaagacgtctgaaaaactctgattcaaatttgagttgcttgttcactctgaatgttcaaaatcttcttggatagaagtctcattccccgccagtgtagccttgccagttccgggtaaactttcagcaaagcacctttctg

SEQ ID NO: 646609 - DNA, 367 bp, Homo sapiens
  misc_feature (9)..(9): n is a, c, g, or t
cagtcaaanatgaaacaagaaatatgctaataaaaccgggtgcggtggctcacgcctgtaatcccagcactttgggacaccgaggcaggcggatcacgaggtcaagagattgaaaccatcctggccaacacggtgaaaccccgtctctactaaaaaatagaaaaaattagccaggcgtggtggcgtgtacctataatcccagctacttgggaggctggggcagaatggcttgaacctgggaggttgaggttgcagtgagccgagattgcgccattgcactccagtttgggcaacaagagcgaaactctgtctcaaaaaaaataaaaattggtatttggcttcaaaattagaacaagtgatcttccca

SEQ ID NO: 646610 - DNA, 257 bp, Homo sapiens
tcctttatcaagcagatcgaccgtgggctacgtggacacacgctgtacgtgcggtcgacaggacgccagaatacagagaaaggagcctgagggagaccatggatagagcaggaggggccggagtattgggaccgggagacacagatctccaagaccaacacacagacttaccgagagagcctgcggaaccatgcgcggatactacaaccagagcagaggccgggatctcacacttggcaagatggatgtatggctgc

SEQ ID NO: 646611 - DNA, 132 bp, Homo sapiens
gatggtttcttgtgaagagctactggcagttggtggcttagatggaggaagagtcactctttttggacactggacacgagcaatggaaggttgtctgtgcccccagtggatggtcctgcacccatgtgaata

SEQ ID NO: 646612 - DNA, 814 bp, Homo sapiens
  misc_feature (706)..(706): n is a, c, g, or t
  misc_feature (732)..(732): n is a, c, g, or t
acagcgctaaaaaggcctggaggttcggactgggtggagctcaacacagtgtggcaaagtggctgcagccagactgcctctctagattcctcttcactgggaagggcatctctgaaagaaaggcaccagccccagtcaaggggttatagataaaactcccatctcactggaccagcgtatctgggggaaggggcggctgtgggcacaacttcagcggactttaaacgttcctgcctgctgactctgaagagagcagcagatcctgacaaggagggctctcccagcacagcgcttgagctctgctaagggacagactgcctcctcaactgggtccctgacctccatacctcctgatggggagagacctcccaacagcgattgtcagacacctcatgcaggagagctctggctggcatcagcctggtgcccctctgggacaaagcttccagaagaaggagcaacagcaatctttgctgttctgcagcctacactagtaatacccaggcacataaggtctggaatggacctccagcaaactgcagcagacctgcagaagacgggcatgactgttagaagaaaaagtaacaaacagaaagcagtaacatcatcaacataaggaacccccatacagaaacaccatccaaagatcaaaggtaggtaaatccataaagatgaggacaaaccagcacaaaaacgctgaaaattncaaaaaccagaatgcctcttctcctncaaatgattgcaacttctctctacaagggcacaaaactagacagagaatgagtttgatgatttgacagacgtaggctttaaa

SEQ ID NO: 646613 - DNA, 571 bp, Homo sapiens
  misc_feature (162)..(162): n is a, c, g, or t
  misc_feature (169)..(169): n is a, c, g, or t
  misc_feature (228)..(228): n is a, c, g, or t
catcacattgtcactccccagctcaggtcacgtcaagggtttccggttaccttcccagtgaagcctgggactcctcaattttggatgtctaagacccgcctcaattgagatccatccgtgtggaggacacatgttttggggaaatgggatctaatttttttnttctgtntgggtacattcccctttctttcctctctcaatcaaggatcaggaacagggtcctttatntggcattggatctaggcagagacggggtatggacctggcaaaggcagcagaactaagccttacaaatggatcctggactaaagcctaaagcacagatggggaaatgggttctcatggtgtcagagcacagtaaccgtgctaccagaaactaccagagttccacctagaactagaacagagaccgtgcagacaagcgaggacggcagaagacgatggggtgtctggagttcacacagcagagctgctggggacagggacacagaccccaacaagggaagggtggttggcgctggagctgggcaggcagcagcctcacaaagcttcccacacagcacagagccca

SEQ ID NO: 646614 - DNA, 208 bp, Homo sapiens
tacttttcagggaggagattagaagtagatagaaagccgatctggtattactcgcggtctgaactcgagatctactgtaggactgtaattcggttgaacgaaacgatgctttaataggcggttgcgccatcgggatgtcctgatccaagatcgaggtcgtaaagcctatggttgatatggactctagaataggattgcgctgtgatca

SEQ ID NO: 646615 - DNA, 570 bp, Homo sapiens
  misc_feature (232)..(232): n is a, c, g, or t
  misc_feature (530)..(530): n is a, c, g, or t
ctggcatctagagatccggctgctacgggatgcatcagctacaggcactgatatgactacacggggattgtgctggagacatgccatgctgccagatagaagaactcagcccattcaggtaaaactcgcaaaacctccggctcactcagttaagggaacacgacagacacagaaatgcctttgtcctttgtataatcagcaggctccgaggaaaaagtttcttcttttgtgngcatgaacacagtgggcttcagtaggttcaggttggcactttcttttgtggaaaaggaagagcccagcctctgtaaatcatcacttcagctcctgattggtcccaggccaagctgaatagcccttaggaataatcacttcaactcctgattggtcccgggccatgctgaatagcccttatgaatcatcacttcggttcctgattggtcccgggccaaggtcccagaccaagctgaatcacgctttctccaagacagcccgcaggctaagtgcattccttccccttcccagtccataanaagcccggaccccagactcgtactgagacacttatttgga

SEQ ID NO: 646616 - DNA, 523 bp, Homo sapiens
ttggaactatgaaaatcctagaagcaaactgggaaaactcttccggacataggcctaggcaaatactttatgaccaagttctcaaaagcaaaagcgacaaaactaaaaatagacaaataggatttaattaaactaaaaagcttctgcacaacaaaaggaacaatcaacagagtaaacagacagtctatagaatgggaaaaaaatatttgcatttgacaaagggctaatatccagaacctacaacgaactcaaacaactctacaagatacaaaaaaattaaaaagtgagcaaaggaatgaacatttaccaaaagacgtacaagcagccaacaaacacacacaaaaaaatgctcaaaatcactaatcatcagagaaatgcaaattaaacccacaatgagataccattttacaccagtcagaatgactattaaaaagtctaaaaacactgtaatacgggctatacaggtggctgagtagctgggatcacaggcgtgagccactgcgcccggccacgtgtgatatat

SEQ ID NO: 646617 - DNA, 1048 bp, Homo sapiens
actcccagtatgaagaggaccaccaccaatgaagtgggggtccgttctcctaagagatctgcaccttcaggcactagttcggcagcagcagtggaatgggaggaagagctcctctatcacgtggaagagatagtgatggaggtccacctcgaagggaaccgctccccctcgtcgtatagagtgtgagtatggtccccaaggagatgcatgggatattcgtactagaagacagctattcaagcagagagttacccgaggttctgcgtgatacaagagattatgcacgcagcaccacgagattatacttaccgtgagttatggtcacttccaggttcaccgtgaatgactagtccattcaatgaggctatggcgatagagatggactactgggtcggtgactcggtgcagctacttcaggattcagtccaacggtggaggcttgtccgtacagaagcattcagtgatgacgagttatggtgagagctacacgtaggtgctcacagcttacagcggagggacaccccgcacgatctgtatggttggaacatgacagtgctgctatggatgatatataggcgaggctcacgtgatcggatatggtggcacagtccgaagaacaagtgaacttcaaatgcgcggccgagagctgcatcgtctacctcaatgttgtgacatgggtttgggcagcacccagatacagaggggccttgcagccctttcttgtacgcaagaggggggggtacccacattacttttcaccggtgatctacctaacaagccaagtatacaaaagggcccggtgggaagcccaaccccgaaggacagggtcgggcttgggggccccacggggcagggaaaaaaggcccggacaatctggaccaaggaaggggcagcggaccggcaggaaaacggcagcatcaacgcaaggcaaacgcacgaagcccagtaagcgtcatgaggaccgcataattatcaccgcaggcttgcaacaccgcacaaatgacgacccaacaaacgagacgttgggagaccacgtatttctcactcg

SEQ ID NO: 646618 - DNA, 317 bp, Homo sapiens
ctctacgtcgagggtctccgcgttaagtccagagataaggacttcattttacaatggtcgtcgtactaggaactcctcttccgtcttctgtcgcaggcagtgaaccatgacagcagaggtggtggttttgcacccagcagtgatagcaatttgctcagccaagggcttgacatcacctttcttcaccagaacagaagtgagggccacgccactctcagaaatggcccggtggaagaggttcttggccaatggagacaaaacaagaacagagacactttctcctccctgctgactctccacaagatggtcacagatga

SEQ ID NO: 646619 - DNA, 99 bp, Homo sapiens
tacgccgctgggggggcctgtgtcctggtggcttgatgccacatggagggagtttcattaaatgctaactactttttgacaatttaaagaggaagaggg

SEQ ID NO: 646620 - DNA, 274 bp, Homo sapiens
  misc_feature (21)..(21): n is a, c, g, or t
ggtggccattctgcagtctgntggagctgctggactctccgtgccatctactgtcatcgtgggctctgcagggtctgccgttgtggccagtgtcatgaacatctgtgagagtttctacccttttctcatgggatcagaggtggcagacatggcgacagaggtggcagatatggcgatagaggtggcagacatttcaacagaagagcactgcccaacttgtctaacacagagaaggattaattacccccaggcgacaatctcctaacacatattg

SEQ ID NO: 646621 - DNA, 660 bp, Homo sapiens
aatgatgctgaagagacgcctgaaagctgatgaagacagtagcgagagataggaggccaaacagaaggagctcagtgagaaacagataagccaggcactgctggtgacaccaagccactaccagctgataatggtgtgtggtcctgaggaagagagcgtggacccgagatcaatactacaaagagtccgcagtcaagcaattcatcagctgaaggtcaatggggaagacccatacccacacaagttccatgtagacatctcactcacgtgacttcatccaaaaatatagtcacctgcagcctggggatcacctgactgacatcaccttaaaggtggcaggtaggatccatgccaaaagagcttctgggggaaagcgtcatcttctatgatcttcgaggagagggggtgaagttgcaagtcatggccaatttccagaagattataagagtcagatagaagacatttattcagtattaaatagacaaactgctgtcggggagacagtaatttggagttcagggtgaatcctgtgtaaaagcacagaagggtgagcttgagcatcagttccgtgatgcagatcacacttgctgtctcccgtgcttgcactatgtgaccgtcatcttcacttctgagactcaaagacataggaaacaaggtatc

SEQ ID NO: 646622 - DNA, 209 bp, Homo sapiens
gtcgactctttaacaacctgtatgtgtgttaggcagagcaccccatgctctttaacaactctgtatgtgtgttaggcagagcaccccatgctctttaacaacctgtatgtgtgttaggcagagcaccccatgctctttaacaacctgtatgtgtgttaggcagagcaccccatgctctttaacaacctgtatgtgtggtcgacgcggcc

SEQ ID NO: 646623 - DNA, 113 bp, Homo sapiens
atcaaggtaggcactctgtaatagatctatgggatagacatataggtggaaaagttactacagaaaagcttgtagatacatacataccccttgctataactagtagtaactat

SEQ ID NO: 646624 - DNA, 411 bp, Homo sapiens
aaagcttccctgaccccgcctcctgtagggcagccaagcgagcctgtggaggtaccatatgactgtaggcctctggggacagggagctgcatttgcttttcaaggccagggacacagccatttctgccagcatctgttgatcagtgagtgagtgagtgggcaggtaaaccaggagccagttaaaagcaggccctggatgggtggggatgccccatgtccccaggctgcagctgcaggcagccccccccattgttggaaaagcctttgccccagctcagccccctccttactccccttgtgccctggggaccctttgcaaaggggccctttgcagtttgtcccccccatcgctggacttttggacatggcctccagatttgccccttttaaataaaactgcagtggatgtca

SEQ ID NO: 646625 - DNA, 280 bp, Homo sapiens
agtggagagagaatgggagtggagagagaatgggagagcattagggcaaagtatctaatgcatgcaggttttaaaacctagatgacaggttgataggtgcagcaaaccacctatggcacatgtatacctacgttaacaagatctgtgcattctcgcacatcgtatcccagcaacctacaagtagaatacaaaataaaataaatatttatttagtgtatctcttccactagaaggtaagctccttaagaacagagattgagacctcgttctgctctccagt

SEQ ID NO: 646626 - DNA, 370 bp, Homo sapiens
  misc_feature (58)..(58): n is a, c, g, or t
  misc_feature (83)..(83): n is a, c, g, or t
  misc_feature (86)..(86): n is a, c, g, or t
  misc_feature (217)..(217): n is a, c, g, or t
  misc_feature (249)..(249): n is a, c, g, or t
  misc_feature (284)..(284): n is a, c, g, or t
  misc_feature (308)..(308): n is a, c, g, or t
  misc_feature (312)..(312): n is a, c, g, or t
  misc_feature (343)..(343): n is a, c, g, or t
ctgcactctagcctgggagacagccaggctccatctcaaaaaaaaaaaaacacaaaanttatccgggcgtgatggcacatgtntgngatcccaggtactagaaaggctaaggtaggattatcgcctgggcctgggaggcaatggttgcagtgagccgagagtgcagtgacacgatctcggttcactgtaacctccacctctggggttcaggcggttntcctgcctcggcctcccaagtggctgggactncagtcacatgccaccatgcccggctaatttttgtntttttggtggagacagggtttcancgtnttggccaggctgtgtttgaactcctgacttnaggtgatccacctgcctggggcttcca

SEQ ID NO: 646627 - DNA, 285 bp, Homo sapiens
caaccccttaaaaagttttagttgttcaaggcccatttaaaaccaatttttccctttgcccccaaccaggtggcccgggggggggacccccccctaatatttttttgtttttttgggtgcccccccccccccgggtttttggccttggcccaattccccatccttggggcccccccggttggcctgggctttttttggttcccccctggggccctttggggggggctccggttttttgggggggtttttcccttttaaggttataccccccggggggccttccca

SEQ ID NO: 646628 - DNA, 211 bp, Homo sapiens
ttcggttatcccatacgtattctctcttacatcagaattgtagtatacccaagagtgcaggggtggcaaatgttaataaaataagttagtacatgtgggaggttcttatatccttggtagggtaagctgatagtgtatagatttctgttcccattattccagtagtgttttaaattatttaagataaataattactgtaatgttagagata

SEQ ID NO: 646629 - DNA, 175 bp, Homo sapiens
ttggtcccccctttgggccccccgggttttccctttttggtttcgggttgttttttgggggggattgtgggggggaaaccattttcccccgggaaccgctttttcctttttttggatttttttcgccccccctttggggatttgggcccccgggcccaaaatttgggccggggga

SEQ ID NO: 646630 - DNA, 269 bp, Homo sapiens
tttttaattaatttatttttatgagacggggtctctgtctgtcacccaggctggagtgcagtggtgcaatcatggttcgctgctgcctcaacctccagggctcaagcagtcctcccacctcagcctcctgagtgcctgtaatcccaactacttgggaggctgcagcaggagaactgcttgaacccgggaggcggaggttgcagtgagccaaaattagcactgctgcactcctacctggaaaaaagagaaaggctcattctcaaaaataa

SEQ ID NO: 646631 - DNA, 637 bp, Homo sapiens
caccacccaacccctagcgaggcgcacaggataaccgatgtatatgtaatgtacctaagcacagtatctacttctcctatatccatcctgcaagcaactcaaaatataaaaaataaagtatacatggtagtaatatacaaatctttgcttgataagtattaagaaatatagggacttgctagccgtaatttaaacgctctagttgatttatgcttcccgttatggatataatggaggggagcgggagcactagtagatttatgcctggaaataatgaacagtctaagaaccattccgatgactgggaaacaccacaagaagttgcttgaaacgctatgaacaagccaggactgacgccatgatcctctgaatgcctattggtataccatatcctttgacgccaatcagctacgagtcccgtagagacaaatcaaaccaagtattataaccaaaagaacgacgcaactcccctagggggaatccttctaagaagtcggaccctgcatgcgcatagccacgctttgcgcaacttgggccggccgttataaccaactatacatagactgagggaaaaccgctgaagagggacccccccatgaccaggtccccccaccaccaccctgccgcaccagcaccg

SEQ ID NO: 646632 - DNA, 117 bp, Homo sapiens
  misc_feature (77)..(77): n is a, c, g, or t
  misc_feature (88)..(88): n is a, c, g, or t
gggagtacaagttgcaaggtctgcaacaaaggtcttccgttcttccattcgggaaagccatcttcctaaggcctgtnaggcagccccncagagccacaggtgttacaccccttcccc

SEQ ID NO: 646633 - DNA, 240 bp, Homo sapiens
  misc_feature (8)..(8): n is a, c, g, or t
  misc_feature (17)..(17): n is a, c, g, or t
  misc_feature (21)..(21): n is a, c, g, or t
  misc_feature (34)..(34): n is a, c, g, or t
  misc_feature (63)..(63): n is a, c, g, or t
  misc_feature (66)..(67): n is a, c, g, or t
  misc_feature (120)..(120): n is a, c, g, or t
  misc_feature (128)..(128): n is a, c, g, or t
  misc_feature (144)..(144): n is a, c, g, or t
  misc_feature (150)..(150): n is a, c, g, or t
  misc_feature (156)..(157): n is a, c, g, or t
gaaatatnaaagaagancatnttgagaaaatgcnaggaataaatagaaccatgttgtgcaaanaannggtttaacaggagattttgaggcatagggtgtgtttcatttcagaacattttnggaatgtntggaacatttcatttnctgttntgttanntgtgcctctgtaaatctacttttgcaattttaagtaataattttatgaataaaaatgggaaatgcttcctaattccacatagt

SEQ ID NO: 646634 - DNA, 150 bp, Homo sapiens
ccaggtcatcagccggtaccgaatctcgacagtggtgcaccacaccagcttatccccagcccgcgaacatgacaaactatgtgcatttgagtgccgcactatacaacgtgtgaatataaccgtgcttttaagcattgactttaatgtctg

SEQ ID NO: 646635 - DNA, 290 bp, Homo sapiens
gccaaacgtcatggataagtacatcgttggacagcatcacgagtccagataggtttcggggccgtccactccaagaagagtttgcgtgcagaggatcttgttctcattctcacaagtggctaaactcctgcacttgcgtccgtccacggtctcctcctcaaagccttctccgaccttgaagttgctcacagtagtgcgcgcgccaccccccttcttccaaatcatgtcagactcttacgcatacctaaacttgaatcactcctcctaacgtatgtactggttggccggta

SEQ ID NO: 646636 - DNA, 885 bp, Homo sapiens
caagatgcaccacggcacgctagcctgggtgacacagcaagactccatctcaaaaaaaaaaaaaaaattatcttcaaaaaggcatatagtctctggaatatatttgtatactattacattggtacaggaatctggtacttatggtcgggtggtgtaatataccaataagttttatataatatcctcataagctatcctaattttggagagaaacacaaaaagttatagatggatagtctggtataatattagacaaaatagtaagctttataaaaaagttatttcgggcaaatgggtaagggaattgggggtgggaatggtgctgaagattaaaatggtagcttggggtataacttcatggtgtttttcaaaatatactggaaggtccaacatggattggaaataaagaaaatggtattttctactggaaccattaacattggttatttaaaacagttttcggagtctataaacatttcctcaacattttttaaaaagtcttagttaaaggtactctgatatacagtagtgttctcaagtatagtcatgaatcttggtcaataataactagatgctcttaaaatgtgaggattcaggagacccacttctaaacagggattacctcttgaggtaagatggctgtgtgaactaaaattggttggttgccttttgggcggtgcaatatttagaccagtagggtttcgatattaagggggaagttaacaggcggtaaaggccaattttgacatttaggatatttggttgaaatggtgtaaaaaggggttatgagcgcaaaatgtatggtggtggaagacccatattttttgaggtatgtaacacgatgtttgaaaggatgataaaaaagcgggtggggtgagtgagaga

SEQ ID NO: 646637 - DNA, 245 bp, Homo sapiens
  misc_feature (24)..(24): n is a, c, g, or t
  misc_feature (168)..(168): n is a, c, g, or t
  misc_feature (204)..(204): n is a, c, g, or t
ggctattcttaggaacgccacaangaacccgatgcagcataagacaaaaatgcgcgcactcataaggtaaccggtcgcttaatttcgctatagcgcatacgaaacaaatcgccgtatcccactaattccccgcgaaaaaccagacatcggataagataagcgcaatanatatccggcaggtttccccaccgtttacatcgcgantctcttgagggtgtctaattggtgctacccaccactctatc

SEQ ID NO: 646638 - DNA, 1335 bp, Homo sapiens
gtgccgagagtcgtcggtggtttcctgcttcaacagtgcttggacgtgaacccggcgctcgttccccacccctggcctggcctgcccatagccagccctccgtcacctctatcaccgcacccatcggacatgccccaacggcccaccgaccgacgatccagcgaccgcgcagacaaccgccgcacgacgaacagcctctacctatagtcgccgaccatgacgacccgcgatccaccatcgcaggatgcgccagaacataaccaaacagggactacaagacggccgccatcaaacccgcacagatcaacactggaagctcaacggcctcctaactgattaaccctgtcccatgtcataacctaccatatggacccggcgaatgactggtggcatatgcgaaagaaaacttggcacaaaaatacataacttacacacacatcatcattgacggacgacgggaccacattgactgagaccaacatgacatgcacgccatgacacgaaaccccaacgcgacggctggggcccgcacatacaacccatatacagagaaataatcacaagacaacacaagacccgtgatgaatggcacccagggagacgacgcgagagccatgacaaccgccacacggagacagatgatagccataaacccactacaaggggaagaacacacccagtggtacgacacgaccaaggagcaaccataacctgaggcaacacaggccaaacgacgacggggacgcacacgacagccaacaacatgcaaccccacaaatacggtgataacaagcgccacatcgcgcagacccacaacaaacacctcgacgatgacgccacgagatgcgcaagcccatcaaaaaacaattgaagaccgcaccacgatacaacgcaaaatagcagcacggaaagggcagaccaccgcgacacataggacattcgcaggaaaatacactacatagaagcaaagacaaaagcagcgagaaaacacgcgccaacaataaaaagacgagacacagcagcccaacacttgcccaaatacccggacaggagaagaacaaggctaccccgggccaggcatgagagagagcgagaacaaactcacaagaccaagagagtaaccaaacaataccagaggcaagaagagacacacaagaaagaaacggaacaagacacacagacaaaaagagacagcacaaaggagagaaagaaagagggagagagcaaaagaaaagacagagacaagagacaacacaaaaagcgcagaaagaaagagagaagaaagcgaggagacgcggccctataacacacacaaacagacaccaagacacagaa

SEQ ID NO: 646639 - DNA, 319 bp, Homo sapiens
cattttcttccattacttaggaaagagtggcaaactccactaaaatttctctgtgttgtcacagtcttagaggttgcagtaactatattgtaagctttggtgtacgtctaacttagcaatagggatggtaggattcaaatgtgtgtcataaagaagtggaagctattaacaccaatgacataaatacatacaagacacagaactaaactgtcatgttattaacagttattaggttgtcatttaacactcaagttcctttatatttctgtcccatcaggcaaactgaaggatatggggaatcattggttatcttccattg

SEQ ID NO: 646640 - DNA, 103 bp, Homo sapiens
gcggccgcctactactactactgctcgaattcaagcttctaacgatgtacggggacatgttggagatctctacatcatctctattggagattacaatgattaa

SEQ ID NO: 646641 - DNA, 436 bp, Homo sapiens
caacgatggtcctacagctatgttattgctttgctttgtttcttttcttttctttgagatggagttccctcttgtgcccgagccagagtacagtggtgtgacctcggttcactgcaacctctgcctcccaggttcaagcgattcccctgcctcagcctcccgagtggctgggattacaggtacacaccaccacgcctggctaattttttgtatttttagtagaaacggggtttcaccatgttagccaggctggtctcgaactcctgacctcagatgatccgcctgcctcggcctcccaaagtgctgggattacaggcgtgagccacggcgcccagctttttttttcttttttttttctttggagatgggatcccacttggtggctcagggtggagggcaggggtgctatcatagctcacggtagtctccaactccg

SEQ ID NO: 646642 - DNA, 870 bp, Homo sapiens
  misc_feature (448)..(448): n is a, c, g, or t
gactctgggtccatcttcaagacattgggtctgtggatcaacccaaccgaccactcctcttccaagaatcatttggacaggttctttcggaggaattccttctcttttataacccgcggacccttttggaaaaacataagagatgggctcacgagtagtagagatgcacgtgcaaagtagaattactgtgtgcggctggctgtgacgggtggcacccagggtcgcagcaaacacggatatcatgtcacctggtaccgcatggtacgcacagttacgaaaaccacagaaggcaaatgaataaacaaatcgtgcacgttctactgtcacattcatacggatcagagtctctctcagagggatacaaggatgtgatgaacttgcaaccatgcggacggcatcttcctaccgtgttggcgactagtagacaagtgtaggacttggcctagangagtcgacttcttgaaaagcccaatggagtgcagtgtcgattcgttcctttcgacgactcggtgagggctagcgaactgcaccaacgcaatgggtagtatggtccaggacacgttcctgggagaaatcccggtagtaatgagagagcgtgattggcgctaagtaaaacactcgaggatctctcgagatactagtttcttctgccatatttgagatgctaggctcatgtccatacaatagagaggggacctaagggtcaccctggaatgatacgcacttatgtctgaggggctcatgcgccgttcgtaatcgaccaaccggacaggcgcaaaatgtgccacttgtcactgagtcttgttttgacactcgcggcgattgtttctaagctcaacttggggttgaacacggatgatccggcggaaa

SEQ ID NO: 646643 - DNA, 915 bp, Homo sapiens
  misc_feature (31)..(31): n is a, c, g, or t
  misc_feature (132)..(132): n is a, c, g, or t
  misc_feature (135)..(136): n is a, c, g, or t
  misc_feature (154)..(154): n is a, c, g, or t
  misc_feature (167)..(167): n is a, c, g, or t
  misc_feature (266)..(266): n is a, c, g, or t
  misc_feature (291)..(291): n is a, c, g, or t
  misc_feature (303)..(303): n is a, c, g, or t
  misc_feature (331)..(331): n is a, c, g, or t
  misc_feature (334)..(334): n is a, c, g, or t
  misc_feature (342)..(342): n is a, c, g, or t
  misc_feature (363)..(364): n is a, c, g, or t
  misc_feature (377)..(377): n is a, c, g, or t
  misc_feature (453)..(453): n is a, c, g, or t
  misc_feature (463)..(463): n is a, c, g, or t
  misc_feature (515)..(515): n is a, c, g, or t
  misc_feature (644)..(644): n is a, c, g, or t
  misc_feature (726)..(726): n is a, c, g, or t
  misc_feature (728)..(733): n is a, c, g, or t
  misc_feature (740)..(740): n is a, c, g, or t
  misc_feature (760)..(760): n is a, c, g, or t
  misc_feature (765)..(765): n is a, c, g, or t
  misc_feature (825)..(825): n is a, c, g, or t
  misc_feature (876)..(876): n is a, c, g, or t
aaacccggggcaggaagaaccaaacaagaangacaaaaaaaaagaaaaaaaacaatttcaaagacaaaaaaacaacaaaacaaacttcctttccaattaattataaaaaggagtagcaattaccatttaaanagnnacaaagaacaataaaacncttatttaactcnagaaagaaaaaaacacaatcaacacacaaaagaagaaacacacaagaggcgcaaaacaacactcagaagcattaaaatcaacacacatacaatggaacnaccttcaccaacccccccattaggncatcacaaagangagtcatccgacgtcctaaaagcaatanggnaatatganagtcagaaggctagcgaaaanncggccgaaacagnaataaatgaaaatggaatggaaaacaaagggcttaaagagaacagaaggcggggcacgggggcgcacgcctgtgancccagcacgnagggaggccgagaggggcggagcacgagggcaggaaatcgagaccatccggncgaacacggggaaaccccgcctctacgaaaaatacaaaaaaaattggccgggcgggggggcgggcgcctggaggcccagctactcgggaggctgaggcaggagaatggcgtggaccccggaggcgagtnagctgagatcccaccactgcactccagcctgggcgacagagcgagactccgtctcaaaaaaaagaaaaaaaaaagtacaaancnnnnnntcatttntcaagtatatattatgttanattanaaacctattattatcacagaaatgttaggcatgccagaattttcttcttcaagttgagtntcagtatcacagataaacataaccaaaactatatatatatatatatatatntatatatatatatatatatatatatatatatacacacac

SEQ ID NO: 646644 - DNA, 173 bp, Homo sapiens
actcttatggctttatgtgaatatatctttgcccattttggtttgagtggggatggtttatcttgtaatgagcatgtgtttaatgctggggaggagtgacagacagtggcccagaaacaaccaagtcatcttctgtattcacaggggcagaaagggcatgctttcagtgttta

SEQ ID NO: 646645 - DNA, 166 bp, Homo sapiens
cttactcttagcttgtgtttgagcgtggagttgatgagacaacagcagatgacaggaaggtcaagtccatagtgacactggatggagggaaacttgtccactgcagaaatgggacgggcaagagaccacactatgtgcgggacgctaattgataggaaaactcatc

SEQ ID NO: 646646 - DNA, 631 bp, Homo sapiens
aatgcgtggcctgtaacaatgtaataaaaagcctctttctttttaaaaaaaaaaaaaaaaaaaaaaaaaaaaaaaaaaaaaaaaaaaaaaaaaaaaaaaaaaaaaaaaaaaggaaagaagaaagaaaaaaaagaagataaaaaaagaaaaaaagataggaaaaaagagagaaaaaaaggtaagaaacaaacacagaccaaaacggaagggagacgcgctgcagagcggcacgcacctgtggcgggagagagggaacgacggcaacccaggcacgacgtcacgggtagcagacgagggagctacgggcggtaggagcggcggtagctaaaacagagaagcaggagaacaagcgacagtaaacgacccaacacgaggaagcaacaaacaacacaaccgcacaagcagacaagcagagaaaagagaacgacaaaccagcggcgccgagagacagcgataagcaacagcaaagcccaaagcgagcagcaaaggaacaagagtgcgaacgagcagcacaaatgaaacatgcaagatgcgcgcgcagaccagccaccaaggacgagcggcggagcgagaggggagaccaagaagcagacgagggccaggacgccggcagcgggaggacaagcggggg

SEQ ID NO: 646647 - DNA, 137 bp, Homo sapiens
cggaggcgttgaatggcctctttaacccagctcctgcctcccagccttctctccaggcccctccgggccattcaacgcctccgggccattcaccgcctccgggccattcaacgcctccgggccattcaacgcctccg

SEQ ID NO: 646648 - DNA, 201 bp, Homo sapiens
tttaaaaaccccccccccccccctccccccttccttggggtggggggtgtttttctttttttccccaggcccccccccccctgggggggggttttttttttttccccccccttggcccttcccgggggggggggggcccccccccccccccccggtgttttgtttggggggccaaaaaagtttttttttttttttgggcca

SEQ ID NO: 646649 - DNA, 767 bp, Homo sapiens
gccgggtgttaatcggacgaggctgtatacgggctagggaatgttagttgagaatctagaataaggaatatcattacagtttgtgaataattaacatagctctgaggcaattaggtctaagagagaatcatgctgggtaacaaagaaatgtgtgtgtaacattttattaagcagtctaaatctttcttggcatctttaggaattttcttatatgaaaatgttatgacaaaaaataaaaatgaggccaggtatgttggctcatgcctataatcccagcactttgggaggctgaagcaggtggatcacttgaggccagaagattgagaccagcctggccagcatgatgaaagcaggtctttactaagtaaacaaaaattagccaggcatggtggcacacactggtagtcccagctactcaggaggctgagacgtgagaatctcgaacctgggagatggaggttgcagtgagccaagattgtgccactgcactctcgcctgggtgacagcaagactctgtctcaaaaagcaaaaaaaaaaaaccaacaaaacaaaaacaacaacaaaaaagaaaaaacctccggagggacctctatatgccgcggggggcgcgcgaacaaaaggacgtcatcacaaaggggccccatgtggtccatcaactggttttcctcggaccccacttttcgtggtcacacagggggaaaatatcgccgggtcccccctaaaaggggagcccattaatttccgaaaccccgttaacccgcctaaac

SEQ ID NO: 646650 - DNA, 588 bp, Homo sapiens
aaatggcgacgatatgtgtattcactataaacatcggaggttgtcagacggccctatcctctccaaatgaaatcttcgggtccaccttcttactttattaaaagggaatcgtggggctggacggactttctaatgaacccaatggttttgatgatggttcttcctttattgatatttgtgcttctgcctaaagtggtcaacacaagtgatcctgacatgagacgggaaatggagcagtcaatgaatatgctgaattccaaccattagttgcctgatgtttctgagttcatgaccagactcttctcttcaaaatcatctggccaatctagcagccgcagccgtaaaacaggcaaaagtggggctggccaaaggaggtagtcaggccgtccagagctggcatttgcacaaacacggcaacactgggtggcatccaagtcttgggaaaccgtgtgacgccactactataaacttgagtcatcccgacgttgatctcttacaactgtgtatgttaactttttagcacattttttgtacttggtccccgagaaaaccagcttcatcttttgtctgtttaagtccattcctcga

SEQ ID NO: 646651 - DNA, 1078 bp, Homo sapiens
gcagaactccatgtgcacggagcgccctgggctggctcagctgtctcactacgtgtcggcaagtacaagaagacagataaaaacatgatgatcaacctgatggacattctggcatagtgaataccggagataagcagcattgtcctctgtggcacgcccttgagagcatccatgcgggcctaggtgactgggcctgcctgtactctccatgtgtgctggcactctcccacgccgatcgctctgaaacttgattacctcacactgctgggcttgatcatggcgacacacgggcatctgagatcatcatacaccagcaaactacaggcttcgtgtttccaatgagcatctgacagctgcattaccgagactgggtcctgagactagatagacaagcctatgatggcgaggcactccggcccgaaaactcatgactcgtgttactatggcacgtacccctggtcctagtaggcaacttgctgggttgacctggtggttcgctgacgatcacgaattatcgcctgagcaagaaaatacgctcaagcggcgttcgcagagcccagtgacggtggcctgcgcaggcgtatctgtgcgcaagttcaccctacgatgtcctacgtggaaggagaatcacttagtgcatgggctaggtctacttccctgaatgagagcctgtcattcatgacagggggtcatgaccgatgtacgcatagcccaaggagatgtcatgacatgagagatcactaggcaacggggtgctcacaaccggggcgaaataattgtagaaccactgaaagccggcatgattccgagagacacggacccacgcagagggcgatctactcctgggacaaggaagataatccatgggaagcgggatcggcacgtgagaggagaacacaagacactacagcactgacgctagttgaacctagtaaatccaatagagcgtcaccactagtatactgctgcgctgcgtgtgcccctatagtgtaaaaaaaagaagacaaaagaaaaaaacaaccaaaaagtgaacccgaacaagccaaaaaagaacaaaaagaaaaacagaaagaaaaat

SEQ ID NO: 646652 - DNA, 113 bp, Homo sapiens
tctaagcgatgttggggtacatgatctgtcaccaggtattgagcgtagtaaccaatagtttttcaacccttgccctcttcctccctctcccctctagtacaacctgccggtgg

SEQ ID NO: 646653 - DNA, 823 bp, Homo sapiens
  misc_feature (37)..(37): n is a, c, g, or t
  misc_feature (45)..(46): n is a, c, g, or t
  misc_feature (53)..(53): n is a, c, g, or t
  misc_feature (55)..(56): n is a, c, g, or t
  misc_feature (71)..(71): n is a, c, g, or t
  misc_feature (84)..(84): n is a, c, g, or t
  misc_feature (99)..(99): n is a, c, g, or t
  misc_feature (102)..(103): n is a, c, g, or t
  misc_feature (107)..(108): n is a, c, g, or t
  misc_feature (110)..(111): n is a, c, g, or t
  misc_feature (113)..(115): n is a, c, g, or t
  misc_feature (117)..(117): n is a, c, g, or t
  misc_feature (122)..(122): n is a, c, g, or t
  misc_feature (144)..(144): n is a, c, g, or t
  misc_feature (149)..(149): n is a, c, g, or t
  misc_feature (154)..(154): n is a, c, g, or t
  misc_feature (157)..(157): n is a, c, g, or t
  misc_feature (159)..(159): n is a, c, g, or t
  misc_feature (161)..(161): n is a, c, g, or t
  misc_feature (163)..(163): n is a, c, g, or t
  misc_feature (169)..(169): n is a, c, g, or t
  misc_feature (174)..(174): n is a, c, g, or t
  misc_feature (176)..(177): n is a, c, g, or t
  misc_feature (214)..(214): n is a, c, g, or t
  misc_feature (264)..(264): n is a, c, g, or t
  misc_feature (267)..(267): n is a, c, g, or t
  misc_feature (291)..(291): n is a, c, g, or t
  misc_feature (299)..(299): n is a, c, g, or t
  misc_feature (356)..(356): n is a, c, g, or t
  misc_feature (358)..(358): n is a, c, g, or t
  misc_feature (371)..(371): n is a, c, g, or t
  misc_feature (373)..(373): n is a, c, g, or t
  misc_feature (375)..(375): n is a, c, g, or t
  misc_feature (377)..(377): n is a, c, g, or t
  misc_feature (389)..(389): n is a, c, g, or t
  misc_feature (399)..(399): n is a, c, g, or t
  misc_feature (483)..(483): n is a, c, g, or t
  misc_feature (541)..(541): n is a, c, g, or t
  misc_feature (545)..(545): n is a, c, g, or t
  misc_feature (693)..(693): n is a, c, g, or t
  misc_feature (723)..(723): n is a, c, g, or t
  misc_feature (730)..(730): n is a, c, g, or t
  misc_feature (742)..(742): n is a, c, g, or t
  misc_feature (820)..(820): n is a, c, g, or t
tccctttaagtagcagaaactccctcagaggtagatntttgagtnngatattntnntccaccgagcgattnttttggtttaagntgatttgcgtatgangtnntttnncnntnnngnggggngggggtggggatgcgtgggggngtggnccatnttntntntntagaanttatntnnccatttttggcatctctgattgggcagggctggcgtntccacagattccagagcatacaagtggggtggggaagggaaagtgggggngcncaggagagaaacagaatagttgcnagtgggantttttgtgtgtgaggtgtgggagagggagagagaaagacagaggagaaaaaggggtntnagaaataggtttntngntntttttttttttntttttgaganagaaagcgagagaggaaaaagatggaaaaaagggagagacagaccccacactccccttagaggccccattcttcctgccatgtnattagcacccccagcacagagagtttcgttagggaggggatgaccccattggcccttntctnttttgtgcttctcctgtattggggtttgtcctctggaagcctgcgtcctcttcaagtcgccttgtgagagcccccacccctgtgaccctgaggggcaagatcagttggaggtatcagagtgaacactccctggtccctccgttggggntttcactgaagaggggggtcacagcctctngccagcngccatttgcccncattttcccgtgggctgtacatctgggctcccccgaggttatccccatagcccctggccccatcgagtgttggagtgnttc

SEQ ID NO: 646654 - DNA, 435 bp, Homo sapiens
agacttattctgtcatttcttcgattttgttaaagatgattatctatttaaagcataactagtgacaatatattttgggattataacatctgtagaagttaatagcacgaatataacagcacaaaggcatggaataaaatagtactatactgctatatgccttgtttttttttttaagacggggtcttgctctgtcacaaaaaacaaacaacaaaaagcccaaattaaatggaagcagactttattactcacgccttataatcctagtatttggggagaccagggccagaggatttgcctgaagccaggatttcaggattagcctgggcaacatagggaggtcccgtctctgtcaagaattacgcgagcttcacactttcttaagccacctcctcataaatgggtccagtcctgaggaggtggcgtcgataaaca

SEQ ID NO: 646655 - DNA, 203 bp, Homo sapiens
aagggtgaagcagcggaaacagtggaatgccagacacaggctcgctgctgctggaatggcggggtggagacttccattcctctgtccggagaggcacaggtgtcaccagtcccagccaaaggctcctcacaggcgctgtgaattttggtacaagtcttgtatttatcgaactcaacaacttgttgcaattttaattaaaattg

SEQ ID NO: 646656 - DNA, 121 bp, Homo sapiens
tcgagtcggtaccggcacgagcgcccaagtccacttgtagctgagaaacttgaaagaacccaaaacagtcaatgttgttcagtttgaacccagtaagggagcaatggtaaggcatataaga

SEQ ID NO: 646657 - DNA, 285 bp, Homo sapiens
gggaagcgaggctgtaccatggtagcttcctcataagactgagcggcatatgagcattacatggccggactacagtgtggcaggggctcataccctgttatcccagctactttagggaggccaaggctgttggatcacttgaggtcaggagttcgagaccagcctgaccaacatggtgaagccccatctctactaaaaatacaaaacttagccaggtgtgtaggcaggtacctgttatcccagctactcgggaggctgaggcaggagaatcgcttaaacccggga

SEQ ID NO: 646658 - DNA, 794 bp, Homo sapiens
ctgttttggagtcaggtatgatcacacatgtcagtttctctttctgttcatgacgtatatgatgtgacatatttttccaccagatattatggagataagaaggatgaaaagcacacactcccatggtccacttgacctgttgcaggtggaacctccgggcatgggcccaggattctgtatttttagtaaaagccagtggaatcccgtggtcttcaagctctccccccaccaaccccatgtgcggaaatgcctgggacctcccttgggtggcgctgccggtccagcgttggggtgagatggcgcccaccgagttagcggagctgcgtgcctgctactgctcctgggccacccctcctgctggacctcgggtctgtctccctgccttccctgcccttggcgccttgagcaggatgacaatctctgaggtactaacgtagttctgcatctgggagtgtccaccactgggatcttccagaagcccaggggtttcgggccccgattcctggcatgctgaccctaggtttgggctgtgtcatggccgacccaggtcctgcgctgtgtggcctcgggcgcgtcgtttaacctctctgacgtggcagtcatcagccatcctgcgtgggacttcagacttgagcctgtgccagggcccctagctgtgtgggcctccgtggaggtgatgggagggtagggatgggctgggtcgctgggagcgctggttcatgcccttcagatgccccgctggcggggtgtgcgtggcgagcagtggatgctcatcgatgcccacagcccctgga

SEQ ID NO: 646659 - DNA, 825 bp, Homo sapiens
  misc_feature (48)..(48): n is a, c, g, or t
  misc_feature (74)..(74): n is a, c, g, or t
  misc_feature (100)..(100): n is a, c, g, or t
  misc_feature (121)..(121): n is a, c, g, or t
  misc_feature (137)..(137): n is a, c, g, or t
  misc_feature (148)..(148): n is a, c, g, or t
  misc_feature (152)..(152): n is a, c, g, or t
  misc_feature (205)..(205): n is a, c, g, or t
  misc_feature (224)..(224): n is a, c, g, or t
  misc_feature (232)..(232): n is a, c, g, or t
  misc_feature (235)..(235): n is a, c, g, or t
  misc_feature (241)..(241): n is a, c, g, or t
  misc_feature (284)..(284): n is a, c, g, or t
  misc_feature (312)..(312): n is a, c, g, or t
  misc_feature (365)..(365): n is a, c, g, or t
  misc_feature (367)..(367): n is a, c, g, or t
  misc_feature (405)..(405): n is a, c, g, or t
  misc_feature (807)..(807): n is a, c, g, or t
ggtttgttgtgtggtttactgtgtgggtaatattcgagtgaaaacganggccataaacctgggtgacgggcgangctgcttggtcccaaacacaaattancccgacctttctgggttcttnctttggtctgtcttcngcccccgtcgntccnggggagaggctgcagagctcagccctgggaaccgggcccaggcccggccctgncccccaatgtgggccggcncgtccggngcngctggngccttctggctttctctggctttggggtcggggggtttgtgtngcggagggtgccccttcttcttccctgntccgcctggctgcgtgtgggctgggggcgctcgtgtgtactgggttgggagtngntctggcagcggtggggggtggggtgggtggtagctacngctctctgggttacagtgagcgcggggtcgctttgtgctgtctgatgttgctcctcgctagtcatagggccaccctgagttcttggcagaagcccagaggcctggatcctaggagacaagtggctttggggccctcagcctttggggccatccgtggaccctggggcctaagtggatctgcagctgctgcccctctggcagagctccctacagagctggttgctgagggccctagatctcagtagcagtgatctcctccaggcagatgcagggggcctgctcggccaggcccaggtcagcgagctcccgggcctccagctccaggctgagctgctgcagctcctgctctagctgccggttgcgccggtacatctggatgtagttgtgctgcagctgcttctngtagcggatcacctgctc

SEQ ID NO: 646660 - DNA, 774 bp, Homo sapiens
gcctgaagaggtgcagaatatacagaccaacgttgaccagtaggataatagcaaacatttctaactctattaatgaggtctttaaacccttcatacctcttaaaggctggaatgctttcatcatgatccttgcgcctcttacacttacactttccgacatctggcatcagatcctcttgcgcctgggtctgcacatgcacttggcactcctgtgctgccttccgtctacgctaacttgttgaccccttgcctcaaattggatgcgttacccccatttcaaccctttcataacacccgtcttatctcccacgccttccacctcgttatctactccgcgccgaccactcgcgcttccccctccttgaccagccctcgctcttctattgctacccctccgaaagagtcttcgtcgacttgacttcgatttgctttctactgacaccttgcttcagccacctgcccgtctccctcgtcgacccatatctatgccaccccctccgcttgtatcgtcttcccttgttttcgctacatcccttgagcctcgcttccctctcctctcatcttcatccttacccgctcttgagccgcgcgatgtgttcctgcctcgctccgcttcgcgctcgcctccattcacaggactgcccttctgtatctcccaccttggtcatcaccttctgcgcttccctccgtatctctggcctctgcccatgcgcctcgcgaggacccctttacctcctcttagtcctctatcctactcggaacgtgtctcgtacg

SEQ ID NO: 646661 - DNA, 559 bp, Homo sapiens
  misc_feature (78)..(78): n is a, c, g, or t
caagaggagaaacttgagaggactccgccttcctgcccagatgcggggtggacgctccccaaatactccacagtgtgnaagtcaaaaatgaagccgcagcggtgctggtctcccaggaaaatggagggcagcttcagccgggctcggaagaatgacgttgttgatgtcctcctgtgggttttgcagacaatttaacagaagtccaacgaaaagggaagttgcctgaaagagccggctcccaatcctttcaaatgaggttctgagaatcacaacggggactgacctgtggaagccatgattgaccaaccacatcagcattagaaagggttctcttggctgggcgagtgcaaggtggagctcagagagacgcctggaggatgaggcggcacagacaaacctcagggcatcgtgggctcagttccagaggccgcagcacagtggtgatcacaacgaatgcagccacacacactttttggtttcctagtgcatgtcaaatgtatgtttacactacactgcggcctaataaagtgtgatagtgatagcattatgtctaaaaaaa

SEQ ID NO: 646662 - DNA, 149 bp, Homo sapiens
tcgagctcggtaccgggaatgtagtgatctcggtcttcaatgacttttttgcgatgttatttttactgtaagggtcacacaggccattgttgtcctggggctggagctctaagcctcgaatcaatgtaaatcctaactgtgcatggtgg

SEQ ID NO: 646663 - DNA, 541 bp, Homo sapiens
  misc_feature (35)..(35): n is a, c, g, or t
  misc_feature (49)..(49): n is a, c, g, or t
  misc_feature (59)..(59): n is a, c, g, or t
  misc_feature (64)..(64): n is a, c, g, or t
  misc_feature (70)..(70): n is a, c, g, or t
  misc_feature (79)..(79): n is a, c, g, or t
  misc_feature (95)..(95): n is a, c, g, or t
  misc_feature (145)..(145): n is a, c, g, or t
ggttggtaaaaattatgaatttgattgttacccangtaggggtagtctnggtttaaaanttccnaaaggntaaaggttnttaaaaggtgggccanttatgatgggaatccacccagtaatgcttctcttcttccccaattatcgnggaaagattcaccccatctgggaaccaaagggctctttaaccacatattagagtcacccaggagagctctttaaggaattacacatatctgtaccttgtctaagactggtataagccaggcacagtggttcacacttgtaatcccaacactttcggaggctgaggtgggaggagtgcttgagcccaggagttcaagactagcctgggcaacatggcaaaactgcatctcttcaaaacatataaaaattagccaggcatagtggtgcacacctgtggttccagctactcaggaggctgaggtgggagcatcacttgagcccaggaggtcaagactccagtgagccataatcacaacactgcactccagcctgagcaaccggaatgagacggtgtctc

SEQ ID NO: 646664 - DNA, 197 bp, Homo sapiens
tgtgaacaacacttttacttgcagattatctcagtgctgcggtaattcagtagactccattcaattcctttctcccttcttttcaacgtctcactcatcccccaccacccccactccaaacttcctgttccttggctgtataattaacagtctataccaactaaggtaacaataacctccacttccaatccttttcg

SEQ ID NO: 646665 - DNA, 340 bp, Homo sapiens
ccatgttcgcaggatggtctcgatctcctcacctcgtgaatccacctgcctcggctcccaaagtgctgggattacaggtgtgagccactgcgcccggcccaattttttgtatttttaatagagatggggtttcatcatgttggccaggctggtcttgaactcctgacctcaagtgatcctcccacctcagcctcctaaagtgctgggattacaggcgtgagccaccatgcctggtggcattagcttttttataaagttcaattctctagtttgagacctttatccaagttgctttgcctccaatgcaaaacttatttctatacattttcccgtctccaca

SEQ ID NO: 646666 - DNA, 109 bp, Homo sapiens
gatccttcatgctgatgctgagaggcaaccgaagcacccggcgtctctccttcataaattattcagcttcctacactattaaagtttaccacaatcaccaccccaccac

SEQ ID NO: 646667 - DNA, 1473 bp, Homo sapiens
gatacagcgctgacactacaaggctctggaactctagcactctctatgacaggtcatgagctatgcgatccttgcatccccctggaattgaatttctctacttgctatgcgtctttaatttctctctttcaagcattgtagtacggcaatatcgtaaagctaccaagaagacaacctcgtcctgcactcttaggatgcaagcgattcaggttagtttattgtccgaccattaccatgtgggatcattgcaagcattttccttagtcatcacttatcacttcaattccaacaaagtattactcatggcgcagtcgtcacaacggcatctctgtgaaacgcacattcgttaccatctaccagtttgcatcaatctattaaattcaagcaatggtctgggctagttggcataattaagcacatatgcgcaaattctagcacctcttactatatttccccttgtacttgaaagttcacctcagaaagagcttccaacactaaatggagttaagcagcggtctcgtgctaacccttttctcggaggacgcttgcacatgtggcataatacctttcgcttatatgaacaccgaaaaagttttcattgtaaagactcattttcgaatacggtcacttccggaattttcttttaacgtaagcgacttggaacctatctagagcttacatttccccgtaatataaattctctggcctaaagggtaaaccattattaattatttacaggtctcctaaagagtttgattaatcctgacacaaaacgcaattaggttttcaaaaccccgttggaacagtacgcacggcaattgggttctatgacacccccaagccgcttttgagaaaaaggcctacacaaagtgtgggccccagggggataatatccggcagattggactgtaaagataggaaaacaacccggggattggggccacaaagattccccattttgcaacttaattgcacccttcgagttggcaaacacgcaattttgggtcccacagcggaaatcaattttcggccgcgaaccctttaaatgtgcggtgggcaccgcccttatatacaatggaacgtccgagtggacttttcttaaccttttatcaattgtcaaaacgccactttctttggaaaaacgggtccttatagaccccaatgacaaacattctccctttttagagacttcccttcataccattggcgtgcacagctcatctcccggcagtgagcgggggttcctttgggacaacaactttgggcgcacttcggggacctctggggtggtctagtcccgcggcacagccgaaggaacctttcggcatctgggcgccaaaggcttcgctacagcacactctctccagcaggccaggagagggcgctcggggtacatctcccgacagttcatcataatcaggtaaacagggggacatcttcggagcaacgcgttgcacgggttctgtcccttaa

SEQ ID NO: 646668 - DNA, 142 bp, Homo sapiens
cgactctcgagagatcccccatcccatgcttacacagcaagtacagcaatccacccatcaactatcacacatcaactgcaacaccaaagccacgggtaccgacgctcgaacttcgataactcactggatcatacgctgattt

SEQ ID NO: 646669 - DNA, 351 bp, Homo sapiens
  misc_feature (199)..(199): n is a, c, g, or t
attaaagtcttctcctgctctgttttgccattatacatgctttcaaagtctctttgaaagtttgaccatttccttaggcaggtatctggtataatgtaactttacgacatatgtttcttgaacagaaactttacaccactgtcattatgttacctatagactatactactaacacaagtcatatgtgcttacgattatnacataaacctgtgatatggcatgatataaactatattttgattgcctgctttctattattaccactactactgtctgctcaccatttctgtgcccctttcacttgagatgggcgccgaaattagtttttaaatttccctgattctcgatctt

SEQ ID NO: 646670 - DNA, 411 bp, Homo sapiens
  misc_feature (27)..(27): n is a, c, g, or t
  misc_feature (55)..(55): n is a, c, g, or t
  misc_feature (106)..(106): n is a, c, g, or t
  misc_feature (178)..(178): n is a, c, g, or t
  misc_feature (188)..(188): n is a, c, g, or t
  misc_feature (252)..(252): n is a, c, g, or t
cgggaaaccttgcccctgtcctccccnagaactggaagtgcaagtggtgcggaanctcggacctcaactggcaaaactcccgccctcccccaggttcaccccccantccttcctgccttcagccctccctgaagtagctggggacctacaggcgccccatgacccacgcccggctaanttttttgtanttttagtagagatggggtttcactgtattagcccaggatgatctcaatctcctgaccttgtganccgcctgccttggcctcccaaagtgctgggattacagcgtgagccaccacgcccagccttttttttttgtctgattctttggggtgcaaagactgtcttcaagttgatttcatggtggttttaggtgggggtgtgtattattccattcttgcattgcca

SEQ ID NO: 646671 - DNA, 559 bp, Homo sapiens
  misc_feature (412)..(412): n is a, c, g, or t
  misc_feature (488)..(488): n is a, c, g, or t
  misc_feature (519)..(519): n is a, c, g, or t
  misc_feature (537)..(537): n is a, c, g, or t
attttactattctaagtattccaaataagttgactcatacagtgtttattcttttatgtctggcttatttcacttagcgtaatgttttcaaggttcattcgtgttgtagcgtgtatccaaatttcatttatttttaaggctgaataatatcccattgtacgtacataacacattttctttatccattcatttgttgatggacatttaagttgcttccacctttggctattgtgaatagtgctgctataaacatgaatgtacacatctgtgtccctgctttcatttctttggggtatatacccggaagtagaaatgctgggatcatatggtagttctgtgtttaggctttttgagggaactgccatactgttttccacagcgggcagtatatcctgtgcaaattttaagtgtncaaggtccagctcccttactacctcctccaggacattttttcaaatcccctttctggatggaggggactttttttngggaggggttgtgggtgatttacttggcggnttgccttccctcgggctnttttaggagggtcttcttggat

SEQ ID NO: 646672 - DNA, 714 bp, Homo sapiens
ggccaggctggtctcaaactcttgagctcaggcaatccgcccgccttggcctcccaaagtgctgggattatagggcttgagcaatggtaagggaggggagctataaggaaggagaggaagtgagattgaggtagaaactaggaaaagcaaagagaagggaggggaaaacggatgaaaaagaagaaaagggtgagaagtaaaagaagcaagtagggaggaaaagtttggagagggtggataggagaaaaaagtggactgtggaatggaagatgaggagcctgctgggctttggggtgagtgtggtggttggagttgaactgttttggtttccttgggcacaggccctgagaggaggttacccctgctctgactgcactcagaggtttagtaacaataatattctaagcttttatttttatttccatctttattgtctatttttgacaatcagaatattttctactgggattttaaacatcttcaccttgcgacaaaattacttagaactaaagatttagaaatttagtgattaatattagattgtattaatatgtatagcctgtatttgctttgatggatttaaaccttacagattgcattaattatttttaggaaagattgagaatgtgtcatttcataatgtctagatattggctcttatttaaaaaataaatctattttagtctacgtaggagctggtattgaggatcacca

SEQ ID NO: 646673 - DNA, 123 bp, Homo sapiens
ggatcccctgggctgggaagaggttgagggattgtcagcacacacagctatttagtggtggggcgggacccgtgatataggcctctccctgagggaaggtgaacaggctgagggagatgcgtc

SEQ ID NO: 646674 - DNA, 853 bp, Homo sapiens
cgggccatggcggcgaatgctgagccggaacgggccagcgctgctatcaggcctacgtgcgggtggctcacctcagaagtccccgaccgactgggctctctttacctatgtaaggcaacagacaatgacatccgtgtggctgtgcagaggggagggtggcctggagtgagatggtggagagtagctctacacaagtcgggcaaacggtgatgtacgccgttctgtcgagagatgagggaccccaagctctggactgcccaaagtttgtcctcatcaactggacaggcgtagtggcggttaactgatgtgctggaagggagcctgtgcctaagctcgatcgttcagtcaggccgatggccagcttcctgaaagggggcccatgttgaccatcaatcgctacgggctcgaggaggatgtgagagaccatgaggtgcatcatggcatgaagtgtggcctaacggtcttcaggatgccaactagcagctttcacaatggagagtggcgtttccgaggacgtggagacctcccatggccccatgtgtggctctgtgtaccagaaggaccatttgcccgtgtctgagcacttcaaagggttggtaagagacaggccttcgtgggctcaaatgctagagtaaggaggaagtgcataaccgtcggcctgtgaggcaaagcggcgggcgcgattgaccgtgacagacgtgtaggctgtgaggcaggagacgccggggagctgtgaggtggcgtcgaggcttgctgggccggggatgcagcgcgtatcaggagcagggttgggagggccagccccccagtaggacgtggggaggcagcacctggaaagtggttaccaaggaca

SEQ ID NO: 646675 - DNA, 466 bp, Homo sapiens
gcgaattcactagtgattgtgagctgagatcgcacccggtccaagcactggctttgagataagcaatattaaaaacattttcagcttcatcagatgctgactaactgacctccaaccactgttccaccagccataactacagctttgattggacaagtgactgatttcagtaactttttcctgacaaggtgactacccatcatggactggttctggctggcttacagagctcctgcacttgcatgtctttgtgtcctgaaaagaccttttgccatatagggcctaattataatacatttaaatgttaagtctccaccccaaagtgaccatgggttgtatgttgcatgcatgtttgttcaatatgcatgtgtcagaaccactttcatgaattttcatagctcctcatgtaacctgttgaatgtgtatgtttagtccatccattgagcatgaagctccttacctaaac

SEQ ID NO: 646676 - DNA, 136 bp, Homo sapiens
  misc_feature (69)..(69): n is a, c, g, or t
gagccgaggccaagtcccgggcgctagcccacctccgacccgcctcttggctcctctcctctaggccgncgctaacgagtctcttcatcgcttggtctgtcgccaatgtttgaggagaaggccttttgtccttcag

SEQ ID NO: 646677 - DNA, 325 bp, Homo sapiens
  misc_feature (7)..(7): n is a, c, g, or t
  misc_feature (300)..(300): n is a, c, g, or t
  misc_feature (302)..(302): n is a, c, g, or t
ccaaggngttcttcccaagggggagcagacctgacatcgtttgtaccactcaacagtgctggatgctgtaacctcaagacagtgcaaatgggtgatactagcagattaaccaccatagtttcagaactcaaggaacaactgagaagcaccattttaaattctataaaaatgttcactgtagaaatttgtgataagaaagacacacagacgtagaaaatgagaatacttgctgcaaaattaagatgctcctagcaaaagaatgcttttaagtgtttgtcatgtatggatatatatgatgtntntataataaatgtcatgtaaagca

SEQ ID NO: 646678 - DNA, 687 bp, Homo sapiens
gtggcagtgcaatatatccaagaagaggaagttctgtcgctcgatggcatcttcaaagctgacactgaatgagctttcttactcgaggagctggactgaatgatggctactctgagagttgaggtgcgagttactcacaaccagtgacaatggaatatcattatcttagccaccagtaactacatgaatgtcctttggtgagtaagggccgtgcgtgattcgggaactgactgctgttgttcacaagagggtttggctctatccagagggccggtgtagagctttatgctgaagaggtggccacttagaggtctgtgtgccagttgcccttggccgatgtctctgtgttgcagaatgtcctacgcgagggcttgtctgtgtcggagggcctgctactggtgtgctgcggttcaggtcagtggcagagtggggccagtagggctgctgatggtcgtggtgtctgggaaactccgaggtagagaaggggtatacattccagtgtaagttcgtggatggcctgatgtatcctcgagtgtagtaccctgtttaattactacgttgacactgcatgtgcaccagcgtgttgctcagtacagggtgtgctgggcatcaaggtgacgatcatgctgtcctgttgacccaactggtcagatcggcctaagaagcccctgtctgagcagtgagcat

SEQ ID NO: 646679 - DNA, 720 bp, Homo sapiens
caccttttggacggctccactcaccatcataggtggacgacacccctcctcacttggctcgctcctgatcggcacaacggaggattccagtcagccaatctgcatcgctgggggggtcgcctgccccaggatgtcgtcacgcttccatggagaggagttaacagtcccttccgtggggatgggatgcctcctccatgccttatagtttcagtacctgtgcccctccctgttcacgttccctgctgccaccagccccagtcaaatctaccttttagctattgtctatgccatcactccgagcgctgggcagattagcatccttatacccttctccacagtcataggattcagtctaccgaccaagacattgcactggcagcgcacccatcatacactcgcccactagccatctcaagtctcatcttccccccagccctggacattgccattacattcatactaacgctcccatattgttatttgttagtgaacctcaaaccctctagttcattctagcaatacatatataatatatcctgcctagattaaaaagaaagcgatgcattgttaacttattttttctatttgatgtaggttattatgacttagcttttctcactctttcactacccagcatgcacaactagatgtccttccattggtaggtagtcagacctgattgataagccaaccaatggagcgtccattgaaaaaaaaaaa

SEQ ID NO: 646680 - DNA, 133 bp, Homo sapiens
actgccacagcctgtagaccaagctttagcctattcatactcagtgtactttgagcttctccatcaacatcttcagcgcattataccaagaggcttacggtgagcattggctatttcaagaagcaggaactgg

SEQ ID NO: 646681 - DNA, 1746 bp, Homo sapiens
gtcctgttttgattgtaagcatacacatcgtcgctggttgtatggagagctagccctgctgtcgatttgttggcgtgggtcccccgcactgacggttcagctgttcactggctgtcgtgcgttgttgtcgtcccggccgtgttgtgtgtggcgcccaccgacgagttgggttgggctcactctcacgacgagatgcatggctgggtgttggcccccctggaggagggtttgtgtgatgtggcgaggctcgcccccccgggtagagttggtgttggacccgcctggacgtcagcgtaagttgtgctccaagcgggggcccgccaacgccgcttggggggtggtgcgccgagattaaggctccgcgtgccgggcggttgtccggcgagcggcttggttgaccagccttgcttgtgcgggcgcaccagaacaagataatgggggcccggcgcagcggtgacagttgtgatgtgttggcgctgtggaggtgagatgagtcggtctcgccgttttccgccccgtgtgggggtacgccgccgcgcgtccgttgtgtggttgtgtagtggagtcggccaccagcgagtggagtgttgcctcgcccgccgcaagattgaggcttgttggtgcccgttgtttttggtggaccccgcacacgccgcccccagacacgccaccgcgaagattgggggtttgggtagagaagatttggttggaaggcgccctgctcgtgcgtccccacaatcgggggtataaaaaacaccacagtggactttctgtctctgtccccccttgtttgtataaccccgctgtggttacacccgtgtggtttctccgcccacaagagagtgtttcacaagttgtctctgccgccacagttgaccccacaccacctcttcacatactccaccacagcgcctcactgcccagcacttctcacagctgtgtgtgtgtgggagattgtgggtgtgggcgcacaccctgcgggcgtctcttcacacagtggtgtgtgcgtcactcgcacacgcttgagacgccacagcccttctcccaccactctgttgtgtgtgggccctcctgtgttgtggagaagacactctctgtgtcacacacaggtgacacacagagagagacgctctgtgtgggtgtcacactagcctgtgagacgcacacacacaccacgcacacgcgcacactgtgtctctgagaggcccctctgtggcgtctctctccctgtgagccacacacacaggtgtgtgagccccgtgagagtggagagtgtcccacagcgggtcgcgccctcttggttcacctcggtgacacctgcggggtggagagaggagagattggagaggagaagggcgagagttgttctcacgagaggcctccctggagaagaatatatggctcgcccctctcgagagagaagagagatatatatgagagagagagggttgggtgtgggagatttctcgcttgagaaggagagagagggtgagaggagaagaaaggagagagagggaaatactataattaatccacatctcctcttgtggccccgcacgcacatcgtcacatgctcccacgaaattgtcacagcttcacggcttataactgaccacacgacacctttaaacttttctggttatgattgttttcacacctggtgatcacacgtcttttccacacgtgtacacccgtaaaaatttttccctcacaaatcctcccaaattaagtcccttaaccactccc

SEQ ID NO: 646682 - DNA, 424 bp, Homo sapiens
agaggatcccccccgcaccactgcaaagtcggtatggtgttcgacctggatgatttcaacacccccatgtgcgtgtgccacgaccgggccagctgcccatcccccattggcgacctggatatggtgtgctgcaatgacaacatgaccttctactcttcctgccacttttttgtcacaaagtgcaccctggagggcaccaacaagggccacatgctccacctggactacatcgggccttgcgaatacatcccaccttgcctggactctgagctgaccgaattccccctgcacatgcgggactggctcaagaacgtcctgctcaccctgtgtgagagggattaggacaacaaccttctgactgagaagcataagctgcgggtgaagaacatccatgacaatgataagcggctggaggcaggagacc

SEQ ID NO: 646683 - DNA, 402 bp, Homo sapiens
gggtgcctaattaagtaccccacagtggccctcaaagaacctcaaatgaaaggaagacttggcaagtcctcctcactttaagtcccagagcctagaaatggattaagccttagtgaagatgccagaattttccatagcctagagagaagtcaacgcttggccttcaaaacttcaaaggatgggctgactctctttgaggagcactgcagctggtgactttaagttacagccagtgctcattgaccactctgaaaatctcagggcccttaagaattatgcaaaatctattctttctgtgctctagaaatggaacatcactgtctgggtgacagcacatctgttaatagcatggtttactgaatattttaatcccactattgagaactgctgcagaaaaaaaaa

SEQ ID NO: 646684 - DNA, 148 bp, Homo sapiens
agatctagaggacccagtccgggtcccccatggcgagaaccggtccttagaatgtctgcttcccgccgtgccagggaccacttattctcactggacgggaggaggatgtcccaactggcagccatgtgtgtggggtaccggagctcga

SEQ ID NO: 646685 - DNA, 156 bp, Homo sapiens
aggcgatagaaattgaaacctgcgcaatagatatagtaccgcaaggaaagtgaaaaattataacccagcatatatagcaaggactaaccctatactctgctaatgattactggaataattaaccaaggggccaagctaagcccccgaaaccgcgag

SEQ ID NO: 646686 - DNA, 283 bp, Homo sapiens
ttcgtgtccccaaagaaacagaaccagtctatatacagtggtgtgtgtgcgcgcgtgtgtgtgtgtgtgtgggtgtgtgtgtgtggagagagagagacagaaagagagagtttagaaattgtctcatacgactgtagaggctttgtcagaggcatttgaaccacagcaactccatcttgaataggggctgggtaaaataaggccaagacctactgggctgcattcccagatggttaggcattctaagtcacaggatgagataggaggacacgaatgttcagga

SEQ ID NO: 646687 - DNA, 664 bp, Homo sapiens
gaggagcgggcagccaaggttcctagcaccccgccccccaaggacagctccaccacgcccctgccctcactccggactcgcagaacgtggacagcagctgcaagacacctgaggtctcctatccatgcccgaggaggccactgcagagaggctaggggtccgaggatggggcggagcgaggaggacggaggaacgaagaggaggacggaagaagcaggaagcaggacggaagagcagccagcactagcataccaccaacggaccacacagcacatgcatgcagcacagaccacacaagcaactgcagccaccaagcgcgcgggatccacaacgcacggatgacctcgagaggagcgagagagaacgcggccaaagcaataacccggatgctacatacacacaagacatagcacacaaaccaagccatagaacacaccaacgacacccacactagcgaccatgcagcaaacactacataggaccaaggcaccaagagactgactaggcgcaacataggccaacacaaaacacaaaggacagagaaagattcaccataggcgaccccagtaacagcacacagggaccaccacacaacaatacattataccaccaggaacatgaggacgccaaaaagaccgccaacacaacacaggggcgcgggcag

SEQ ID NO: 646688 - DNA, 357 bp, Homo sapiens
  misc_feature (115)..(115): n is a, c, g, or t
  misc_feature (253)..(253): n is a, c, g, or t
  misc_feature (354)..(354): n is a, c, g, or t
ataccttttcaaggccaagagcattctccaagtaactgatatcttcaacagaaggtggttgatgagggccaaaagaagaggttctcaacatgtggagcagcatcacctagcactntattagaaatgcaaaatctcacaccacactccagatttattgaatcaaaaactgcagggcagggctcagcagtcgtggtttgtttttgctttttggttttttttttaaactttttgttttgaaataattaaggattcncaggaaagtgcaaagaaatggacagagagattccatttgcccttcatccagcttcccctccatgttaacatcctgaatgagtatataaagcaatttcaaancca

SEQ ID NO: 646689 - DNA, 148 bp, Homo sapiens
catttggtcccgagagaaacttagtatatttacctgtgatggttagtacaatggcttgtgttgtagaaagggaaccagagtatgaagaaaatcatgtgggactcaataatgtacaagttccttgaggacatctatacagtgcatttcc

SEQ ID NO: 646690 - DNA, 1304 bp, Homo sapiens
ggaggccccccatcatcccctgtaatttattgccacagcagagtctaatttatatagccacggcacactacctatagagcacggattcggaccacttgtgggatcccagtaacctcacctgcacgatatcctaggaaggactgaggcaagggagtgcctggggcgccgagactggatgggtagggatagcacctagcgcttcctggcaaacatgagacgccatgattctcaggcgctccatatctcctagagatgacccacagcacgcctaccgctaagcacgctattcggccgagggaggcatatccaacaaacttccgacgaccataaagagcgagataacaacctactatacattataagccttaactaagtcacaagtacggtgcctaggcgacaataccctcttgacccagggctcaactatcgctagtaaacgcagagcacttgcccttggactataaaactacaagccaccgcacagaagaccatcctaaacatctgggcgatcgctggtacacgagaagagggtactaaggccccacagggcgaagccgctaacacggcaaccggcacataaagacactaaggcgcgctggaccgtccacagcgcacaggggaacaaaacgcccacggacaatggcacgcaaacggggaagcaagacacacaacagcggggagccgaccgcaccacaggcaatccaagctccgtaacgccacacggccggagagcagcaaaaagaaagagagaaacaaacaaacacaagagcagcaagaaaaacaacaatccagaaagagcacacaaccacccatgcgagcaagacagacacaaacgcacagagacaaaaacacaacaaagcaacgcctgcatcatacttggcgagcgtgtaactcaacgcgctcggcgggacaggcaggacagctgaatgtcagggtagcgacaaccacacaggaacgtgtgcacaatgtagtgtcagcggtgccgtcaggtcactcgagtacggatgtaaaaggtggagcggtgcatcctactaagaagtggtgaaagtgtacccggagatgccctctccaaattatattccaacactcccaaacgccacaccaggacaggggaaggcggagcgcaacgcgcgcagaggagagagaaagcaagaagaatgcggggggacgcggaacgacaagcaccacaagaggaccaaccgcgcgggagaaacaaagacagagcaggaacgagggcaacagagcaggcaaccagggaggagtaggacggctgccctggccccgcgccgcagagagcaataggg

SEQ ID NO: 646691 - DNA, 163 bp, Homo sapiens
  misc_feature (35)..(35): n is a, c, g, or t
  misc_feature (160)..(160): n is a, c, g, or t
agcggatgaggggaggcaagctctggagccgctcncagggcatccaggagtctctaaacaacctaccctggggacttagaggaaattgtcaagatagaacctgagacacccagactgacaaacgcaggctagcaactcttgcgcggacaaagcagaagcnaca

SEQ ID NO: 646692 - DNA, 655 bp, Homo sapiens
  misc_feature (43)..(43): n is a, c, g, or t
  misc_feature (67)..(67): n is a, c, g, or t
  misc_feature (173)..(173): n is a, c, g, or t
  misc_feature (211)..(212): n is a, c, g, or t
  misc_feature (256)..(256): n is a, c, g, or t
  misc_feature (261)..(261): n is a, c, g, or t
  misc_feature (326)..(326): n is a, c, g, or t
  misc_feature (415)..(415): n is a, c, g, or t
  misc_feature (452)..(452): n is a, c, g, or t
  misc_feature (473)..(473): n is a, c, g, or t
  misc_feature (509)..(509): n is a, c, g, or t
  misc_feature (529)..(529): n is a, c, g, or t
  misc_feature (539)..(539): n is a, c, g, or t
  misc_feature (622)..(622): n is a, c, g, or t
aaataaacgaggctgtggttaccatctagaaggagaaggagtngtggggagggaaatcactgctccngggtgccccaggaaatgtagtttggctgggtggccgcatggtacttatcaatgagctcctgaacaacctcccatagacctagttcatctaatcaaagttgttcttnaacatgttctccttacggaactgctcgaggaaggcatnncgcttccgcagcttgtaaaactgctggaaggaacttttaaagancgagntttttctggtgtggttggccatcatgagcccgcagacccggtgggccgagggcaggaagggaganttcctcgacagggccacctggatgctggcggggccccaagggatgaagtaggccaactaccgttcccggatcctctgcaggctcttgtngacctgggtggggtcacacctatacctggatgatgtngaggatggcgatgtagcagtngttggtctggcggtctcggcctgtggacaccatcangttcttgggctgcagcagcngcctcatganaaccaggaccgtggtcttcctcacgctggccactgactggtctgttgtaagcggggtgtagccggtcatgaggaagtagagcngtggggtgggaatgagcgaggagatgaggccga

SEQ ID NO: 646693 - DNA, 141 bp, Homo sapiens
gcccacacgcgtccgggagaaaggtgaaaaaaccaatggagacacaaataaagcacaactaaatgagacctaataattggccttcgattttaaataatttgtttttataaaccttgtccaataaaaataaatttaaatcca

SEQ ID NO: 646694 - DNA, 542 bp, Homo sapiens
gctcgatgccactgaaatacaaagattattcaagtctactatgaacacctttactcacagaaactagaaaatctagagatgaataaattcctggaaatatacagctatcctagattaagtcaggaagaaatagaaactctgaacagaccaataacaagtaaacaaattggaacagtaataaaaaaaaaaagttgccaacgaaaaaagtccaggaccagatgtggattcacagctgaatttggtcagacattcaaagaagaattgataccaatcttactgaaactattccaaaagataaagaaagaggaaattctccctaagtcattctgtgaagccagtactcatgctaatttccaaaaccaggaaaggccttaataggaaaactacagcccaatatcccagatgaacacagattcaaaaatcctcaaaaagatactagccaaccaaattccaacagcatatcaaaaaaataatatttcccaggatcaagtggatttcataccaaagcatcagggatggtttaacatacacaagtcaataat

SEQ ID NO: 646695 - DNA, 946 bp, Homo sapiens
gccctaaccctgaggctggcggcgggggtcactgcgccgggtagtgggccccagtgtggcgctctctggccgtccttaccactttgcttcaggctccagtgcaaggggcgtagtgggatatggccaacctcgtggctgcaagggacgtcacgggtcccagatgaggagagtccccctggtacttgtgctaccggaagccaacctgctggagagagaggatccactccggaaaacaccctcgggggggcagtacctactagttgtgggcccgggcctggccggcattacaacgcttgacttgggcaatttcccacagggcaacacacacaggtccaaacagtttggcgccttgtagggtggaattagggccaaccgattgtcttaccggaggttcctgggcggatttaaaatgttgctggcgacggtatgatcttgggacacacttgccgcaacaatgccaatctttacaacttctcttctggggcattgacgaccacgaacaggggcgtttcaaccacagtgtggccacttggttacttggtggggcacctcacggaccggttcacacaggtttcgccaccttcaaggcacaggcacaccagcaaaatatacacctgtggtacggaagagttatattcgtgggcattgacacaacatcattcttaacggaaaacgtatggtctttcccccccaaaattaccccaacaatggtcaattagcacaccgcgacttacttctgtgcccattgggttgctaaacaaggcaacacagcgggtcttgggccgggcggggccagtactccaaggaaggacaggtcaacaatgtcccaattaggacaaccagcaagcttgccctctacatctgcgcaaaggtgtcctcgcgcccacaaaagttgtgagacgcttacgttccaacagaggtgggggacacacaagatttcttttgg

SEQ ID NO: 646696 - DNA, 289 bp, Homo sapiens
ctagatgcgtcatgcagataacgacagaccacctagacgaggactggacgaggacagaggaagctggcgaacagctgatgaggacagaggacccagacgtgggatggacgaggaccgggggcctcggcgaggaggtgtggatgatgagcggtcatcctggcggaatgctgacgacgatcgtccccggcggggcatggatgatgaccggggtccccggcggggcatggatgatgaccggggtcccaggaggttgatgatgatggctattattagtatcagggtaccgagc

SEQ ID NO: 646697 - DNA, 191 bp, Homo sapiens
ggggtttgcccccccccttttcccaaaaaagcctttcccctttttcggggtaatagggggggggggggggaagccccccccccccgggttttttgggttgggggggggttttttggggggcccccgggtttattttttccggggcccccccctgggaattaagccccccccccttccctggggccccccca

SEQ ID NO: 646698 - DNA, 118 bp, Homo sapiens
tactcttgagcctgtgcatctctgcactggagtcagtccttcccatcagacctcagccctggtgcaccctgttgtggccttttaagaggttctatctactgaagacccttcatcttcc

SEQ ID NO: 646699 - DNA, 515 bp, Homo sapiens
atgtaatattcctcatttccacgttgaacttcatcttgtaaatcgttggttgattgtgagaaaacagttgaagcttggctgcattctgattcctcagcatcaacccctggccttgaactaccttcatctccattgctgtgcatccacgaggaagatgaagcgatagatttgttctgaagggcaattaatggcgagctttgacactgatctaaaagacctgatgcatagtaggaatccaacttcttcttaactgagctgttccaatgattttttatcgaattatctgacctacaggaacgtaagaaaaaataagcaaatcaccaaagcaggaacgatagaccacaactaccagcatcaaaaacctattatttcatttatgaggccaccaattttacggacatgttacacctatgttgttatactaggacccatgggaaaagacatatttaccttcctggcaaaaatttcataagctctgcccatttattcccattaaatttgatgcgcacgaataa

SEQ ID NO: 646700 - DNA, 107 bp, Homo sapiens
  misc_feature (64)..(64): n is a, c, g, or t
tcggttatcatcccccttcgatagtgtcaggccaggtagagaaggtagaacttgggctacggangcctcgaggaaagatgtgcggcattggtggtgcctgcctcgcc

SEQ ID NO: 646701 - DNA, 405 bp, Homo sapiens
gcaggtgtattttttttctcatgcctcagcctcccaagaagctgggactacaggcatgtgccccaagaggccagattaagttttctttttcctttgttcttttttctgggtagagacggattttcgctcgtcacccatactggtggtgcaatggcgcgatctcggcccactgcaacctccgactccgcgggtccaagcgattctcccgcctcagcctcccgagcagccgggactagaggcacccgtcaccacgcccgctacctttggcattcctagtagagacggagttccaccacgctggccaggctgatctcaaacccccggcctcaagtgactcacctgccttggcctcccaaagtgctggaatcacaggcccggcctatctttgcaatattggtctgcaca

SEQ ID NO: 646702 - DNA, 136 bp, Homo sapiens
  misc_feature (57)..(57): n is a, c, g, or t
  misc_feature (59)..(59): n is a, c, g, or t
agcaggtctggaactttcaaccccaacaggatgagggggaacgggggtggatgtcangnaagaaatttctggccccactacaaaactttatttttgaataggggaccgttttcaacttcttgaacgggaagcaaaa

SEQ ID NO: 646703 - DNA, 962 bp, Homo sapiens
  misc_feature (131)..(131): n is a, c, g, or t
  misc_feature (960)..(960): n is a, c, g, or t
  misc_feature (962)..(962): n is a, c, g, or t
gacatcgctgcgggctcacaaagcggcagacgctcggggcgggtgtggcaggagcgcaggggcgcgagcgggatcagccttcccgggacgtccgggagtcgacactcggataggggaccgggccgcccccnaggatgccgggagatcggcggtgtggcggcggccgccgggggtggtggctccctccaaagtcgagagccggcacgtgacgcgctccgcggaaggggggggccccaaacccggggaaattcccttacaacatgggacaaggggttggaggccccggtcccccaagaacggaccggggaccaggtgctggaaccgtttcgaagaaggggaattcaccgggcggccacccggcccctggggggggaggcagaaaacccttcacggaaaggggaacccctggaaaggcggggctatggacgcgtgttgaggtcgtagcaacagcaaggagtgatgtggatggcgtaggagaacacagacggaacggcagggagtgagcacaacccccggcgaggtgcaagaggtatcgacccccaacacttcggagggagcgactccgtccggagagaaggacaactttaaagagaaaaattcgagaaggcactccagtggcgtttcgcattagacacgttggcgctcagaggttgttgtatatccacagcgcagagggagtgtgactgacaaaaatgagaacatatcacagtggtggaacaaatgagttcgtggaccgccgactacaaaccggtaagaaacttcctgccgaaaacccccggagggcggacgaccctttggtggtgcacaccgccagacggggcgggacaccatttaggaacatgggccgcgattgtggtgtgtcacgcccaacagccaaacgagggggtcccatctaaaaacggtccgtgaacggtatgcgcggtagagtctgctcgactgcttttgttcaacatagttctngn

SEQ ID NO: 646704 - DNA, 152 bp, Homo sapiens
  misc_feature (56)..(56): n is a, c, g, or t
accatgtgcacatttttgtagctaaatgggctggtgcagtctgttcacttgtgcangggttcctgagcttagctggtgttgtgctaatgtaaggcatcacagtcttttccacaaatgagccaaatccaattctgaagtccgaagtaatcctc

SEQ ID NO: 646705 - DNA, 532 bp, Homo sapiens
gggcacacagccgcgttaccatggcacctgctggacgcgcgatagccaagacagtgagattagtcacatcgatcctagcggagctcctggccgctgtgcttctagcgactcctttcacacccggcgaacatccctaggcaagccctggggcctgggtcacttggacgggatggccctgagactcaattttaccctgtcacgggttgagtagcggttatggagcccttactcagtgcctgtggctgtacacagagctgcgctcaagatatctcctcatcttcacaattattcccagtttacaggtgaggaaactgaagcttggcgagtcatgcgaatagctcaaggtcacgggttcagcccctcggggagcgaggatcagaagattagcttatggacgcatgtcgcgcacacattttgttaccgtaaacgacactcgtccgcaggtctttgggctaaatcgaacggggactctttagactgtgccctcacgttttggctggccttggggggcgcccccagaggtggtgcgggg

SEQ ID NO: 646706 - DNA, 246 bp, Homo sapiens
cgtgagaaacacccaagaatgaacaattaaaaaaaaaaataaaaatgaggctccttgcaaaaataaatagggtggggaaaaaaaaaggttttttaaacccctggggccaaatggggcagttcttttggggccgggggttccagaccagcctggccaacttgaaaaaactccgccttttttaaatttccaaaaaatttggccggccttggtgtcttccggctgtccgaggggggttggcccacggcc

SEQ ID NO: 646707 - DNA, 449 bp, Homo sapiens
gaggacgctcccggggcccagaggcaggactgtggcgggccgggcctcgcctcacccgcccctcccatccaggccccagatcccgtgcctccctccaggatcaccccgggctccacggacgccagcctgggagcggtccaagacccaccgacagggggacaagcatgtgcccagagaaggggacaggaacgcacggcgcgagataaccatggcgccgatttgcgagaacggtcctgtacgaagctccgcggttagttggatacaaatgtccacggatttctatcaccaccattgcagtcaaccaccaccctttcacgacgaaagcccgaagtgtaagatttcaatcagcattccgctcaatcagaagatataccactaggatagaagaggcattagtatcagtcaagaggtacgagagagtcacagaagagagaaatagaaacgtggag

SEQ ID NO: 646708 - DNA, 300 bp, Homo sapiens
taaccagaaatggtggtcaagcatgtagtctcaactactagggaggctgatgtgggaggaccaccttagcccaggcagtcaatgctgcagtgagctatgactgcaccaatgcgcaccagcctggacaacaaaatgagaccctgtctcccagaaaaaaaggaaacacactgtatatcatgagttctagtaagctgcatctacgcaaatgattaaaccccgaagagggggtcatgaggaacccctgaattagtaacaggattggatcaaaagtgcaggatgacaaccttaggacttgaccat

SEQ ID NO: 646709 - DNA, 474 bp, Homo sapiens
  misc_feature (188)..(188): n is a, c, g, or t
  misc_feature (224)..(224): n is a, c, g, or t
  misc_feature (245)..(245): n is a, c, g, or t
tctcctgaagcctcctccctctggcaagtactgggatacagccaccctttcaaccccagcactctgaagaccaagacagccccctctggtgaccactggccaagcttgatctttttcctaagaagtggtcttcagatccctgcaggtcgctcagaagacactgggctgcctagtgtgaattctgtccnactaacgtacagtgagcagctcctcacccccacccncgcaaaagctctcaccaagtnctggagtgtcaggcagggggctggaaatccaggaggacttcctgcaaaaggcagcatttcatcttgacctcagccttcaggttggggagaatgttctttttaaataccagttcatttgtcttttgatattaaagctctttatagagagtctggaaactgtaggcgattgtcgagaagagaaataaaaatgagctgttatctagatccatggcaaagcagcacaaaaaaa

SEQ ID NO: 646710 - DNA, 360 bp, Homo sapiens
tactggagaggatgtcctgtctccccaccaccaatgactacttcccgcacttcgacctgagccacggctctgcccaggttaagggccacggcatgaaggtggccgatgcgctgaccaagtgccgtggtgcacgtgaacgacatgcccaaggcgctgtccgccctgagggacctgcacgcgcacaagcttcgggtggaccgggtcaacttcaagctcctaagccattgcctgctggtgaccctggcctgccacctcccggccgagttcacccctgcggtgcacgcttccctggacaagtccctgggtactgtgagcacggtgctgacctccaaataccggttaagctggagcctcggtaag

SEQ ID NO: 646711 - DNA, 626 bp, Homo sapiens
ggattacagatgcccaccaccacacctggctaattttttgcagttttagtagagacagggtttcatcatgttggccaggctggtctgaaactcgtgagctcaggtgatccacttgccttagcctcccaaagtgctgggattgcaggcatgagccacccaaccagtgagagatttatttcctataaagggttgtagcctgcagggttgtccttctgacaggctgggaagcatagcctccagccagaagccagaaacagactcttcaaggaggaggtaaaggaaatagcaatttatgctgactggaatggccaaatacatttatttaataagctccaggaggagtcatgaatatttatggaaggagaaatgcatgcatgcacaattgagtttctggcttcttcatgggtcccatgtacaaaaatggcagtgttagcatgatcccagggttgagttttcagccctctgacattaaaaggtgaagcagaggacatgaaaactcgctctgtgcatcctctgtacggtggccagaacctctctgttgtgggtggtctcttatcaggcaaggaaggagaggttgatatcggtagtggaggctttgaaagggttgttctgttaaatccttaggt

SEQ ID NO: 646712 - DNA, 514 bp, Homo sapiens
  misc_feature (13)..(13): n is a, c, g, or t
  misc_feature (17)..(17): n is a, c, g, or t
  misc_feature (100)..(100): n is a, c, g, or t
  misc_feature (118)..(118): n is a, c, g, or t
  misc_feature (120)..(120): n is a, c, g, or t
  misc_feature (144)..(144): n is a, c, g, or t
  misc_feature (182)..(182): n is a, c, g, or t
  misc_feature (205)..(205): n is a, c, g, or t
ggcggtgggtccngtgntgtcacgggataatcgcccgaatttccttaatttctagaggatcttccattctctacatgctccaaaaattgagctagggacnctcctactgactctgggngnccgcttactctatactaaatcggntaagcctgacagaagggaaactacgtctctctaacctngtgcaaatccttaacaaattttngcaatcaatgcatatgtgtaaaagatgatatattatgaccagtgggatttattccggtatgcagactgattcaactttgaaatcattatgtaaccctcatatcaactactaaagaggaaaaaatcatgattgtattaataggtacagaaaaagcatttgacaaaatccaacactcattcaagataaaaatgctcagtaggccaggtatgcatgtaatcccagcacttttggaggccaaggcaggaggatcacttgagctcgggagtttgagaccagcctgggcaacaaaacaagaccccgtctctaatt

SEQ ID NO: 646713 - DNA, 987 bp, Homo sapiens
ggggtaaacatggagaccagtgaagccgagtgaatgggggctgaaatgctgcgacgtactttagctgaacgagggggggccagatggtggaggaatacacttatggtatggaaactgtctatgagttcttcttgaattgccagttttcagcctcctcatgcctccgtctcctttaacgacagggtagatagtggcactatctaggcccgtccgacctcaggatctcggacctttgtttagactctagttaccttggctctgccaacccaggcagtaacagccaccctacctgtcatacgccaccaccgaagtgtccctcaatgctgcgaatctgacagtatatgacctcataccagcggctctgcccgcatcgctgaattgtggatgcagcagtgccagcaatgcatgcaacagatggcaacactacagacaaggacaatcaggcccaaacccaagccatagccgcatggcacacaccacacaatgccatcggaaccatctaccacctgacccatgactaaaccacgagtgggtcaaaacaacataaatggagaacgtacaggacaccactagaagatccaatcaaaggagagcggtgggagcaggcccatggagataaagggggaaccccaccaagagcagactagacacaggcagtcaacaaaatacatgctacgccacaaagagaacatcggacaacagaaaaattgaccaaacatgcaagacaagaagaacacctgaccgaaaaccagggcccatgagaactcaatcgaacatggagggccaaacaaagagagctaccaaaaaagaaattaacaatcaaagtgacagtggccaccatcaaaccagtgcccgaatcgcaaccagcaggcgaacgaagagaatcaaggaaggaaaacaaagcacaaaaaacaagaataacccgaacagacaacaagaaaaaaaaccagaaaaaactagaacaaaaaaaacaaaagacacagagaa

SEQ ID NO: 646714 - DNA, 126 bp, Homo sapiens
aacttgtgcagatactttattaccataaacatataatactcctgaatagtttcccaattcgtggggcactctagggagcaaagcaaatgtttcaatttttgtttacaaaagtatactttaccaatt

SEQ ID NO: 646715 - DNA, 475 bp, Homo sapiens
acacatatcatatgtcatcaggaaagctcattcagagattcaatgctcagtgcttatgtatgagtgctggtagtgcaccctctgactagatggtgtgccaatgctatgcagtcccagaaggcaacagcatacaaccaaattgactgcacacattgcacaggcacagtgagctaccctgatagtatagggaaagtttcatgtggctgtagggaacagcttaccagtcaatgcccaaccttgcaggcctcaccttctcaaagcatagtcatctctggcctgccatgtctactgttttcagcacagtcagccaccaaccttcatgcatgcactgcactatgcagcacacagcaataagcagcatcatagctgatgccacaaaactctattcttttaaaggcaggtggttcagtgccatcttgtggccccgaggcctctgagcaggaaggtgtgctcaggatatgcacattcatttctg

SEQ ID NO: 646716 - DNA, 258 bp, Homo sapiens
gtagatgtggcacatgtatgtgtcagcaagtctatctctttgcaaactcagcatctgggattgtaaataggatacgactaactaggtgtcaaactattacataaagccctccaggtgaaagtgggatatcttcagtctaactgatatatcttactgatagaatttcacacagcaaatttctcataactgatcatccatgcacaaagtttcccacatgtgtaacaaaaatgcaacaactcaaaacagtcataagaactg

SEQ ID NO: 646717 - DNA, 171 bp, Homo sapiens
agctgatacaacttcgacgctcggtacccgaaactggttcgcggtgttccgctggtgaccacgtgtgttactggcgacgcgtgactgcttccacctactttttgccgccgggcgtgaccttcgaccaacgctgggggactccttctacgacgtcgtaccctgcacggcatg

SEQ ID NO: 646718 - DNA, 915 bp, Homo sapiens
ccgttggtcccaccaagacaagaaagtgtcttcccccgtgcagcaacatccccgcgtgtcgataaattttctccgccataccacattgtgtcggctcatcatgaccctcctccacatgtaatttcttcctcgccgtttatttccaatacaaaagcattagttgcacacccgccaaccccctcgttgattttcattctgtcccccgcgctcgctctcacccccactcgcagttccgtcactctttttcacaaccagcgctcaacaaattgattttcctcccccccccctcgataaaacttgtgggtgttaaccacacgaacactggcgggagacaactatcacaatatctcttctcctctcccactcaatctaatgcctcataattacgtgaatgttccccccccccccccctactgattgaacttgtcctggtacaccaccctctcccctctctcaccaccgctcgcctggttactttccaaagtgctctctctacctaactgacgcggacaccacacactacacttctatgtcaacaacacaccatgttgtcgcaccactagccttttctgaccactccttcattagggattcaccacgcaagacaagtttagacccctcccaaactactctcatctctaggcagtattattcttcttcgcggcatagatgaataacatggtggacagcacaccacgcgatggatagattccactgaaagcggctcggcacaataggtcacgcaagatttcaagaccacccaggtgttgtggacgatgatgaagtcccaaaacttgttgccgccaaaaacacgtagtagtgctgtttcagggcacagccggggaagacgttacgtcgatttgtgacacccgaaggcgtgccgcccaaaaattaagatccccccccacaataaca

SEQ ID NO: 646719 - DNA, 437 bp, Homo sapiens
  misc_feature (437)..(437): n is a, c, g, or t
ggcacattatggccgggtggtataatacgcctcacactcattctcaacccgctgacaagcttcatctgcctacgacaaacagacctacaatagctcattgtatactctacaatgagccacatagacctcgaagggacaggcattctcattcaaacccgctgaagcttcaccggcgcagtcattctaataatcgcccacggacttacatgctcattactattctgcctagcaaactctaactacgaacgcactcacagtggactgataatccgctataaggactttctttactaccactaatagctttttgatgacttatagcaagcctcgctaaccattgcttaccacccactattaacctactgcgaagactctctgtgctagtaaccacgttctcctgatcctatgactatcctacttacaggacctcacatctn

SEQ ID NO: 646720 - DNA, 250 bp, Homo sapiens
aagagggagtgaacaggaggaagcacgcaggcgaatcgtaatgaggcgtgcgccgccggtatgcactgtacattgctcacgaacgtcatgcctctacttatttcactctctctctatgcctgtttaactttggaagatgcatcagaggtaggatcaagtttaagatgactgtgctgcccctgtcacatcgaaagaactactgacaacgtagggccgcgcctgcctttcccatctcgtctcttctcttgta

SEQ ID NO: 646721 - DNA, 108 bp, Homo sapiens
gtaagtgaattgtcatcgtttcaggcatcgtaggtcctttgttatggcagcagcacgctgacccgtgtcctgggtggccggagcgcgggaatcacctaagcttcaggc

SEQ ID NO: 646722 - DNA, 372 bp, Homo sapiens
acttaaaaacgtttctgtaatactataacacttgtaacctgtggcactggtacgttagtcccttaatctcgacatctgctgctatgtatcatcttcagttcctatgttaaacatacaccaacatacatagagttctgatgtacatttatttgttcattttcaagctggaagcataccattccttatttattttatgtatacagcacctacatttttatgcctcttgagcgtataagaaacagagcaatgtttctcactgtgcacaatctccatcaatatcatcaatatgctgatttgcaggcctattccagactcactgaaattctctcacattgtactgttcgtcaggtgctctgcatttttaataagcag

SEQ ID NO: 646723 - DNA, 134 bp, Homo sapiens
  misc_feature (130)..(130): n is a, c, g, or t
gagaggtggcccgctatgtgacttcaaccccatgagcagcaatgcagtgcaaagatgtgtccgcctgcgctcggtgctcagtgtcctgaagcagacgccactgtcccgctaggtgcctgctagtgtgcantgcc

SEQ ID NO: 646724 - DNA, 212 bp, Homo sapiens
ggctcgagcggctcgtctttaaatagcctcttgggagttcccattgtacgctcagagggttaaagatgtagacgtgacgtgccagtggacctgatgcagagtgagcactggggaaaaggtgggagaggaggtgacagagggggaagactagagagaggagggccctgcaggcccagattattctcctaggtgggatggaagtcggaggatgt

SEQ ID NO: 646725 - DNA, 184 bp, Homo sapiens
  misc_feature (29)..(29): n is a, c, g, or t
gtggggtggaagaaagtggggtgggacgncccaatgaaatctagagtaaaacccaagtgggcccaaggtttcctgcaggctgtaatgcagtttaatcagagtgccattttttttttttgttcaaatgattttaattattggaatgccaatttttttaatatgcaaataaaaagtttaaaaactt

SEQ ID NO: 646726 - DNA, 330 bp, Homo sapiens
acgacggcagtgtattcgacggcagatgtaaaccgacggcagatgtaaaactgacggccatctgtaaactgactgccagtgtctaaactgacggccatctgtaaaacgctagccgttgtcaaccgactgcccaagtaaattgagtgtctttgttaaacgtgggtctttgttatgttgcgcaggctgttctcaaacgcctgattcaagcgatccacccatctcagcctcccaaagttctgagattacaggcatgagccactgcgtccagtctgaagcacattatacttaattgatagtatggctacctgcccacagttggtgtaccgagct

SEQ ID NO: 646727 - DNA, 181 bp, Homo sapiens
ttgacatcgggcttgtgcgcagagatagtcagactgtgctgcaggcagttcatcgcatctggatcacgaccctccctagttatgctgagacactgcggctcccagctccatgctgtgctgtgctccgcgtctctcatgcagaggaggaagagcgggtaccccctgaggatgatgagtactc

SEQ ID NO: 646728 - DNA, 759 bp, Homo sapiens
tcccccgggctgcagggaaaaagttaacactcctatacaaacataaaaattcttcatgaaatattatattaaaaaacaacaaagtaacccagtcatctcaaaattgacatctatgaattccagaaaagttaagagtgatgttaaaactagagcagtgaggggaagctgaagtagaaccattcccagggaaaagaaacagagttaggccttcataatgagggacatgaaggagaatcaaactccatctgcagaagacgggaagctagacgccaggctccaaagaagagccaaggttcatacatgactgtccacagtgatgtcataagacatttatcaaccagtttataaagaagactaggactttccttaagggttcagaagtgaataaccttcttccttactgaatataaaacagaaaccaagaggcagcatgggatcacaggaggagaaatcttgcaagaaaggagccaaaacccaagaaagccgacgcatagaataaagagtcccgctaacatttctgagccaccacatcaagcccgaggatactgaattcttctcttctactttcccttctgcgatggcaaagtttgagaactgcttaaaaatactgcttaaatagcggggattattataatccattttgcagagctttcatgttgatgaattttttcctttaaggggagcttacttggtttgctcctacctaaggtttcacgtaatcttggccatgttatttgtgcagcgcctttaacatgtttc

SEQ ID NO: 646729 - DNA, 94 bp, Homo sapiens
tcaagatgaagctgacagactagggaaagtgtatgataaatacatgtgcagctttctgttcaacttgaacaatgattttgtggtggatgcagcc

SEQ ID NO: 646730 - DNA, 904 bp, Homo sapiens
ctcgcgaggcggtctcctgcttctaggatgaagctgaacatctccgtcccagccactgggtgccagaaactcattgaagtggagcgatgaacgcaagacttcgtagtttctatgatgaagcgtatggccacagacagttgctgatgacgctctgggtgaagaatgtacaggtgcttatgtggtccgaactcagtggtgggaacgacacagatcaaggtttccccatgaaggcatgctgtcttgacccatggccgtgtccgtctgctactgagtaaggtgggcattcctgttacacgagcgaacgagaactggagaacagacagagaattatcagcctcgtgtgttcgcagttgtggactgcaacatctgagcgtgctcaaccgttgtgctagttgtaagaatacaatggatgagacaggcatattcctggactgtactgatactacaagtgcctcgccgcctgggaccccaaaaagagctagcacgaatccgctaaacttttcgaatctctctaaagaagatgcatgtccgccagtatgttgtaagaacagcccttaagagtaacagaaggtaacgaaacctaggacctaagcacccaagattcagcgggcttgtaactccagcgtgtcctgcagcggaaacggatggcgtattgctctgaagaagcagtgtaccaagaacaaattacagacgaggctgcagtaatattgctgaaactttagggccgaagagaattgaaggaggctcaggagaaagcgccagggaacaaaattgcgatgagacgcagactttccttctcttgcgaagcttctagcttctatggtcgtggaatccagtcagaaattaagaatcttggggtaaccaagtaaatccgattctgactctggaaaaaggacaatagaca

SEQ ID NO: 646731 - DNA, 124 bp, Homo sapiens
acgcaaggattctgcgcacactcagcctgcagggagccgtgttaggaggcgtcgggagaaatcaggctctcggtggtcactaaaattcaacgtgaggtacgcagtacatgacgcccgatgcaca

SEQ ID NO: 646732 - DNA, 695 bp, Homo sapiens
cactgccacttctactcagaggccacttaggaaccttgtgtcctatctaaagcaaaagcaggcagccgggcgtgatcagcctccctcgtggagggcaacaaagacagaggcaaaacaccggggtcctgcgatgccttcccaccttgtgagttctcccagcagttcctggattccccggcacaaggcagctggcacaaatctgaagacagattacctggtcatgatcattgtccgtgggtttaggttttcagataggagttaggtatgagaacaagaagagagaaaacttggcgctgaccctgttatagtggttatagtggtgtccctaaagggacggaaactgactgttcagcgaatacatctggcttcgaactagctggcactgtaagcatatcggacatgtcacacagctctaatggacctttttgaagacgaagttgtggctatatgtggacgttctacagtgggcctctgatggaagaaagctaatctgtttagtatttgtgcattttactaaaatggcagcttaaagttgtgtatctgctaattgtgatgccaatgccggtgttttaagtggaacaaaaatgacctctctggatttgtgctgtgtacacaagatttctggaaaagtaaagaacaaccctttttatggcttacacagcttaagagtatactgtctctgcaaacgtgcgcta

SEQ ID NO: 646733 - DNA, 220 bp, Homo sapiens
acagaaggtctgcggccgatacctccagcagcagctggatgctactaactgtctgggcatctgcgagtttggggaacagcaaggcctgctaggggtagctgccaaagcctgggctttcctgcgggagaactttgaggcggtggcccaagaggatgaattcttgcagctggcaagagaccggctggctacctgtctggccagcgacctgctgcaggtacct

SEQ ID NO: 646734 - DNA, 104 bp, Homo sapiens
gtcaaagggtggaatagtgggagctgcccacatgctgcagatgcactcgaatcatagtgtaagtcacagggctggctcgggtccgacactttgatgggcaggtc

SEQ ID NO: 646735 - DNA, 527 bp, Homo sapiens
ggggcttctttttgaggaagacgcggtcgtaagggctgaggatttttggtccgcacgctcctgctcctgactcaccgctgttcgctctcgccgaggaacaagtcggtcaggaagcccgcgcgcaacagccatggcttttaaggataccggaaaaacacccgtggagccggaggtggcaattcaccgaattcgaatcaccctaacaagccgcaacgtaaaatccttggaaaaggtgtgtgctgacttgataagaggcgcaaaagaaaagaatctcaaagtgaaaggaccagttcgaatgcctaccaagactttgagaatcactacaagaaaaactccttgtggtgaaggttctaagacgtgggatcgtttccagatgagaattcacaagcgactcattgacttgcacagtccttctgagattgttaagcagattacttccatcagtattgagccaggagttgaggtggaagtcaccattgcagatgcttaagtcaactattttaataaattgatgaccagttgttaaa

SEQ ID NO: 646736 - DNA, 1149 bp, Homo sapiens
  misc_feature (605)..(605): n is a, c, g, or t
gtcaaacattgatttgggtatacttattctcttttcttcttttcttgggtaactattagaaaacacccacagtgctatttattctccgagggtgtgcagagtcattctagtaatttctccaaatgtggctcaccgagaactcagagttgtggagctcaaaagaaacacgtgcaactatgtgggcctctcgagatgtggggttctatacaccagaattctaaattgtgctgaatctacaaatctccattgtgggcgcctgtgagtgagtgtgccctgtgtattaggtctctaataagtctctcataagctgcgcatccagcggcgtctctctgttatatcatatgtgaaacaccccgctttataaaaagcgtgatgtctctaatatctcccctagtggggccgtctccatacatttttgcgccgggggcttctctcttctacaacaagcggggcggagaacattattaccgccctcttgttcgtaccacgcacggaaacaggggggatccttcaccgaagaggaaaatcttccatgctcttcctgctgctaataacaccaggggcagaatctttcataggaggcagaaggtgggccccgcctgggnggtgtggtacattacctaacgaagagagaaagaacacacaatatcatgggtggtctgctcacacaccgacggttggtcgatcaagccccaaagcctcgggtggggcatcattgttttacttcattcaacaactacatgaaattatcacgccctgacttggtagtgcacgctctcctctgctacttacatcaaataatcagtgcttatattgtttcaccccccagatgtatctcaccgcaccggacggaggcacctcaactctttcaacccaggccgccccgtcctttcacgcacaacccacaagcactgcgacgaaacgcaacgcaagacgacagccttggccttaactcgacaggcttgggcgcgcgcctacaatataacgcgctgttcatgacgacaaccacgcaaggtcgggctggtcggccgaccgtacaacaacttctctccacagatggtcacaccaacgaagagggggggacgacccactatgtgtcctagcgacacgacacgaacggggtgcctacacgtactgcttcaccgaaaa

SEQ ID NO: 646737 - DNA, 1406 bp, Homo sapiens
  misc_feature (533)..(533): n is a, c, g, or t
  misc_feature (535)..(535): n is a, c, g, or t
  misc_feature (537)..(537): n is a, c, g, or t
  misc_feature (539)..(540): n is a, c, g, or t
  misc_feature (547)..(547): n is a, c, g, or t
  misc_feature (550)..(550): n is a, c, g, or t
ggggcttctttttgaggaagacgcggtcgtaagggctgaggatttttggtccgcacgctcctgctcctgactcaccgctgttcgctctcgccgaggaacaagtcggtcaggaagcccgcgcgcaacagccatggcttttaaggataccggaaaaacacccgtggagccggaggtggcaattcaccgaattcgaatcaccctaacaagccgcaacgtaaaatccttggaaaaggtgtgtgctgacttgataagaggcgcaaaagaaaagaatctcaaagtgaaaggaccagttcgaatgcctaccaagactttgagaatcactacaagaaaaactccttgtggtgaaggttctaagacgtgggatcgtttccagatgagaattcacaagcgactcattgacttgcacagtccttctgagattgttaagcagattacttccatcagtattgagccaggagttgaggtggaagtcaccattgcagatgcttaagtcaactattttaataaattgatgaccagttgttaaacaaaananancnnacaaacnacnaccccacaacacaaatcaaataaacaataaaaaacaaaaaaaacgagcgcaccccccttcaatacacatatcccctcccggctccccaccaactctccctcctattcaccccaccactctcataccccatcaatcctacactttataactcaaccgactactcgttattacttacaataatacccagacgaacaaaatacagccacacaacaacgataagtagacagaacagaaacaccaaccatctcctgcacgaaataaaaacacaacataaacccaatcaaaaaaacacaaaaaagaaaaccataatcatattatgtaccaccctcatacacaactaacacaccaaacacttacccagacaacatcacctaaaacacaattttcaacatattatacaaaacctacacgaactacatatctaaaatataacccaaccacaacagtcccttttcggctgacacagcttaccacccaacaaccaactagcagatcgacacgagataaaataaatttttccatacacgcacaacggtaatacacacccataaaacgataattatatacattcatctattatcaatcatcatcaaacaattcatcacccactcccccctcccgcctcacctgccacaccacatacatgcaaaacacacaaaactctccaccccacacctcgaccaatccaacaccacaaaatcacccacacagatctaagcaccagactaacacacgcacgtctaaccccaccactccatcgtcacccataacattctctgcatccagcactgcgagacaccgcaaaaagtcatctaccacgagcaaacctgtagtcacacatctctagctctctgtc

SEQ ID NO: 646738 - DNA, 1001 bp, Homo sapiens
ggggcttctttttgaggaagacgcggtcgtaagggctgaggatttttggtccgcacgctcctgctcctgactcaccgctgttcgctctcgccgaggaacaagtcggtcaggaagcccgcgcgcaacagccatggcttttaaggataccggaaaaacacccgtggagccggaggtggcaattcaccgaattcgaatcaccctaacaagccgcaacgtaaaatccttggaaaaggtgtgtgctgacttgataagaggcgcaaaagaaaagaatctcaaagtgaaaggaccagttcgaatgcctaccaagactttgagaatcactacaagaaaaactccttgtggtgaaggttctaagacgtgggatcgtttccagatgagaattcacaagcgactcattgacttgcacagtccttctgagattgttaagcagattacttccatcagtattgagccaggagttgagagtctttctctgtcacccaggctggacgtgcactggcgtgatctcagctcactgcaacctctgcctacctgggttcaagtgattctcgtgtctcagcctcctgagtagctagagactacaggtgtgcaccagtgtacccagctgattaaagaataaatgtcagagactggggtaatgccactatggccaggctagtctcgaactcctgagctcaggtgatacacacacctcagccactctcccaactgatacattctgtgacactcccttgaccttctgacacaagaaagtgatattgcagtaatgcatacacttgaacaagtgtgggttattaacacgagcccctttacgcattgtgcaacattcccaacgaaacgcacaagagttagagagagacgatacgtgattcatctaccgcaccccacgcgctacagcgatgtgcaacgagtaacaccgatcaactccacgggtgagcccgagcgattcaacgcagagtcagaaatatatgcaggcaattgcgaacgacgatatcaagaaa

SEQ ID NO: 646739 - DNA, 864 bp, Homo sapiens
  misc_feature (399)..(399): n is a, c, g, or t
agcggagggggcggctgcacgcgcggagcgccgggtgcggccatgcggggatcgggcccgatccctagcgccgaccccgaggcccaaagcgcgatgccggagccacgagacgagagacccgagtcgcgagcccgagcagcagagctcccggtgcggctggcggctacagccggcggaggcggcgggcgcggggcgcgctctgaggcccagggggatgcgccaggcgacatcgaccatgggcgccgccgccatccaggaggagggcgctgaggagcgaggtgatgtcctcggtggcggcctaaagtgtcgcccgagtcgttaggacgagtacctgtcccagcagttcgcacctgttagaatgcgagaactggtcgcaggatcaggctgcttggcgtgatngctcttacttcttgggcacactgaccaggggtgcgccccgaagattgcatggtcgggcgcacacccagaagagctagaggcgtcgcgtacctgtcacactccggttgctccaaaacaggcatggcgtactggacgtgggcaagcgcgtcgtcgagaatggacgcctcaaggaagttaaggcgcacgacccccgggatgggcctgtatgggccgcatgccaggccccttcgaaggcttggttaccacacattcgtgcccggcgcgtgcaaagccccgtaggctccctggacttgtggctcattggcccccttgactggctgggacagcgcgaagcttggaggccttggacttgcgtttgggtggaaacggggggggttggggccgtggcctgccggggccacggcgctcaattccattaccatcaaggggccaaggccccttgactgcggcccagggtcctgggtg

SEQ ID NO: 646740 - DNA, 110 bp, Homo sapiens
cagagtgatagagtatctactgtgccaattacccatctaccagcagcaatatgagagttccagttgctctacaaccttttcaactcttgatattctaagctttttgtcgt

SEQ ID NO: 646741 - DNA, 610 bp, Homo sapiens
ggggcttctttttgaggaagacgcggtcgtaagggctgaggatttttggtccgcacgctcctgctcctgactcaccgctgttcgctctcgccgaggaacaagtcggtcaggaagcccgcgcgcaacagccatggcttttaaggataccggaaaaacacccgtggagccggaggtggcaattcaccgaattcgaatcaccctaacaagccgcaacgtaaaatccttggaaaaggtgtgtgctgacttgataagaggcgcaaaagaaaagaatctcaaagtgaaaggaccagttcgaatgcctaccaagactttgagaatcactacaagacacaagcgactcattgacttgcacagtccttctgagattgttaagcagattacttccatcagtattgagccaggagttgaggtggaagtcaccattgcagatgcttaagtcaactattttaataaattgatgaccagttgttaaatactcaatttagatcttcttggtttcttttcacctctcattactcccctactcccagttccgtgttatgcggactgttacttctacatcttatttattttttttggctgttgtaggtccattatttaaataacttct

SEQ ID NO: 646742 - DNA, 350 bp, Homo sapiens
ggggcttctttttgaggaagacgcggtcgtaagggctgaggatttttggtccgcacgctcctgctcctgactcaccgctgttcgctctcgccgaggaacaagtcggtcaggaagcccgcgcgcaacagccatggcttttaaggataccggaaaaacacccgtggagccggaggtggcaattcaccgaattcgaatcaccctaacaagccgcaacgtaaaatccttggaaaagctgacgagttgaacttgataagcttactacttggtatgagaacttaagtatacacagaccagcagttagcgggaagaggttacaagatctatgcagcaggcaggaattacgacggggt

SEQ ID NO: 646743 - DNA, 103 bp, Homo sapiens
acctatcttcgatctcgccggaggaggagaccccattctataccaacacctatgctgatttttcggtcacccgtgaagattgccctgaagattgattggctgg

SEQ ID NO: 646744 - DNA, 515 bp, Homo sapiens
  misc_feature (24)..(24): n is a, c, g, or t
  misc_feature (42)..(42): n is a, c, g, or t
  misc_feature (81)..(81): n is a, c, g, or t
  misc_feature (155)..(156): n is a, c, g, or t
  misc_feature (165)..(165): n is a, c, g, or t
  misc_feature (214)..(214): n is a, c, g, or t
  misc_feature (217)..(217): n is a, c, g, or t
  misc_feature (232)..(232): n is a, c, g, or t
  misc_feature (291)..(291): n is a, c, g, or t
  misc_feature (298)..(298): n is a, c, g, or t
  misc_feature (310)..(310): n is a, c, g, or t
  misc_feature (313)..(313): n is a, c, g, or t
  misc_feature (351)..(351): n is a, c, g, or t
  misc_feature (358)..(358): n is a, c, g, or t
  misc_feature (386)..(386): n is a, c, g, or t
  misc_feature (410)..(410): n is a, c, g, or t
  misc_feature (482)..(482): n is a, c, g, or t
  misc_feature (499)..(499): n is a, c, g, or t
  misc_feature (503)..(503): n is a, c, g, or t
  misc_feature (505)..(505): n is a, c, g, or t
  misc_feature (513)..(513): n is a, c, g, or t
ggggggaagaagaaaaccttcccncccaaccaagaaaaaagnaggttctcaaccggcctaaatgtttctttaaaaacttgnctggggggcccaaagtgggagagagagagaaaccgccctcatgactcacctggtcaggagatagggggccagannctgaccccnaatccccggcagcacccctagcaaataggtctgtatcaaagattctgtncanctggttttgggggtnaagggcacctatgggggcttaaataaatggacagggggcaagggatgtaacgagaacanagggtgnctgtccggccancancctgggcctctggcgccccttcattctgacccccggtnccacctncccactgtggcccgcgggactccccagntgggaaaggagggaaactctccancaagtctcggccccacctctctctgaacagatgggacaggaagacgggcactgggggctgggtggggcttancgcagtcctctccatcncctngnctggcgangg

SEQ ID NO: 646745 - DNA, 101 bp, Homo sapiens
atccacccacctcggcgtcccaaagtgctgggattacaggtgtgagccacaaagcccggcccattttcttcctctttggaggtaatggattggtttggaga

SEQ ID NO: 646746 - DNA, 2084 bp, Homo sapiens
ccagctttagctatgatgcagcaagcacagcagccccttaccttcattccttcttccttcccactttcaatcaattcatctattcttttcctttcttcagactgggcagagagaaagaaaaacagcatcagtatcttctcctaggcccatcgtgcgtagcttgatggtcttgagccctgattgcccaggccatgcccaccgggccacaatcggcctcatttggcatcactggggatgatgggtccccagtgatggcaaagcccccaagtatccctccttttctcatcacccatctgttgtggaagatctgtcacctggggttcaactggatcaggagggaaacagtggggacccaagaacagaatggggctcgtagatatgttctgttgcccatgcagcacgttaaaaaatgtccaacttgcccacacctgaaaatcaggcctctgacttcacagaaaatcaggtacagtgggccaggcgcggtggctcacgcctgtaatcgcaacacttcgggaggccgaggcgggcggatcataaggtcacgagttcgagaccagcctggcaaataggtaaaaccctgtctctattaaagatacaaaaattagccaggtgtggtaggagcctgtagtcccagctactcgggaggctgaggcaggagaatcgcttgaacctgggaggtggaggttgcagtgagccaagattgtgctactgcactccagcctgggcgacacagcaagactccaccttaaaaagaaaaaagaaaatcgggtacagcagatcagaggctgtgccctttggatgggacacacgcagtccacatggctctggtctgatggctcatacttctgtttgggatcgctgagattcacctgtatggaggccaccacgatggatgagaagagggcctccaatcccgagggtcaatacagacctgaacagagaactgggagggggcacccctggatccacctctcctctaaggccacccctcctgcacctacctccatccctaaccctgggttctactgctctgccactgcacagatactacagagcaaaagggaaccaaatgaagacagatcggaagctccaaaccagtgtggctcaccccaaaccagcatgtcttgacggcatagactttcaccaaaccagatggcacgtgtcaggagcctgacaccaactgctgagctcagcccattccccctacacagaggcccaaaccagcttgcagcttttccaggcactcaatccacacctgcaatgtgccaggcgctgcagtctgtgctgggaacaatggtgaatgagtaacctcaaggacagtcccaaatcctgccacctcctctccatctccattcccactgcggccctgcagcccagccacggccccggccccgctccggcccccttgctagtcaccaggctttcactctgaccccagggaacactcagttctccacaaggtagccagaggggtcttttaaaatgtaaatgaggccaggggcagtggctctctcctgtaatcccaacacttcaggaaagccgggaggaaggatcgcttaaggacaggagttagagaccagcctaagcaacagatccagaccctgtccctacaaaaaataaataagctaggtgtggtggcgtacacctttggtcccagctactctagaggctgaggaaggaggaggattgctggagcccaggaggttgaggctgcagtgagccatgactgtgacactgcactcctgcctgggcaacagagtgagaccctgtcttaaaaaaaaacagaaaacatgaccaggcatggtggctcacgtctgtcatcccagcactttgggaagctgaggtgggtggatcacttgaggttacgagtttgagaccagcctggccaacatggcgaaaccccgtctctactaaaaacacaaaaattagctgggcgtggtggcacacacctgtaatcccggctactcaggaggctgaggcaggagaatcgcttgaacccaggaggtggagtttgcagtaggccaagatcgcaccactgcactccagcctgggagacagagcaagactccatctcaaaaagaaac

SEQ ID NO: 646747 - DNA, 430 bp, Homo sapiens
cgatgggctcagatcatatagatcacttctaagccatgtacccgagagacgtccacaaaggctgagttagtacctggtcctatggtctcacctgtgatataatagatatgtttctggttctccttcattctaggtgcagttgtccttgagagaacacatctcatcaccagaggcagatgtgtagtaccttaccagctctgaaaagcttcttccgatattagagagtcttcgtgtattccaagctttatgttaatagagaactgctcatagaatttcttgtagttctctttatcctccggcagttcagtcaagagttctaagcattatttttgaccaaattcttcctgataactttcaaataatagctattgtaagcaacatactcacggggaaatgttatgagggagaaaagaccctggggtaaccgaag

SEQ ID NO: 646748 - DNA, 217 bp, Homo sapiens
ctgacctcaagtaatctcagcactttgggaggctgaggtggtttgattgcttgagccctggaattagagaccagcctgggcaacatggcgaaactcggtctctacgagaaatagaaaaattaggtgggtgtggtggcgcatgcctgtaatcccggctgctcgggaggctgaagtgtgaggagcacttgagcctgggaagttggggccacagtgagct

SEQ ID NO: 646749 - DNA, 131 bp, Homo sapiens
ttaggatccggatatttggaaaacacgattcagccttccatgtgcctgttcccaaattccaatgaaacacaggatggtgagcagcaagagaaccctgtgcaggaccccgcttcttctctacgcgtgcctca

SEQ ID NO: 646750 - DNA, 261 bp, Homo sapiens
  misc_feature (217)..(217): n is a, c, g, or t
  misc_feature (255)..(255): n is a, c, g, or t
gctcacacctgtactcccaacactctgggaggccgaggtaggcagatggcttgagcccaggtgtttgagaccagcctgggtaacatagtgaaaccctgtctatacaaaaaattagctgggcatagtggtatgtgcctgtagtcccagctacttaggaggctgaggtgggaggatcacctgagcccagggaggtcgatggttgagtgagccatgtgcngctcactgcactccaacatgagcaacagagtaagacanctatct

SEQ ID NO: 646751 - DNA, 163 bp, Homo sapiens
ggtagtttattttattttttaaaaataggtcaggtgcagtggctcacacttgtaattcctggcccaggtgggaggatcacttgaggccaggagttcaaggctgcagtaagctatgattgcaccattgcactccagcctgggtgacagagcaagatgtcgacgc

SEQ ID NO: 646752 - DNA, 1027 bp, Homo sapiens
  misc_feature (1)..(1): n is a, c, g, or t
  misc_feature (84)..(84): n is a, c, g, or t
  misc_feature (99)..(99): n is a, c, g, or t
  misc_feature (154)..(154): n is a, c, g, or t
  misc_feature (164)..(164): n is a, c, g, or t
  misc_feature (184)..(184): n is a, c, g, or t
  misc_feature (246)..(246): n is a, c, g, or t
  misc_feature (294)..(294): n is a, c, g, or t
  misc_feature (316)..(316): n is a, c, g, or t
  misc_feature (325)..(325): n is a, c, g, or t
  misc_feature (327)..(327): n is a, c, g, or t
  misc_feature (334)..(336): n is a, c, g, or t
  misc_feature (340)..(340): n is a, c, g, or t
  misc_feature (353)..(353): n is a, c, g, or t
  misc_feature (372)..(372): n is a, c, g, or t
  misc_feature (378)..(378): n is a, c, g, or t
  misc_feature (394)..(394): n is a, c, g, or t
  misc_feature (406)..(406): n is a, c, g, or t
  misc_feature (419)..(419): n is a, c, g, or t
  misc_feature (446)..(446): n is a, c, g, or t
  misc_feature (450)..(450): n is a, c, g, or t
  misc_feature (463)..(463): n is a, c, g, or t
  misc_feature (466)..(466): n is a, c, g, or t
  misc_feature (487)..(487): n is a, c, g, or t
  misc_feature (515)..(517): n is a, c, g, or t
  misc_feature (527)..(527): n is a, c, g, or t
  misc_feature (564)..(564): n is a, c, g, or t
  misc_feature (568)..(568): n is a, c, g, or t
  misc_feature (580)..(580): n is a, c, g, or t
  misc_feature (582)..(582): n is a, c, g, or t
  misc_feature (596)..(596): n is a, c, g, or t
  misc_feature (617)..(617): n is a, c, g, or t
  misc_feature (624)..(624): n is a, c, g, or t
  misc_feature (634)..(634): n is a, c, g, or t
  misc_feature (858)..(858): n is a, c, g, or t
  misc_feature (874)..(874): n is a, c, g, or t
  misc_feature (883)..(883): n is a, c, g, or t
  misc_feature (934)..(934): n is a, c, g, or t
  misc_feature (946)..(946): n is a, c, g, or t
  misc_feature (965)..(965): n is a, c, g, or t
  misc_feature (967)..(967): n is a, c, g, or t
  misc_feature (997)..(997): n is a, c, g, or t
naaagaaaagaaagaacaaaaaagaggcaggaacggtcggaattccggggtatccggttaccggtccctcgctcgctgctcganagcccagactcggcnctggcagtggcggctggcgattcggaccgatccgacctgggcggaggtggcccgngccccgcggnatgagccggtgaccaagctnggggccgagcgggaggcagccgtggccgaggagtgtgaggaagaggctgtctgtgtcattangtgtgcgtcggtcaagtataatatccggggtcctgccctcatcccaanaatgaagaccaagcaccgaatntactatatnancctcttnnncatngtactcctgggcntcattgccactggcatgtntcagtnttggccccattctatngagtcctcaaangactggaatgtanagaagcgcagatccgtgatgtgccggnttgntaggctgccagcnganagtcccatcccagagcggggngatctcagttgcagaatgcacacgtgtnnngatgtctatngctgtggcttcaacccaaagaacaaaatcaaggtgtntatntatgctctgaanangtacgtggatgatntggcgtctctgtcagcaacancatctcncgggagtatnatgaactgctcatggccatctcagacagtgactactacactgatgacatcaaccgggcctgtctgtttgtccctccaccgatgtgcttaaccagaacacactgcgcatcaaggagacagcacaagcgatggcccagctctctaggtgggatcgaggtacgaatcacctgttgttcaacatgttgcctgggaggtcccccagattataacacagccctggatgtncccagagacagggccntgttggctngtggcggcttttctacgtggacttaccggcaaggctacgatgtcagcattnctgtctatagtncactgtcagctgaggtggntntccagagaaaggacaggtccacggcaatanttcttcctgtcatctcaggtgggtgtcatc

SEQ ID NO: 646753 - DNA, 417 bp, Homo sapiens
ccggtgtgagcatgccagcattgggagccgcctcctatcaggcagcaccataggtccctggctgtggctgtgcgcccagccctacggatgtggtacaggtccgattccaagctcaggcccgggctggaggtggtcggagataccaaagcaccgtcaatgcctacaagaccattgcccgagaggaagggttccggtggcctctggaaagggacctctcccaatgttgctcgtaatgccattgtcaactgtgctgagctggtgacctatgacctcatcaaggatgccctcctgaaagccaacctcatgacagatgacctcccttgccacttcacttctgcctttggggcaggcttctgcaccactgtcatcgcctcccctgtagacgtggtcgagacgagatacatgaactctgccctg

SEQ ID NO: 646754 - DNA, 350 bp, Homo sapiens
  misc_feature (227)..(227): n is a, c, g, or t
ccaaactcgaaggcttgaagggcgccgacggagcaacctgtcccagcgcgagcctatggcctttcccggcaaggttggcgagcagctcaacctgcgggaaatcgagcagttggtggaccagttgaatcgcttgccgtccaagcaggcacaaatggaactgacccccggcagccaggtgggcggcagtgaagtgcaggtcaagaacgtcccgcaaaagccctggcgtngcagccgtgtcgcgtaataacgacgggcagaaaagcaccggcgaacagcagtggggcgccggccttgagtgggacagccccctgcgctggccgaccagcttgtgttgcgcggcggccacgatg

SEQ ID NO: 646755 - DNA, 601 bp, Homo sapiens
ggcagttctgttctttgcataagatagcttgggtatccgggtctttgtaattccatatggttttaggactgttttttctatttctgtgaagaatgtcacagaatgcagtctacatatgcatagaatctgtagattgcattgggtagcatggacattttaacaatattgattcttccaattcatgaacatgaaatatctttccattttttgaggtcttcttcaatctcttttatcagtgtttcctaattctgattatagagatctttcacatctttgatcaagttgattcctacgtatttcactttatttgtggctgttgtaaatgggattactttttgcatttctttctcagattgttcagtcagcatacaggaatgatactgatttttgtatgttgattttacatcttgcaactttactaaatttgtttatcagttctaacagttttgatggcgtctctggatttttccaaatataagatcatatatctgcaaacaaggataatttgacttatcttcctgtttggatgcctttatttctttctgtggtctgattgtctagctaggactccagtactatattgacaatacagtgaaaagag

SEQ ID NO: 646756 - DNA, 1210 bp, Homo sapiens
ggaaaacaatccaacacttgttggaagtcctagaaggagcttgtccgcctcccggagaccgtacatacgggtgtgcgatacaccagcattgaatcggttggagagatgagtgaacgtcgtcgatcgaaatccgtcagttccattgaccctgttgtcgggctactttgagtgaaaggcctgtgtgcagaaagcccctggcttcctgcgtgcagccaagagccatggtcagtaacagtttgctcgtgtctgccgcagatcactatggcgtcagacgactttaatggcactccttggagaatatgcccgtctcccgtcgactctccattccgtgtcgtcgtccaagaacgctgctgttgggcttgctacaacagggacagcaactttgctcctaggcccgacttaccctttggactaaggagttaccgaaactgtactttaggtgaacctactggtcccctcgtcccacgggctaactggcccacttgcatagcagacacgcctgcttcggctctccccagcaaggccccagcgaactggcccattactccctaccaggactccgcgacccagccggctcccttctccgactcggcccttggccaccgtgcaatacttcgcaagggccatgtcacctccaaactccccccagtgggtcgcgcaccacacttgcgaccacgcatcgtccaatccccggcgggctccacccacaccacgcctcacttgcccatgggcactacataacttgggcccatagctcctctacttccgctggcaagaacttccttacacgcttacatggccaccccggaaggccttggacttacacctccggggacttcgctgacgcaaagcccgctctggctctcggccacgggctggcccttgcccgccctcttggcctcgcctcccgccttgcgtgctacgcgcgcccaacacgggacttcttggctatgccacacccttggcgtggcgccgcaccaccctaagcctcaaccaccaagcagtggagctgcacaccggcccgcaccccccccgctcaacgctccacgccacttcacacctggacccttccccggggacccatatggccccacggcaactccacacgctcgcccgccaaccgacccggggccaaccgcgcgcaccccccgcggccccagccaccgacccacacgtacacacccgctcatcaacccgcctccccccaccg

SEQ ID NO: 646757 - DNA, 258 bp, Homo sapiens
cgagcagcgcggaacccactcggggccgccgccagacgcacgggggggcggcggagccacctcgaggattgccaccagccaaaccatcccatgccagaccaggaagcagccgtcctacctcccagagaaacagacctcagccctaatgatcactcaaatccgagtcaatccctctatttaaaaaaagcgcggatatagtctcccctcccttccccagtcctcttggcgacagggcggtcacaggacatatgtgttctt

SEQ ID NO: 646758 - DNA, 311 bp, Homo sapiens
tatgttctctgataggtgcagagacagagtcttgccgcgatgacgtccgatcagaatagctcctctatgcggaacgtgcacttcgtgcccctaagcagaaatcatagggctgctcatctgccttgccgcaacttgtggccagtctcataatggctgccaatgcttcctcagcagtagcgactagtgacgaagccgtagatgtccccttggacacggaagtggatgggtgcactcctcaaatctctccaaaaatggagaacctctgtgtcagctctgatcgagtcatgcggccagggtatctttccaatgaa

SEQ ID NO: 646759 - DNA, 172 bp, Homo sapiens
gcatgtatggacatcatcacttaggaaatacagctgtccttatgcaatccatctcctaggacaggcttacattggtgtcttgtctttgctatatagctcacgacataatgtggtggctatggttggcagggtgggggagagttcctgatcttgttggagatattcatgttac

SEQ ID NO: 646760 - DNA, 889 bp, Homo sapiens
ggccctcaggcttccgaggagcgcacacttggagccagcttcctcagaacaactggaacccaccgtcacgttcctgtttacactcctgaacacctctgagcccactgagccagaagaccctgaatcaggactcggagatcctgggaggtacctagttcttacatcgagcgaggacgtggggccccgcacgccgtgacctcaaaggagtatcagtgcaatgcttgtcagatatgactgcagtgaggcttcgggagtccactgagcaccacccatgtgcacaatctggccctggggcgcagaagcttgctaagacatcttgctccatctttatttgtatacatgccgtccttgcatatggcatgcgcgagccctaggccatccagagaggaggcccatgccatccaggatagaagtgaaaggccctgacgagaggaaagccaggccctgaccgagaggtggctctgctcagtgacccaagacccccggaaggtcatggtctcctcttccaagctgcctgatgctgccccatcgacctagcagagaaccagggtctaggcctggcccaaggcccccatgccagagagtcggagcacctcctctgcggaggcctgctccttcagaccgagctcctcccatagatccgcagaagatatacttcggaacgcgtaagtaggaaccctgaagaccgggggcggcacccaaggctttatataaaagggggggggtggagcgacggatcacagttaggacggcccatcgggtgggccccaaagaaatcggccagtatgcagagattctattcttgtgtcacagccgggtgcgacccagtacgtggccggggccttttccataagtgcgagcctggggctggcatcccttgaaggacacg

SEQ ID NO: 646761 - DNA, 102 bp, Homo sapiens
actgaatgcctcagcctgacgtgcagagcagctctcccacagcgtggcggagttgaggagccagaaacagaagatggtctcagaaatgggatgcggctccag

SEQ ID NO: 646762 - DNA, 150 bp, Homo sapiens
ctgcgatccttttgagattggggaatacaaaggaataaaattgaaaacacctcacagtgatttgccaaatctttctgcaaaatccgctcctcggctattaacaaagacgactacctctctcggttccgcacgaacaacacgtctgtgtca

SEQ ID NO: 646763 - DNA, 123 bp, Homo sapiens
ccgactggtccggacagccaggggttaccgatcctgctgattcagccgtgggtgtccttgctgacaaagactcgacgaactttctggtcatcccagctgaaagtgctgtcgggctagtcgggg

SEQ ID NO: 646764 - DNA, 470 bp, Homo sapiens
  misc_feature (10)..(10): n is a, c, g, or t
  misc_feature (38)..(38): n is a, c, g, or t
  misc_feature (433)..(433): n is a, c, g, or t
  misc_feature (449)..(449): n is a, c, g, or t
ggggttgttnaagatggggatccaaaagagccctttgnatcaaggtccccagattggaaaaatataaatagcccttgtacctaaaagcccaaccctaagtacaggtttgactaactccttatcccaaaatgccttgggaccagaagtccttccagatttagaatttcagaatatttgcattctacttaccagttcagcaaccccaatccagaaatatgaaaaccaaaatgctccaacgagcatttcctttgagcatgaccctggagcactcaaaatgttttggatcttggagcatttagaatgtcagatttggcctggtgcagtggctcacacctgcaatcccagcactaaaggaggccgacgtgggcagatcacctgaagtcaggagttcgagaccagcctggcccatatggtgaaacccccgtctctactnaaaatacaaaaaaaantattttttttaattgcttcgg

SEQ ID NO: 646765 - DNA, 373 bp, Homo sapiens
gcaaagatacagcttccacggtgtggaaaccaccccaccgtgttgccaatgttggctgagcctgcttttattcccttatctggcaccacccacatcctgctgattggtccattttacagagagctgattagtctgttttacagagaactgattggtccgttttgacagggtgctgattggtgcatttacaatccctgagatagacacaaaagttctccaagtccccactagattagccagacacagagcactgattggtgcatttacaaaccttgagctagacacagagtgctgactggtatatttacaataccttggctagacataaagattctccaagtccccaccagattagctagatacagagtgctga

SEQ ID NO: 646766 - DNA, 803 bp, Homo sapiens
attggaaaggagcaggagccacttggtactaagccgtgactacctgcatgcattgatgaatcctaatgatagagatcgcgtaggcgtgatgctagtgagtaggagtgaacaagtaaatcgtgtgggatgggaagcatgctagttaatttttttatttgaaccttagcttgatcatagtgaatagtagctagagcatgtaggcctaaaaatagtgaatggagcacgggtgtatgattcttggtaatgatgctggtctgagggggatatgtggtgctagttgtgttgacagagtgtgaatgtcccttagatgtttcgattgtcgaggtggagttaaacggggtataagtgatgagagtagtgagaagcaatcagtatgaacttatgtgaaccatttgaggggtggggctgatgagaacatctctaatgtggttaaagattgcgtgaatagaattttgattccatggtatccaggaggtgtagaagatgtgaggtcttgttatcatggctttgcatcaaaagtagttttagactgcttgcttgcagtgggaatagtcacttgtctaatttagtgagatcgcattgctggaaccagcaatgaagtgtggaaatgttcttgagtgtataatttgatgcaagtaacggtcaggtggcatcagtggcaagctatgtgaaacactaactaatgggtgtactatgaatacccgttagattgatgtgaacggataaggctaggataggcacgtataagtattgggccaagcaaaccttaaatgtgtagaagaactttcagggttgcccttaga

SEQ ID NO: 646767 - DNA, 375 bp, Homo sapiens
gccttccctgccccccccctataggacttggacagaaacccgagggtcatcctttgactttttcctttcctctttacccaccccctacccaaaatgcccacccagttgcccaagttttgtcagttcaacctgctgagtgtcaggagagagcttcacttctttatcctctcacccaggataatacatttctgggttttgatatctaatgtgacattttaactgagtacctactttttttttttttgaggcaggagaaaggcatgaatccaggaggcagagcttgcagtgagctgagatcacgccattgcactccagcctgggcaacagtgttaagactctgtctcaaatataaataaataaataaataaataacaa

SEQ ID NO: 646768 - DNA, 456 bp, Homo sapiens
gcacgagctcgtgccgaattcggcacgagtataagaacatataggaagaatacattattcctatctagggcatcaaataattgcaaccacttaatgttaacttccttcataattcaaaacattatgttctatagcactatgtattttatgtcattatatacgtagtcaataactttatacgttttttttattgaacaaaagtaagaattgcttaagacataataagaggaaactcatcgaaccaattcaaaacggattatagatttatcataccagatacgtttatcaggaggcttgtataatggagcacagatataacgtgtttaatgatactccacgagggaaccattggatgggcagttctgtgtcaggatcaccacgtccatcttatagcagtcgtcctaatgtaaaccccccacgacgcttccaatatagtgacgatgagcccgctgagaa

SEQ ID NO: 646769 - DNA, 156 bp, Homo sapiens
cgttattacgagacgactatttctctgtcgtattatgtatctatatgtacaattttaaagttcttattttagtatacatataaatatcagtattctgacatgtaagaaaatgttacggcatcacacttatattttatgaacattgtactgttgctt

SEQ ID NO: 646770 - DNA, 1253 bp, Homo sapiens
attttttatttcaggggtcactgatggcttttaatttgggtagcagcaaaaccaccggggatatctatagccctgtgggccaccccgggaaatgcacagcgaggctccactatgagcctctagaaccatctgtggttgtcaatcgtgaggcgcagacaagagacaatcgatctggggcacattataacacgatctgcaagatgctaaggaggcgtgccaacgagggccctccgagggcagcactagggctctcgtgctagaaagttctcataaggaaagccggttacgaaacctccagcgggcgggtggggcgcttacacttagccgagggaaccccttgtcaagttttttgcggctcgggggggcgcccttcagaagccttggcgctgtgacgctgtgaccacgagagggggcgaaggaggcgtctgtggtgtatacgcccaaacagggcgttgcacccagaaaggggcttgtgcctgtgcccaaaaaggctttacacctttgtgcgcccacagggggggatccttctagtagaaaggttcaccccgtagcgcggggggcaaaaaaccttattagcgccccttttgcgttgccccccagaggtgtaccatttttatagagaatctcccgttagaggagcacgctaggggggttgtaggtcccttttggggccaaaagagcgcgccatcaaagaatttcggggccaaagggggggccacccacaagttctgttgtagaattcgtcggcccccgaagtggtgtcacacgaacggcctcccctcaacaaagagcccgatgggtgtatcagaggccagcgatcgcaaaagggggtaaactcctcagacaaggattacttcccccccgtgagaaaagcaggattggaagacaaccactacatattggagagggcgcccccaaagagccctatttgtggggccttgtgggggcgacccaaatactttgtcgacacacggccctttttgaaagaagaaagaactctcctgggggctccaaccgcggaggacgcccaaaaatcctggggggttctcgagccttcttagaaacccaaagtggcggagcacacttcgtttcgcaagggacccattccctcccgggttcaaccgaggggggcccctaggagggaaacccccatcttttagggggaggtcgagggcgacacctatgttggaggagtatataaatcccgccccagaaataaccagggggtaattcactcggaccagggcggtcgt

SEQ ID NO: 646771 - DNA, 764 bp, Homo sapiens
tgagccgtacttgaaaagcggtgttgttaggacactgctgttgttggtgcgagatgttctccacgtggtaccatagtaaggtgtattccatctacagcactcttgccgttaagttgatacgtctgcatgttctaacacgtgctatctggtgctccggggtggcgattgctcgacttgatcacacccacggtgttgacatggaacttcatcctagacatggagagtgcttgtccgtgtactggtggattgttgtgggtgcgtctcttgttactgtatcttcatagacaacgatttatgatatcttcgacgcattctatgatatcgattttctcaagatatgctcaagtagtgactagaatatacctgcatgacatatgtgtgacattctctgggcgtcttgtacgataccatccactgcgttctcttgcctctgttatacactcagcttcatccacaggatcgtagactttcctacttcgcgtgtgttaaacacagcaccgccctttaatactgtattgactaaataagtggtgactgcactgttgagcttcgggctcgcgaaagtaactcaatctcataacatgagaactcgtttccactaacttctcatgggtcataggtaccaagccttatactttgtgccccctcgtggggaggaatcctccaaaaaggggtgttctaatcccggcaatgtgtacaattggtgccccacaaggagaaataacagacacgcccggcgaggtgaagttccccaatgtaacgaa

SEQ ID NO: 646772 - DNA, 272 bp, Homo sapiens
tcattgtcatgttgtgaggacaattagaatgggctctgaatttccaattgtccttcaactgataaaattgctttcacatgctccgatatctatcccacgttattgctccctgctcttcttgcattctccgcctctcctcgattatttttatcggttcgggactcttgggatccccttggggtttgttttgttgagctcttcttgatcgatgtacttttccttaatcttcttttcttcttcttgtcaccatccttcttttcttcttcctcatc

SEQ ID NO: 646773 - DNA, 221 bp, Homo sapiens
agtgtctacagagcaaatctttagagtaggtcaggtaggaagccatttgccatctaagacgggctttatctctgtgatgcagagtgctttattacaggcagacataaagcggagaatggcagttctcccttcctgtctatacatcacgctgcattcactagagataaagcagcggctttgaatgcaacactggaaacatacccacaagctagaattttcaa

SEQ ID NO: 646774 - DNA, 928 bp, Homo sapiens
ggcttctctccgatggccatggggccgctcgccgtcctcctccccagccatgtcgtcgacgtccgccgcgttggtgctacatgctggggctgttgctcacttgccggcgcatcttctctggcggcgacgggggactctcgatagcattgagatgacggggaagactgatgtagcacagtactcctatagcactcgagtgtgatatacccttgcaagtccgccgttgtacctcccgaagagtagctacaatccagcgcattttttttctgcgatcaattgtggtctttgtgcagcgggacgtggcgttagcccgggtctctaatatgccccggcggtgggcaatatcgatatgtggccggtggctcttggaggtggcatcacgtggaggaaggtggcgcccggcagtctatggatcgcctataaccatcatggatgctgcatattctgagcgtatggtctgagggagggatgggggatttagctttgaatgtatctagcatttttgtattacctatatggcgtgatctatgtttggtgagcgtctaagaagcagcagactagtaaaaattgtaccagttaaggtgcatggaaaaaagccagaagatgaagggattctatccagcacgatcctgtccaagagtagcctgtgggattcggatccggtacttgtggacatgatgccttattgtgaggtgttccattttgcggggaaaggctgtacatgtgtgtaatgggttacgcttaagggatcaggaagataactacgtggtccctgggtggcctgggactggcgttagggaagagaacccgagaggttagagaggccaaatggggtggcaagatggggcatcgggtaagaacaaaagaatagtccgacgaaattacgcagagggcgagtgaaaatcaaagagagggagagggaattcag

SEQ ID NO: 646775 - DNA, 236 bp, Homo sapiens
atggtgtggtaggggcggcaggcactgtgaggcactggcgctcacgtgtgaagccagaggcatgaggtctccccaaacaaagggacactgtctgtgatggaggactctgcccaggagatctggcactgtgaagccggaacgggaacccgggccccaagatcacgtggtatcgcaaccgggcagcgcgctggaggtgcccgtagagatgaacccaggaggcgtacatgaccaggcgg

SEQ ID NO: 646776 - DNA, 105 bp, Homo sapiens
  misc_feature (31)..(31): n is a, c, g, or t
acgggcatgagagacctgggccatcaagccncgctctctgtccctttcatcacaggcttaccctatgtctatcatcacccctggcactgccaggagcgcacagga

SEQ ID NO: 646777 - DNA, 243 bp, Homo sapiens
tcaagcttctaacgatgtacggggacatggtgacacaccagtagtcccagctactcaggaggctgagacaggagaattgcttgagcccaggagtttgaagctgcagtgagctatgttcacaccactggccctccgggcctgggcaacagagcaagacctttgaaaacaaaatacagaaaaaagaaagaaatgaaaagaaaagaaaagagaaagaagaaagaaaagagaagagaagagaaaaaa

SEQ ID NO: 646778 - DNA, 674 bp, Homo sapiens
tccttatcgggttctatagcagcaaaaataagggacggggcttctcgtactcttttcatagcttcctctatttctttactaaaggtatccgattccaaactgggtggaaacagagaccagcagctacatgatacaactggggatcaacagtactcataagcttcagcaactgatctggcagcaagagactggaagagtacaagtttggccccagagaacgcccaatgtgcacgcaaggggcaggatcaaggagtaggagcccccaaagcagccaggggaacagcgccaatctggggtaaagtggggtcaaggagtcaggcaggagtccaccaccaggcaaaaaacctggccactggctattaagctgggtggccaacgagagaacaaagctttaagcttacatcaggaataaaccccttcggcatagggtacgacatatacaaagcctcgtgctcaacgaatacggggttggtcagatgcgggtgccacaacggctgagctcgggatacagggaacttaacaaagcagacacgagatgagacgggcaagggcgaatcatccggggggaagaggcgcagttcgtcgatctttgcctaggaaaccgaaaagagtccgatctgctcagagcaagcgccgggggagacattaagccccggataccccggggcgcgcta

SEQ ID NO: 646779 - DNA, 376 bp, Homo sapiens
  misc_feature (77)..(77): n is a, c, g, or t
  misc_feature (335)..(335): n is a, c, g, or t
aaattaggcatagaaggaacatatttccacataacaaaggccatatatgacaaacccacagctaacattatactgantggggagaagctgaatgccttttttccaagaactggaacaaaacaaatatgctctctttcaccactcttattcaacacagtgctagaagttctgtctaaagcaatcaggcaagagaaagaaataaaggttttccgaattagaaaagaggaagtctaattgccccctctttgaagattacgtgatcttatatctagaaaaatgtagagactccaccaaaaactctcagaacttgattcaacacagttaaagttgcaagnttacaaaatcagttcaacatggcaaaagttcagaagcattt

SEQ ID NO: 646780 - DNA, 867 bp, Homo sapiens
cttggagtctgggaggaggaaagcggagccggcagggagcgaaccaggactggggtgacggcagggcaggtggcgcctggccggggagaagcgcgggggctggagcaccaccgaactggagggtccggagtagcgagcgccccgaaggaggccatcggggagcctgggaggggggactgcgtagatggacccctggcgtcctgggctcccgtgtgccagcgctatgaggccgactcctcgtcctgctgctcctggtgcctgtgctggccggctcgcccccgactgtgactgacaacaagtatccccagcctctgcccggggcaccccgtgccttccaggcacgccgggccaccatggcagccatggggcttgccgggccgcgatggccgcgacggccgcgacggacgcgcccggggctccgggagagaaaggcgagggcgggaggccgggactgccgggagctcgaggggaccccgggccgcgaaggagaggcgggacccgcggggcccatcgggcctgccggggagtgctcggtgcctccgggatccgacttcagcgccaaagcgctcctgagagccgggtgcctccgccgtctgacgcggcctttgcccttcggaccgggttgcctggtgaacgagcaggggaccattacggacgccggtcaccggccaagttcacctgccaggtgcctggggtctactacgttcgccgtccatgccacggtctaccggggccaggctgcagttggatctggtgaagaatggcgaatccattggctcttgcgttccaggtattcggggcgggtggcccaaggcaagcctacgtcatcgggggcggcattgtggaggttggagcctgagggaccag

SEQ ID NO: 646781 - DNA, 294 bp, Homo sapiens
tcgagctcggtaccactctagtctagcaagtgtggtggctcacacctgttagtccagctacttgggaggctgaggcaggaggatcatttgagtccaggaggtcgaggcttcagcgagccatgatttgcaccactgcactgcagcctgggcaatgtagtaagaccccagctcaaaaaaaaaaaaaggtttcacagaaaccgggtgggttcttgggggttttcccaaggttaagggggaaatattggggagaattcttttatggcattaagaggggcggggggaatcttctaagaa

SEQ ID NO: 646782 - DNA, 726 bp, Homo sapiens
  misc_feature (48)..(48): n is a, c, g, or t
  misc_feature (50)..(50): n is a, c, g, or t
  misc_feature (75)..(75): n is a, c, g, or t
  misc_feature (140)..(140): n is a, c, g, or t
  misc_feature (157)..(157): n is a, c, g, or t
  misc_feature (169)..(169): n is a, c, g, or t
  misc_feature (192)..(192): n is a, c, g, or t
  misc_feature (207)..(207): n is a, c, g, or t
  misc_feature (213)..(213): n is a, c, g, or t
  misc_feature (226)..(226): n is a, c, g, or t
  misc_feature (228)..(228): n is a, c, g, or t
  misc_feature (236)..(236): n is a, c, g, or t
  misc_feature (245)..(245): n is a, c, g, or t
  misc_feature (264)..(264): n is a, c, g, or t
  misc_feature (270)..(270): n is a, c, g, or t
  misc_feature (291)..(291): n is a, c, g, or t
  misc_feature (312)..(312): n is a, c, g, or t
  misc_feature (520)..(520): n is a, c, g, or t
  misc_feature (626)..(626): n is a, c, g, or t
  misc_feature (685)..(685): n is a, c, g, or t
taggtgatgtgtgaagctgggcagtctgtggtgtggagagcagccatntntctggctattaagaggattctaaanaaatggctggatgcgctgctgaccaaaatcagcacttaaataaatgcaaatgcaaaatttttccntttgggccttgaaaatncttgcttttatnatttggggtgaaggagaaatttntgtacttggcttccnaaagcnccaacgcagtttntntatgattnttgggattnaaagagtcctcctattttnaaagtnttttgattgttctaaaagtanaggcccatcgtttgttctttnaatgaagcaatgttctaaaaaaaagggaggtaatggaacaatctgtggaaaaaaaaggggagaaatgggtgataaagaataaagttcttaaaaaaattaaatggaaggatgggttcctctcctgctgggtggtgctttctcttgcacaccactcccaccacggggggagagccagcaacccaaccagacagctcaggttgtgcatctnatggaaaccactgggctcaaacacgtgctttattctcctgtttatttttgctgttacttttaagcatggaaattcttgtttgggggatcttggggctacagtagtnggtaaacaaatgcccaccggccaagaggccattaacaaatcgtccttgtcctgaggggncccagcttgctcgggcgtggcacagtggggaatccaagggt

SEQ ID NO: 646783 - DNA, 725 bp, Homo sapiens
  misc_feature (528)..(528): n is a, c, g, or t
gtcgcagctgagggaggtaaggaggctcccagggcaaccgtgagctggaaacccggccgaggtccagccagagcccaagtagccatgagtgacccctctacctgtcagccatgggggagatggagcaactgcgtcaggtaagcggagtcagctcaagaatgcagattgcgatgatgccagggaaaggcctgtgctagacgtgtactcctggtcagtacgtcgtggatgtctggcctagaggtggtgggcacgcagtccagagtgcggacgcggcggacgtgaaggggacacctggccaagcatttacgccactgcgattgggccgactgattctacgctgctggtaagtgcctcgcgagaggatggggatagctgactccgtgtggtgcatcatgctagcactcactcaagcgaggtgcgcgccgatcccatctgcgctcctcctgggtctagtgacctgtgcctatgccccatcagtgggacttctgtggcatgtggggggctggacgacatgtgttccatctacanactctaatcccgtgagggcaagtgtcatgtcagccgggagctttcttgctcacacaggttagtctctcctgcgtgtcgttcctggatgcccctactattgtgaccgacctcgggggacaccgcgtgtgcctgcgcggacctcggagtggccgcgagactgggcctggggaccccggtgcctggttaacccggcgggc

SEQ ID NO: 646784 - DNA, 397 bp, Homo sapiens
aatctgtgcctcactgcaacctccggtaccaggttcaggcaattctcctgcctcagacctcccgagtagctggattacaggcacatgccaccacgcccagctagtttttgtgtttttagtagagacaggatttcaccatgtctgtcaggctggtctcgaactcctgaccttgtgatcagcccgcctggcctcccaaagtgctgggattataggcgtgagccactgtacctggcccattttttttaaaagtgaaaaaccaatctaaagtgtgataatagttttgaacatttagtggagtgtaagaaaagagaacccatttgactcaggttcactgataaagggttctatttccttttctaggagttgagcattgctgttggttttgtgcgaggtaata

SEQ ID NO: 646785 - DNA, 224 bp, Homo sapiens
agtgctcaatgtcagacctcactgatttgtgccattagagctgagtcacacatggacagagcggtttcaagctcctcacccagcccacaacaggaggccggttaggctgcatacaggctagggactgaccatcacataacaagggctggagcacagagctacttcttcagtttctcataaacttagaaagggaccgtttataggtcagtatagaactcatttcc

SEQ ID NO: 646786 - DNA, 1207 bp, Homo sapiens
gcaggctgtactggtcctgaattctttgtgatggcgaagaggtggccgaggaggcctgagctaacacagaatagtgcctgggtttatgctggctgtgagtgagccggagcctgccgcagcgaccgaggaagtggctgggatggtgcctgagccttgcggagggtgcggtgtggtgtgccgcggtgtggaagactgtgctggatgtgctgcatcatgctgctgatgggcctgcgtgagaccacgtgtgtgcatgcaatgcatgttctggcccaggactccctgcttgaggcccggctcctggatggtggccctcccctgactccgtgtcttgcttatcctatatagatgcattgtagtggttccaggaagatcgtagcagcatatcgacattaaaaccttgcggaattggaatgtggcccgttgggaggtgacctttgcatatcagacaggagcagtaaatggcggttccctccggacaagggcggccttccgccagtggggcttttcccgttggacccccttccacgtggacgtcgggggtgggaaaggattagggcgattatgggccggaaaaacaattcaggacgagcgggaagggttccctggacaagcggttagattatccccaagagggccggccatatactaagggggggttggtaaacgttcggtgtcacccaagtggtgaattaatcgataacaagggcccacgaaaagggggcaccccctgggaacgtaaaggtttcaggaaggccacgccccgttccgggccaaaggcaagggcctatggggatggtatggtttccccgatggcggacagacgggcgggaccccgcactggtgttggattggacccgaacagccgttggggggataccgtcccccaggaacattcgaagtgacgagcagattggagacccattcctggaggagtatcccgttgtccagggggatgtccagcagcaagacgcaaaagtaccgggtgtgaaaaaagcgcggaagcggctgggggtcgccagccccaaagcgtttttatgcccaaggtccgttataagaaagaacaggtatccagaaatagcgatggtgtgcccgcatatatccgtggtggggcaagtatccccaagggacctattccgacagaaaatggggcattacgcatcgattgaatctgggtagtggaagtgtggccgccgctatcccgtttgta

SEQ ID NO: 646787 - DNA, 124 bp, Homo sapiens
  misc_feature (95)..(95): n is a, c, g, or t
tcccctgattcttcgtccctccttatctcccagccagaagactcttactatttttcattgatgatacacttatgagtattaattttaacggaganattgactctctatattaatcactcttcat

SEQ ID NO: 646788 - DNA, 1297 bp, Homo sapiens
ggccaaggcccgggaggtcagaaaaccgggccgccgggcgtgcacctgacagctgtggtgccctgggtcagggacactgctggaggtcatgtgcctggtgaagtgctggcaggaatgctggatgcactgatcccagtgatggaacaatcctgcaccatgactcaacaatcccctgaaagctgtttgagtttgataccctgggacaaccccaaggtggctctgtgacctctgccccagcctggagaagcaactgctagtgttccctgggacacaatgtgtgggagtctgcaacttgtgccaggcactgtaatgggcttagagcctccacgaaaagggtgtaccttaaactcgtaccttcatattgcacaacaccaataccgaaggagaagaggacgtgagagtggacgctgcagccggaggacaccttgaccactgacaaaccgtcatactgctatagaacattcacgaccaacgaaatccatacgctatcactcttgcagctatccaagatgataacagcggtacttgtcccattattcttatggcatctcaagggaatacacctgccttcaacccgctccgacattccgacggcttgggctccgcctgttggcgcacacggctgcggggccatatgacttgggcgccaaggtaacgttggaacatcttcacgctcggaacgccttgagccgacgctttcaacttggttgccttgcctgacgctcaagcctttcgcattcttcgcggcccttcaggggacggcacaatgtacctttcccaaacgaaaacggttaaaaccttcttggatcacagtttggcaccagtcctttggccgctaagaaattggggaacgcttttccaagcgaacagtaacttgttcttccaagctacccttgactggcacagagacttggcaagccacggaggaagggccttccacgacaccgttgtaaccattatgacaattcctagctggactggacatgacatgcacgttattcaaagtgcgcgcccttgagtgagaggcgttagttcgcattaacgggaacctttggcaagtatggcaagtgaacagcttggcagacgcataaaatgcctttttgacgacagtgagcacgagtcgcaatcgggcaacgccaggcgatgcccagagacagcaattcacatggcgcgatgcgttcccacaactcacacagtcccagcagagctgcataggcctaaaagaaagcaggtgactgatcaccgaccacaacaactcttgaaaccatgtgtgccgcacagggcacgacgcaaacct

SEQ ID NO: 646789 - DNA, 251 bp, Homo sapiens
catccaacaccaaaaagatactcaatgtccaaaagtcagagactatcctgtcgagtcggctggttttttgcatcccatgctaccactgcagagtgacgggcaggagagtgaagggcactaggtctgctgcacaccatagcccagatccatctccctcaccccacctctgcccttcccctaactcccatacatgttacacccctctacttttagcaaaaactgtggaaatgatttgtaagagggaaggagaa

SEQ ID NO: 646790 - DNA, 873 bp, Homo sapiens
tgtgcgcctctcggcgctccccggaattaatggcaggaagatttttcaaaagagtggaggacttttaggtgtgaccaagatggaggaataaactggggaagagttttattacaaccttaaggggggtaagagagccccccctggtccaaaggtgtgtgaagtgcccacgaagttatcgtatatttaaatggaggggtttcttgaactgttacctttgggttgtagacacaccgccgtgttataatgtaaagagaattgtaagaatggagaattaccgttctttacccagcgtttaaagcttgatttgatctttgggtttataatgccccaaatgtgaccttgaaatgaggtactttaggatgcccatcaaaattgccagagttcaaagtgatgtatatgaatcaatgcgtccaaggtgataatgtttagttaccgtgataatagcgtttttgagatgagttttacatctttaaatccatttgggtaaataaccatattggcgttgcctgtttacatcccctcttgtagtttttaattaaaaacttttaagataagtgcttcaccattacacccatggtccaccatctgacagcgtttatcttgtgtgtgaatctaagtgatatgtgaggaatccaggaatgcgataatttgtctttagttgatattccaggcgttttaaagtccatatattccctgggcttggtaagtgaatttatgagatttcctgcttttgaaagtatagatggcccaaggacccttttgtattgcttcctgattacccgctttgattatacccagtggggtaatatactttttttgttatagattgttttaatggtaggtccagttattaaaagagatgaaattatttta

SEQ ID NO: 646791 - DNA, 632 bp, Homo sapiens
ggtcataatgtcactattctctatgattgctagcttcttgtatcatacgcaagattgtattttctgctggattgtgtgacctattgaattctggaaacttgcaaccactccgctactgcatctcagctacatcctattcccctgttatacttccacctgtcgttataatcggtccttcacatagttgtcccgtattgcctatgaacagtcatacactgcccgctccttatacaagcttaaacacaatcataccaccatcatggcctgctgcaaagaggttaaggttagggtgagcagctaggacccagaaacgatcatggtctctgcggaaagtctgaaccccagtccgcttagacatatcccagactcgaatactctagtcctcagaattgctagaggatcaactcttggcgagggtggaagacggcacaagatacattgttgtaatggccccggcaggtatcaacctcccatgcctttgattcattcatgcgccagatcttcacttgacgatcatctgccccagatacaataaggggcatagtggggtggaaggcagccagtttactccacgatcgtgaccctctagtacatgcttcaccactgcatctgttgtccaaatagatcacccc

SEQ ID NO: 646792 - DNA, 289 bp, Homo sapiens
acacttatcccgcaccttggtatcatgcacccgatgaggtaaccaggcagaacgcctgaaggcaggcacaatacttcctattgcatacaccctagttaggctcgcttcccctagtgcatcgcccagatttagactgacagcatcgctaggctgactaagcatgctactactcactctcacggccgaggaaactatcgagagtcctgagccaacaacttaatatgactagcttacacaatagcttttatagtaaagatacctctttacggactccacaaatgactagaaa

SEQ ID NO: 646793 - DNA, 310 bp, Homo sapiens
atatcccccggggattactgtcttacgaacgcaccggcccctttctcctttgcgtggatagggtgcacgagaatccctacgcgtgacgcatgaaccccgtcttcccaggcatgggcggtgttcgtctacgccgtgccgatccgtgctctactctgcgaagacgaactacacggaggatcggcgatgaccggcgtttttcacggaacacaggtcggtgaggtcaccgagacgtgttccatgtccagtccggtgctgttgcaaacaggatcgattgacatcgaagtcttctgccgtaagacataaccgcggt

SEQ ID NO: 646794 - DNA, 300 bp, Homo sapiens
  misc_feature (74)..(74): n is a, c, g, or t
gatgttggaggagagtgtagggacgggggaggagagaacttattggcacggacttcttatctaccccgctaacngggggatggaagatgggatatgctgaagaagtttcttatgatgcgctgatgtgggagctgcaacccctgttgtaccccatgcgctaatagatcagttaaagcccggaggaagattggatattgcctgtgggtgctggaggcgggaaaccaaatgtggggagcagtgtgacaagctacaagatgggggggtgattttttagccggtggtgggggtgatatgcgggcg

SEQ ID NO: 646795 - DNA, 85 bp, Homo sapiens
tataaaagggggtgccacttgggggagcccaggggggggtggaggggaatggtgtgggccccacgcccccccccccccccgggtc

SEQ ID NO: 646796 - DNA, 441 bp, Homo sapiens
cccccacccacctatgagctcggtaccacaatttgcgtaacgatgctaggtgcgttgcatgccgagccaacgcaaaggacggtgaaacatgatgggggtgccaatcaaacacaaagcccgcccagcgggtagccgggcaggctttgaacaacaatcaaacacgcgcgagctgtagggggtaagcgactgcccctaaactctgggcttggcactactttttctactgccccttggccggccagcggcctacaccaacggcgcaacaacatgcaacggcgcagccactcacctgccaaccccgaggccacgcggcggcgactccctcctagcagctcgacccctgccagacgcactgtcaaagcctctggccacctggccccgctcgctctttaccaaccgctcgctgcacctggcgacaacacccctgggccggcccccccc

SEQ ID NO: 646797 - DNA, 454 bp, Homo sapiens
  misc_feature (210)..(210): n is a, c, g, or t
cccattcaaaacgggtttttggtgccccccccccatgggggagaggttttgccctcacacctcccaaacggttttttttaacccttggggggattttggaggcccggaaagattcaattgttaaaattcccttttcccttgggcggtgggggccgggtccccctttccctttggggcgaaaaaaaagggggtaccttaaagggggggttnccccccccttttttttcttccctaaaaagggggggctccccccaaaacccccccccttggggccaggggcccccccccttttttttttttttcccccccccgggggggccctcccccccttttttttccgtttttggcccttttgggaccccgggttttaacaaacagggaaaggggggggggggggggggggggttttggggtaaggccctttcaaataaaatttttttttttttttccccca

SEQ ID NO: 646798 - DNA, 170 bp, Homo sapiens
cagtgccttggttgtggtggcagcatgtcgatgtggacgctggcctgctgctccttgtgctgtggccctgagccgcatctgaacgagctgcgtgaccaggctgttctccagggatgctttcatgctgcgctgggactgcagctcaatctcctggttctgacatggtgcgc

SEQ ID NO: 646799 - DNA, 250 bp, Homo sapiens
tcgtgtgatgagcatggtggaggaattgccacactgtcttccacaatggttgaactaatttacactcccaccagcagtgtaaaactgttcctatttctccacattctctcaggcatctgttgttttctgacgttctctttttttttttttaggaaaacaaattcgggttctgtccccaaatggaagtgcaggggcctaatctcagctcactgcaacctgcacctccggggtctcaggtgattctcctgcc

SEQ ID NO: 646800 - DNA, 125 bp, Homo sapiens
ccccccgcaaaaaaaaaataaaatactgctagtacatggtagtgcataactagcagtcccagccactcgtgggtgctgagcgtgggagtgatcacttgcagctcagtgagtttagaggctagcag

SEQ ID NO: 646801 - DNA, 801 bp, Homo sapiens
caggctggctacgccggagttatgggatgggccggacccactgagaggctctagagtcgtctgtgatgttccgtcacccgtgtcccatctggtagctccttgtctcgcctgtgggacctcagctccgtcttctccgtgctctgtgggccgggcctcgcatgcttagcagcggtctctagctccgtctcccgtggggacctggtgcctgattgggagggctggagtcgcacgcgctttgtccttagcgccgtgtactgtctctcctcgtaactaggaccgcagggccgtttggtttccccagctcatccttggcccttccgcgtccaccagcctggtctgcaggcgtgctctgtccttagagaacggcgcggtgtgccgggttcccttcaccctagggcacattactaagggaggtcaggcactgaaatgctcgtaacccagcaccatctgggactgggtacagtacctccagccccatgggccctgaccatgcgcaacatagcttgacatctcacgcacctcaccagagctggagccacatgagtaatccggaactcaccagctctatatcctttgagcaccaaggcaagagctgggagctggcgcaaaccagacagcgtcaggtgtggctggggatagagctgggaagtacttgccaagtataaacccaaagtaccctctagagatatcgatcaggggacttggataaattctttcagagaactcaatcatggaaagctggaaggagtaagaaaccaaagccccctgcatccatcagtagaactccataagaaaacaaaa

SEQ ID NO: 646802 - DNA, 929 bp, Homo sapiens
gggatccttcagcgtctgaatctcggctgtcgccccgcgtaccgtcgcccgggctctccgtccgctgctcccgggggtttcggggcatcgttgggtcccacaggtctggctcctgcttcacctatccccatgtagcctgatgtagtcgtccatggtcgagcaggttctcatgaggcactgtgtactgactgtgccctggattggatgagtcgggctgactgcagtaacactcgttcggaaggcttatgaccatggcttgtggcacagtatgaggagagcatcctgactcgtgtagagcatcccgaaggtaatgctcagcgaccgggagaatctctgcacgcgcttatagagaggtctgctttggcacgcggagtcttctggactgaccctgaagattcagaacctgaacactggatagaatttgagaacacactcaagttgttggctctgatgataagcctctcggcgtccatgcatggcttcatgcaactgcataatcattgcctttgatattggagctggacacacaatgacacaaagctactagaccagaacattactcgactctcagcggcacacctgtaagacactgagcagcccatccaaactcactcgtctgtatgcaacgaccgcacgtacttggacttcaagcggccctgggcaacagatagaccgtggattgcaggaggacgaacctgacaagggggttcaccctcaactcccaggacagtggccacgggattcggcggacagggtttaccgtcccgttgccgaccggcccttcaaaccttatcgaccgaccccccttggaatcgccgtcgcgacaactccgatttgggccaggctaccagaggagttcttgacacaaaacgaactggactcgaacgggagtgtcaatttggcaccaggacttgccgctggcacaccta

SEQ ID NO: 646803 - DNA, 895 bp, Homo sapiens
gggacggagtctcactctgtcccccaggctagtgtggccatcgtcggctcactgcaaactctgcctcctgggctcgagtgattcttctgccatctctgctgaaaatggaataaattggatcaggtgtgctggcgggtgcctgtagtcccagacatactcaggaggcatggggcaggagaatcgttggaacccaggagacggaggaggtgtcgtgagtgcaaagattgtgctggcgaaactatagcctgggtgacagagcaagactccatttcaggaaaaaaaagaattagtagtacccatattactgatatggatacccagagagagagatctgtagagaactagctaataggtgctcgaattacttttctatacagcagtctaaactgtgtagacaatttgtgggtatatggttgtgaatcacttggtttagaagtgtgagtaagaagaagcaagtctttttttatatagaagtctataagtaagaccatgcttttagaatttgtatggaatggtatcgtggaatctcatagttcattgccatgtgcttatagggggtgaggtcatttgctttccgggaacatttacggatgagaagtccaaagctcccaccaaatttaccatattcttcctcacaagacgatggtcagtagtttggtgtgaacagatgagtctcctctccaatgcatttatgtaatacccaagatttaacgataacagtttattgggttggtgtgtgagatggtctgcccaagtaatgcggggcgatcgtaggcacacacccggtaaagttcgacaagcgtgtatgaatagccaccaggcgggtttgttaaagagcaacgggagggggagtcaagtcccgtcagaggggagccacaatagggttaaggccaaa

SEQ ID NO: 646804 - DNA, 632 bp, Homo sapiens
atgccgtaaaggacataggctggggaaagacttcatgacaaaaatgtgaaaagaaattgcaacaaaagccacaatagacaaatggaatctaattgagactaaagatcttctgcacagcaaatgaaactgtcatcagagtgaacaagcaatctacagaacaggagacaatttttgcaatctacccatctgacaaaggtctaatatctagaatgtacaaggaatttaaacatacttacatagaaaaaaacaaacaagcttatcacagagtgggtgaaggatatgaacaaacacttctcaagacatttatgcagccaatggacatatgaaaaaaagctcaacatcactggtcatcagagaaatacgatgagataccatttcacgccagtcagaatggcgattattaaaaaatcaagaaacaatagaggctagtgaggctgtggagaagtaggaacgtgtttacattgttggtgggaatgtaaattagttcaaacattgtggaagacagtatggtgattccccaaggatctagaaccagaaataccatttgatcagcataccatcctggatatataccaagaataaaacatctatataaagacacatgccacgttgttatggggactatcaaaagc

SEQ ID NO: 646805 - DNA, 140 bp, Homo sapiens
ggtagagtatgaagtccttgagagaagattattatgcgactgtgagtgcgttcgtagttttgagtttgctcaagccgaaaaattattaaggattttagcccgtgtgcgattattaaaatatactgcgcccgttaaacctc

SEQ ID NO: 646806 - DNA, 113 bp, Homo sapiens
  misc_feature (6)..(6): n is a, c, g, or t
cgaccntagaggatcccccacaaattccattcaccaccatcaccatcgaaacggcggatcatgccaggctgcaactgcagctggcctacaactggcactttgagggagtaccg

SEQ ID NO: 646807 - DNA, 122 bp, Homo sapiens
ccttttttcccccccccccccccgggtggaaaagggggcccctccttgggggggggggggggttacctggccccgtttggggggttttgaaaaaaaaaaaagggggttttccctgggggtta

SEQ ID NO: 646808 - DNA, 366 bp, Homo sapiens
ggggacggttgctggcccaggtgagcgggcgcgctggtccacggatgatgctggggcgcgtccccgactgacgtgcgctgcctgccctgatgtgcggttcacgtaaatgacagcgagatcctgagggccagcctggtgaaggagtgctgtggatattggagcttggctgctgccaaggatcctggggccctgcgccctgttgcctagcggcggtccatgggggactctgttgggtgacgcgccactgacgccgcgtgttcgggcgaacccgtaaaagcccggatgattgcgccgccatgtcccgtgcttcttcggcgcaccaggatcctcaaccatcctggctcccctcatggccgactatagtag

SEQ ID NO: 646809 - DNA, 242 bp, Homo sapiens
cactccaccaccaccgagaccacatcccaccgtactcccagcttcacttcttcaatcaccaccaccgagaccacatcccaccgtactcccagcttcacttcttcgatcaccatcactgagaccacatcacacagtactcccagatattggatactgattcggcaggctcctcagagagcacacctgccgtgcttgaaggactgaccctgtgcgccggatcacagcgggatgattgagagaac

SEQ ID NO: 646810 - DNA, 254 bp, Homo sapiens
  misc_feature (73)..(73): n is a, c, g, or t
ctttggctttgggaattttgggaaaattttttttttttgattaaagaaaaaaagggagggaggggcccctccntccccccctttttcgccttaaaccccaaagtgatggttgggggtgggggggttttttgaaccccgccggaagggccaaaagacccccgaagatgcccgttgccccattgttggggtggtgcccccccccccccccttgcctgtttttaaactttttatgaaataaaccccgttttgtttta

SEQ ID NO: 646811 - DNA, 445 bp, Homo sapiens
aaatatgcaactgacaaaagaggatcactttcaggcattggtcctgactggggtaattccaggtatttactaccagggagcacccaattcttcttgagaacaccaacctacaacttgaagtacaattcacctggaatgactcgctccaatgttttgtttacatccagatatggccatctgtgaaacagaagggaagatcgccattggttatacataacagcaattcatttttttcctctgaagttgaacatgcaaagaacatgaccattaagtgctgttttatgtatataagacatatatatgtgtgaaaatatatgcacatatgcaccctaataacatatatttattatattaaatgatatatgaaagaagaattagcagaaaatggaatataagacttaacctttctggaaacgtaataaaccatgttaaaattgtttacaca

SEQ ID NO: 646812 - DNA, 95 bp, Homo sapiens
gccggcgcctgcctctagccgcgccgctcttgagtaccagccgccgctgcagccgccgcgccgctagccgtgcggtgccaggccgcgccctcccc

SEQ ID NO: 646813 - DNA, 924 bp, Homo sapiens
  misc_feature (865)..(865): n is a, c, g, or t
  misc_feature (903)..(903): n is a, c, g, or t
aaatatgcaactgacaaaagaggatcactttcaggcattggtcctgactggggtaattccaggtatttactaccagggagcacccaattcttcttgagaacaccaacctacaacttgaagtacaattcacctggaatgactcgctccaatgttttgtttacatccagatatggccatctgtgaaacagaagggaagatcgccattggttatacataacagcaattcatttttttcctctgaagttgaacatgcaaagaacatgaccattaagtgctgttttatgtatataagacatatatatgtgtgaaaatatatgcacatatgcaccctaataacatatatttattatattaaatgatatatgaaagaagaattagcagaaaatggaatataagacttaacctttctggaaacgtaataaaccatgttaaaattgtttacacaaatatgtgaatgtctagaatctgctaggtttataattaattccttcctactagaaatgttatttttgctgcagagtatataaaacaaattgatcttgaagatccaattacagtgttaaattattttctagataacatgccttttgacctgaaaaagggtttagtataataccttaaaaattctcatatatagtagccattttaaatgaaacaaaaagatttagaagcctggtgttgcttgatgataagattaagaagtttaaaacgggtttatcattactatagcacactgtaaagtgctagtactcgtaataggtacattttcagtaaggatctggtgagatcatattatgatctaacatgaaggacaggctgggcgcggtggctcacgcctgtaattccagcaccttgggaagccgangggagtgaatcaccgctggtcaggagtttgagactagnctggccaacatggtgaaaccc

SEQ ID NO: 646814 - DNA, 196 bp, Homo sapiens
gcgaaggacagtatggaccagatgaaggtgtggtgaagcgttaaaggattgacttgaaggcctgcatggattccatgttcatgagtttggacgatatacagcatgctgtaccagtgcaggtcctcactttaatcctctatccagaaaacacggtgggccatattatgacttgagggaggtgatcttcttgcaagat

SEQ ID NO: 646815 - DNA, 911 bp, Homo sapiens
ggtcagccgctgtcttctttggcatctacagagcgaacctacattggtcacacatcatggcgaatggtgacggtcgccactcgatggatttggtcgttattggtcgcctgtttcaccacggactgctagtctatactcgtggtaaagtgaatatagtatgccatcacactgagccctttgtcgacgctcaactacgttggtttacatgttccaactactgatttcacaacccagtggcaaagtgtccactgagcaccgctcgaaaggcatgaggaacgggaagtgttgttcagtcacactggataatccgcagtcaggcatctctccagtgagcgagatctcctccaatacatcaatgtgtgctgcgactgctggcgctgaatacgtcgtgcagtccactggagtctatcatgcacctcatggaagaaggctggggctcaatttgcatggggggatgccaacacggggtcagtcatcttgcgtgcacccactctgctgatgctcccgcattgttacgtcactggggtgtgagaccaatgagaagtatgacaacagctcaagatcatcagacaatgcctcctgagcaccaacatgcttagcaccctggcaatgtcaatccatgaccaactttggtatcgtggaaggactcatgacacagtccatgccatcactgcacccaaaaagacttgttggattggccctccgggaaactgtgggtgtgatggtctgccgggctttccagaacatcatccctgctctactggcgatgcaaggctgtgggaaatgtctccctttatctgaacgggaagctcacggattgcttccgtgtcccatgcaacgtttcatggtaactgactggcaaaaactgctacttgcgaatcgaaggggaaagcttaagccaaagaaccgac

SEQ ID NO: 646816 - DNA, 134 bp, Homo sapiens
ctcgtattattatgccatggcatctgaataagcaaacagaacctgcccaggtgcagtatttcaatttaaaaacagtatcgaatgggagaagcagttgtgttcacgcaagttactgtaatttcaaaagcccattt

SEQ ID NO: 646817 - DNA, 347 bp, Homo sapiens
gctgattgcggattactgcgccagcatagatctacgcatctggactagaaaaacccttgtgtggccagatgcagtggctcactgcctgtagtctcaacgcttggggagggtgaggcaggtggatcgcttgagcccaggagttcaataccagtctgggcaacatggcaaaacccatctctattataaatacaaaaaaattagccaggcgtggtggcacacacctgtgatctcagctactcgggaggctgaggcaggggaatcactggaactcgggaggcggaggttgcagttagctggggtcgcgccattgcactccagcatgggcagcaagagtgagattccgtctc

SEQ ID NO: 646818 - DNA, 1827 bp, Homo sapiens
  misc_feature (208)..(208): n is a, c, g, or t
  misc_feature (273)..(273): n is a, c, g, or t
gatgctatgagagtgtcggagtggcacgatatagcctgattactgcgtgggcatgcatctgtgtgagtgtcatagagcgatcacgtgtaactgaggcctgtccatgtgatgtgctggaggccggtagtgctgggtcgcaaggcgctagtgtcaaacacttttcctagggactaatcatgaggtcaaccaggtacataaccaaagctgntggaatctggtctgaagcctctgcatgtcacgtttgatccagtgacttcatccatctcaagtagnttatcctacgcacgtaatccactataatcggcggaagtcgcgtgtagtgcgcccacagcacgtggcaagctcagtctatccctgcgtcagatgtacactcggggctgcacaggctacagtgatcttagtgcgccgatctatgctcccgacaaggtagaaagcgaaccaagatgaacggcattcctttgggaaccttcgtgttcatccaaacgcgcttgctttcgtgcagctgagacgtagctcctcgcacatccttgccaagtcgttagcgctaagtagaggtaggaaggatgtccggagtagggcgtaggggtgataaccatggggtgtgcacatctacgatacgtgatccgcgttgcgcgcctattaggacaaggtgcggtagagcgttaacgcaatacgaccctatctcgcgttgtggaatggctccgtacgctgggttgacggatgcgcgttgatacgcaccatggtacccgttgtagctgcgcgttttggagcaaaaggccttaacgccgaggggggctaagtttcgatactcatggcttcaaattccctccttagtggtgatggggcccgtaataaccgaaaagtgaaataccacagttgcgcaacatataggcccactaggtttgaaagttctcaaagaatattatgcaggagtgaaacacccacgactgttggaccatcgattggactttgcgctatgaaattgatgcccataaagagggggagcacgagccagtggcgttgttccgtgatccattaggaaaatacgcaggtttgagcgcaatgaatgactttcaaagcgaaggtcgagcgagttggcagcctatagtgatatattcccattcggtcggtaagttccggtatccttacactctcaaatgccttccctttgtagggacgttttgccatttggtgggcgatcttatcaaagcgttaacttaacagataagcattaaagaacccatggtatcagccaagggtaagacaccctctcaaaaagggaattctaaatgccccttattacaatataccagaaagccacacatagcgcgcgtgggacagcgcggaaaaggctgaaatagaaaggcccccgaatatatcacatcacttgaagtacggtagagcaccaccctctataattttttcgtcggcatgttgataatcccgagagggtcctacagcccccttgtgagtacaggtcaacgaagtgagttgtgcctgtccaaaattcgcctgaaacgcacgacggcgcgattcgaccggccaactgtggtgagtcacttcgccactccgtttagagttagagtcgaaccctatttattataaaatttctgctgggggcgacgtacatggaggcacaacacccttggtcggcgaataacacacgatgaagcttcatatggtgctccttgtctaggacacgaaccgcactaatcaacagagcatgggtgcacttgacgccacaacgagcagccaatgtcagcaacaacatgtagcgcgcacccacatcatattttgacgtcttcggatgacatgcaacactgcgaa

SEQ ID NO: 646819 - DNA, 375 bp, Homo sapiens
gtgatactcaaccaatgacttcatgagaatcagggggacagccatgggctattgcaccaagttaaattacttcctgttaatctacactacatctcatattgacgaccactctcatcttaaactgctcatctcaaatgattcaccaaattatatcaatgtaactgctatgattacagaccccaataacgattctctgtctagcaacacctactgaaatcatgtaaactgacacagatacttaaacattatactgtattctgctagtgaactcattccttatgtattaaccttttactaaatcttatgagcttttagaacactcctgtacctaagtgatctgaatatgacagacactgtcattctgtctgctgccgg

SEQ ID NO: 646820 - DNA, 382 bp, Homo sapiens
  misc_feature (8)..(8): n is a, c, g, or t
  misc_feature (314)..(314): n is a, c, g, or t
  misc_feature (317)..(317): n is a, c, g, or t
cctgaacncttgcctttgcagactcagttcaaagaaagagaagttggcaatcttcagcactctaatggactaaatagcaggagttttgactatgaagatgagaatccagttggggaagatggcattcagcagatgtaccccctttacaatcaaatgtgctaccaagaccggagccctggcaaacatcatcaaaataacgaccctaagagagtctacatcgacccacgagaacattatgtgtgatttttctctttttccaatgggcgttctaacaaatgtttattcttagattggggagagaagctaaggccaanagntattttactgtctctcatataagaacagtcccactctaagggtatggaagtctaataaataacga

SEQ ID NO: 646821 - DNA, 1103 bp, Homo sapiens
acctcatgtgatcgccagctcccgccttgagcttccagtctttgttctcccgtcgcaatagatctggtacgctccgtgaagcgagagcgtcatacatacgcgtctcttatttctgcacgctcgagcctgggcgcagcctaggcgaagctgtcatcagagtagacgacctgacatcgtacacacgtatgatcggtccactagcctcgatgtcccctgttgttaatcacagtcattgcgtgtcattacgctaagtaccctatcgatacatcgcgaggcattatgggcaaagtgacctcagctatcctccatacagtacaatcgagtgtccgcctcagaattgattgcacagatattccgcgcgccgaatcagagcaacggagtaaagcttcatagacttcatatacacatcaccttcatcgtcctacttccgtgcgtcgctagtctgcgtgtacgtgggtacgtgccggggagctacgtgagacaagagtatgacactacagctcgtatcctcatcacgcaattagtcgatgctggcaacctgatcgtctcctaacactttgggcacgccgctcactgttaaaaccaatagagcccatatcgattcgatccactatacagccaataggccagagatagttactatcctttcataaactctgttgagagagggacactagatcaacatatttccaattcacactagagcaaagttctcattgcagattagttatacacacacctcgcgccttgatgcgaattagagacgctaagtcatgcgcacacagacggccccctgtacattttcgaatacttggattcccgggtacccataaacttccaatgaggacaagcgtacccgattaccattttctatacccctatgttgcaatcgttcgcggcaatgaggcccgtatagagctatgggcctggggagattctagccttaacaatagagttacggttagaccaacgggaacgcctggaacgacgcgtccaggagcaagacaacctttatacttttcggaagacctcaggacagggatagggaacggacagcaacgcgcaattccctagttaacaccaaacaaacattatttcattgg

SEQ ID NO: 646822 - DNA, 1129 bp, Homo sapiens
gcgtcgccccgcagagcacagagcctcgcctttgccgatccgccgccgtcacacccgcgcgcagctcaccatgtgatgatgatatcagcctgcgctcgtcgtcgacaacgggctccggcatgtgcaaggccggcttcgcgggcgacgatgccccccgggccgtcttcccctccatcgtggtgtgcgccccaggcaccagggcgtcgatggtagggcatgggtcagaaggattcctatgtagggcgactgaggcccagagcaagagaggcatcctcaccctgcaagtaccccatcgagcacggcatacgtcaccaactgggacgaccatgcgagcacacatctggcaccacaccttctacaatgagctgcgctgtggctcccgaggagcaccccgtgcttgctgagcgaggaccccctgaaccccaaggccaaccgcgcagcaagatgacccagcatcatgtctgacgaccttcaacaccccagccatgtacgtagctatccagggctgtagctatccctgtaacgcctctggccgtaccactggcatcgagatggactccggcagaccggggtcacccacactgcgcccatctacgaggcgcatgcactcccccatgccatcatgcgtctggacccttgctgcccggccactcactgcatacctcctgaacgaatctcacccgacacgcggccaacagcctccccccaccacgcgccgaaccggcgaacacggtgccgcgacatcaaggcaccacactgcgcaccgcaccccccgcaacacacgcacaagcgcgccacgccgcaccccagccccactggccgcagcaccacaccaccgccaccacgcccaccgcaccaccaccgccgacacaccggaccgccccccagcagcactcccacgcccccaacggcacacgacgacccggcccccaccacacccacaacgacactacaagggcgcagcccccgcacaaccagtgcaacaaccggcagcacgccacaaaacacagaccgacaccgcaacagcaccacgagaaagcaagaagcggcaccaccagccggacacgcccccgccgaccagcccagcgccccacaccccccaccgcgagcccgcgcccaccgcgcaccc

SEQ ID NO: 646823 - DNA, 129 bp, Homo sapiens
ctgacatcagaacttcctcgacttcaacgtaaactgcagcatgatgttctgaagcttgagtttgaacgccatgaacctgtggatgggagaagtgtactgagaggcagtttggtggcatgctacttgcct

SEQ ID NO: 646824 - DNA, 359 bp, Homo sapiens
tctcaaaaactaaaacaaaaacccaaaaccccaatcagatgggtgtgtgtttgtgtgtgtgtgtgtgtgtgtgtgtgtgtgtgtgtgagacagagtctcactatgttgcccacgctgctctgattgtttttgaaggaagtagggaaataaacttttcttatatatagaaatactataatctggtattctgaatagtattttaagaagtgtcttattaaacactgaagggaatgcacactagctacacttcttttctttttgtgtgtttttttccccccgagacagagtttcactcttgttgcccaggctggagtgcaatggtgcaatctcgtctcactgcagtctgtgtctcccaggtt

SEQ ID NO: 646825 - DNA, 125 bp, Homo sapiens
gaccactaaaactgatatggatactagtatacgagactcaggttcgtcctttatgttgtgtatggttatcatttgttttgaggttagttggattagtcattgtgggcggtgttgtcagtgagatg

SEQ ID NO: 646826 - DNA, 377 bp, Homo sapiens
  misc_feature (215)..(215): n is a, c, g, or t
tttattttgaacatcacactggctttcatgattgtttgcttatgatgcttgaagaagttactggtaaaatcagatttataaggtagaaagatttaacacaaatttagttgtttggtcatgacctcacaacgaccagtgttgggcattattgtaaacaaccctttttaagaacagataaagcagcaccacaagtgtcattgctatggagatcacancccctgccggatctatgacaaactgtcctgctatttagcaaattggttcttgtggtctctgtgccatacatgaattttaaaaagtgctatacctcacacaatctggaagggaagacgatttgctcaggaccggtaccccccttttcccccaaaaaaaaaaaa

SEQ ID NO: 646827 - DNA, 444 bp, Homo sapiens
tgagacggagtcttgctctctcgccctgggctggagtgcagtgtgtgctgatctcgtgctcacttgcaagctccactctcccgtggttctcgcacattctccatgcttcagcgctcctgagtagtatgggactacatggctgcccaccacccacattctggctaattaatatgtatttaatcgtacgagacctgagtttcatatgttgttagccatggaatggtctcgatcttcctgacctcgttgatccgcccgactcagactcccaaagtgctgggattacaggtgtaagccaccaaagacgtggccctcttataaattgagatggatgttctcgctttgtagcccaggctggagtgcagtggcgcaatcttggctcaacttgcagcctatggcctcccgggttcagcgattctcctgcttcggcccccaaagagagagcgt

SEQ ID NO: 646828 - DNA, 166 bp, Homo sapiens
taattccagcacctagcaaccatttccaataagtatagcgataaaatgaactgcgcataaattgtcgcagaaagatgaaatataccagatatatagcaaggctaccctatactctgcatatgattactggaatactttcagggggccaactaaacccccaccaagg

SEQ ID NO: 646829 - DNA, 218 bp, Homo sapiens
ttttcccccgaccccgggtcccaggtttgttcccccccccccctgcccccctccccccctttgtttgtttcagacccctccccgcccccttggttttttccctttccccccaaaagggggggcccaagggccaacttttttttatttgggaggaccagggtgagggtgggcccccccggtttccccccccccttcccaaataaaaatgagggttctta

SEQ ID NO: 646830 - DNA, 493 bp, Homo sapiens
gttagaggatcctgatcagtacacacgtttccaggcggcagcagcattgataacagagtccctaccccctctcggtggcaggcgcaaaacaattcccagcagcaggactgatgtacctgtgctgaaaatgaagacggagaccaagcagaggacactgagcccgatcctggtgaatccaaaggggagcccaggtctgagatgatggaggaggatatgcaagggagcttcccaagttaccgaagaaacagactatagcagagcagaaatcagaaccaagtggacgtggactcaacagaaacctgaagtgacaggtcgaagctaaaggggaagacgagagtagcagtaacggcacagccttctcagacaacatctccttcgcagccgccacaaaaaattctttaaaccacgaggattacgccgagcgcccttcaattccaaccatagaaggattgtatcgacaggacccaggacgtattaccttctcgggcagcct

SEQ ID NO: 646831 - DNA, 321 bp, Homo sapiens
tggtagacctttgatcgactcttgtgatgcacagagcagtggagtatactagactcatcaacgccgccatactcttcaatcttctcccgacaagaactggcctctgcagattactactaggcggtgtgtgcttggagttcctaccattatggagttttccacacacattatccaggtttggagatctaaggcctccaactcactttctgttgccatcttcggactgggtcctcctttccgatgatgcttatcaggtcctggtccttctcctctcccgctgggaacatgacacgttctccatggctgtcgcgcaccatgtga

SEQ ID NO: 646832 - DNA, 1069 bp, Homo sapiens
ggacactgaccttcagcgcctcggctccagagccatggcgccctccaggaagttcttcgtagggggaaacctggaagatgaacgggcggaagcagagtctgggtggagctcatcggcacctctgaactgcggccaaggtgccggccgagaccgaggtggatttggtgctccccctacggcctatatcgagattcgcccgggaagaagctagatcccaagatggctgtggctgccgcacgacctgctaccaagtgactaatggggctttcatgggggcagatcagcccttggcatgatcaacagactgcggagccacagtggactggatccgggggagcactccagaaggacgacaggcatgccctaaggcgggacgtcaacgatgcagctggctggggcgcccgaccagtggccccaggcctatgggacacaacgggacctcggcaggatacctccgccgtgccattggcgcgcagcacgcctagcactgaccaggggacagagtggccactcacccggcccaaagggcgcgccccagacgcagaacacaaagggtcactcgccacgctcaagcggggaacgcaacctggagacgcaaaaggaccgcacactgggccccaactggagcaccacggtgtagacgccactcgggccctgggcaaaagacctcggcaaaacgccccaacgcgaggccccagtagcacacgaccgcgacaaacggcctcccgacgaactggcctcgacccgacccaacgaggacctcatcagagttgcggggcaggcccaaacagcgcaaccccgggactcacccataaccgccaaagcctcctgaggacctggcggcccaaccccgacaacagaacccttgggcactccacagccagggtagagcgccaggagccaccctgcgcgaggcatggaaagccaaccactacaagcgagagatcacgagaaacaccacacacaaggcacacagtggcaccccatcgaccgcaccgaaccgccccacggaaacccaggagcaaaagccgcccaaaaaaccagagaccgggccgaaccggacaaagcg

SEQ ID NO: 646833 - DNA, 751 bp, Homo sapiens
  misc_feature (68)..(68): n is a, c, g, or t
  misc_feature (269)..(269): n is a, c, g, or t
ggtttgagtccaaaactggttaagtccagtttcattatccagagttctgaatttatgtttagaatctntagtcagtttcctattctctagtcaggtatccttaggccaataaagtggtcccacttattagcacttgttcttctccagtttgattttgtgtcactgaagtcatttatttctctgagcctcgggtataggtaggtggtcattctccagagatggcaaagctcatgttggtttgggatcatttggtatgtcttcccggaganatgctcttgaacctagtttgagagtggggcctcaagaagagactttggcaatgcccttatttaaatgttagaaatgtttggttgcatttttgatgcattgcttacatagttaatgtttttgtatttggtacttgtcattttaataatttattaaacaggtgatttaggttttctaagatagctaagagcttagaaaaataggactgcaggtcgggtgcggtggctcacgcctgtaatcccagcactttgggaggccgaggcaggcggatcacaaggtcaggaggtcgagaccatcctggctaacacggtggagccccgtctctactaaaaatacaaaaaattggctgggcgtggtggcgggcgcctgtagtcccagctgctggggaggctgaggcaggagaatggcgtgaacccgggaggcggaggttgcagtgagccgagatcgcgccactgcactccagcctgggcgacagagcgagact

SEQ ID NO: 646834 - DNA, 990 bp, Homo sapiens
  misc_feature (83)..(83): n is a, c, g, or t
  misc_feature (220)..(220): n is a, c, g, or t
  misc_feature (222)..(222): n is a, c, g, or t
  misc_feature (236)..(236): n is a, c, g, or t
  misc_feature (819)..(819): n is a, c, g, or t
  misc_feature (866)..(866): n is a, c, g, or t
tcttctggggagccttgagcactaccgaataaagagcctttcagccatcgttgatgagcaattcggacttcacatcggggggntatgtgcttgagcatgagatgagaagtgatatgtactgtgtgacgatgacagttttatctgtgccttgtgtaactggttggcggcaccgcgatcatcaggtggcagctttgagtgagcgctatgcaaattgaaggantnctgtgctctggacngtgttatatacattcctcaaaaattcttctaaactctcaaggccctcttcttggggtcagactcaacggtaccaatgagaaaagcctgaaagcatggaagacttctgttgtttagcaaagctgagagaagacattgtcttaactatctacactagttgttaaattaactaatcagttgatttactacattggatttcagaagggttgtccggtgaatattcagttttccatgctaattggaaatatcttgcatatttaagggtgtacggtgggaagggactaagcaatgatgggtatacagcaagtactcaatacatcctgtggctttattatactctctttttgctggtagaattttctgctacacacatgcattccaggcaaagggaagagactgcgcccatgctcagacccagaaacaagcctggatccataaaacagcttgttcacaatggcaggagcacagcacaggagtggggaaagtagaggaaaagaggtatgagtagtactgaccacgaaaggaaagggagttgcccattcaaactaacagatgagaagggcttcatggacgagatgacaacanatagtagcattagcattcattgagatttaggacatcgcacaacattntagaaatatgtacacttagtctaaaacagggacctgcagtccagatgggaattcttgacataatcacatcatgagaaagctgagccaatacgattcagtgtttttggaaaatgtaatcttaggg

SEQ ID NO: 646835 - DNA, 172 bp, Homo sapiens
tgcacactgttgccgactggagcgtaagtcatatttgtggccattgattaaggggcactcggaagtagaagagcagtgtgatcaaacaggggccccgcgtactctgcttaggaagaccgtcacccagctgatctgggccccctggtcccggaagtaccgtgtggccgtggtg

SEQ ID NO: 646836 - DNA, 95 bp, Homo sapiens
atatgcacaaagatgctaaaaagggcttcatcaggctggacatgtccgagttccaggagcgacacgaggtggccaagtttattgggtctccacca

SEQ ID NO: 646837 - DNA, 258 bp, Homo sapiens
  misc_feature (45)..(45): n is a, c, g, or t
  misc_feature (83)..(83): n is a, c, g, or t
  misc_feature (88)..(88): n is a, c, g, or t
  misc_feature (91)..(91): n is a, c, g, or t
  misc_feature (100)..(100): n is a, c, g, or t
  misc_feature (104)..(104): n is a, c, g, or t
  misc_feature (189)..(189): n is a, c, g, or t
  misc_feature (197)..(197): n is a, c, g, or t
  misc_feature (199)..(200): n is a, c, g, or t
  misc_feature (250)..(250): n is a, c, g, or t
ggggggggggggcggggcttcctattacacacaaatgcttaagtncatcccctggtacgcatgtgtaagagtttctctagggnatgtntcngggaatggntggntacgggagaggttatggcacacccacttataccaaattgtttcccgtttcccaaagttgttgtttctaaacattcttaaatctgntgacaaangnnctatttgggatggctgggggggagaaatagatcagctacaaaactcttgnatttttaa

SEQ ID NO: 646838 - DNA, 321 bp, Homo sapiens
  misc_feature (235)..(235): n is a, c, g, or t
  misc_feature (298)..(298): n is a, c, g, or t
agcaatgctctaataaaggctctctgaagtgacttcacccttgcagtaagtctctgcctgggcccctacactttcagcaacatcctttgaaatatgggtggaggctgtcatgcctccctagctgttgcatttagtggccctgcagaattcataccacattgatacctccaagttttatgtcgtacacctttggggagcagcaagattgaggccacaccttggggccactgggagncttcagctggggggtgggccaagggagtgctgtgctggaaatgcagggggaacagataacccngggggcaccttgaggcagcaagc

SEQ ID NO: 646839 - DNA, 825 bp, Homo sapiens
gggagcccttcctggcagtggctcatgcagctcagtaatgagtacagccctgccacatgtgcatactgtagagctatggagatgatgaggactccctcaatcaggcgctcgtacatccaagcggcgtcgaacatcgtgacgctcatgagaggctagtcgcatcggaggtctcaccctgctcattcgcctcaggtgacatggggggccgggtgttggtcggtctctggaagacaccagttccggccttactctgtccctgtcgatccgaagcgctccgtatgtcaaccacatgctgaggaggcatcatccgttccatggaacctttcctcatcgcaatagtgaaattgttagacgtatatcatcggtggtggcgttcagcatagtgttgttcccgagctggccttcattagccaaggaaggaatgctggtaaaccgaagttcctgtagctctaatgcccccacgcgtgcacaccgattccaggttagcttccagatggccgaggtggcactgtagcctaaccgcagatagttggctagcaacttatactagatcggctaacgtgggttggtcagcaacgagagtgcccattccatggagtgtccggaacctcgtggctctactccagtgttaggaggggatcctatacctatgatcacatgagcatcaggatccttagatggctcgccccctacttggcattactcaagccaaggctctaccagtccatgcatggggctacgtgactctttgatgttacccgtggttgccatgagtcctgtctggatgaagaggtcagagggccaggggttgctagtgtggtactg

SEQ ID NO: 646840 - DNA, 946 bp, Homo sapiens
accgggcatgggagcgtctgaggagtgcgcggtgccgctgctgtggctcgggacgccgagcgcgccgggcggagcccctggacgaggcccaccggagccgtcggcccgacccagcgcccgatgtcctcaaaatggaggcatgctgtgggtgctgtgctggcgtgtaagaaagctggtgctgtgggcgcggtgagtagggggccctgtgtgctgtgagtgcaggtgtgcggggagtggcggctaggcttgtctcactgcatccgtggctgtctgtgcctgtgctggggttccttctctcactgctcctctgcccagttcttcctgctgtaccgcagacagcccgatgccgccggctggaccgaggcctgccgctgcgggcgaggggcttcctgctacatcaatgccagtgccggtgcctgattcctaaggggagtaccttttatggcggcggccggggatgagggagaccctccggagacggcctcctgagtgggcgtgccgctaaccaataacccgactgaacaaccagtcgtaaacacactgagccagtcacgaagcacacgaagcacgaactagtgacaacggagcggaaaacgcaccagagatgacgtgacacccatagatatcacatgaaacggcagaagaccgaaaaacaagagaggagaaacacgaaagacacgggtgcaccccacgcaggacccagcgcggcgggaccgagcgggcagaagagcgacgacgatgcacgagacaagaagcagagaggagcgagcgaccggacgcggacaggcaggtgacacgggaagtagcggcgcgggacagaggggagacacagggccggcagcgacggcggaggacagacagcagcggcacgaccgcgggaagacagcgagggcgcgggggaaggccacagggcccgacggcggcgcaacccggaaggaggaccagg

SEQ ID NO: 646841 - DNA, 302 bp, Homo sapiens
gagcaggcaaagagagagagagctggtgaagggagctcctctttttaaaaccatcagatcctgtgagacttaatcactatcatgagaacaacatgggaaagatttgaccccatgattcaattacctcacacttcgtccctcccacaacacgtggaattcaagatgggatctcggcggggacacagacaaaccatatcaacatgaataaagaaaatgtgaaaaaaaaatgggatattattcagccttaaaaaaagaaggccccatctctactaaaaaaataccaaaaaaattagccgggcatg

SEQ ID NO: 646842 - DNA, 162 bp, Homo sapiens
ggcctcgtaaagatctcaactcacacggcaccgctctcttactttctcgctatcaaagggtatagggtctccccctccaaggccaactctccatctccatgatgacttacttaggaattcaactttcccctggggcccaggctatgactccagccagggcag

SEQ ID NO: 646843 - DNA, 179 bp, Homo sapiens
tcgcaggagaaagaggttttcagaggccctgaggacatggctgcccttgagaaggatttgaggaggttggtggaatttgttgaaggagagggcgaggaagaaggagaggatactaaagttaaaacgtcacaaggtgtgcttttaagggagctttcctgttttaaacatgaaagtgtggc

SEQ ID NO: 646844 - DNA, 109 bp, Homo sapiens
  misc_feature (47)..(47): n is a, c, g, or t
agggcacacaggtggtgcaggaaggagtggagcatgggttacagtgncagcctgcaggagaaaagtcaacagagaaacaggattagtagagaaggccactcgcgcacag

SEQ ID NO: 646845 - DNA, 300 bp, Homo sapiens
tgagtctactatgctactgatcgaatgtaacattttggaaattttgccaaaaaaagccgagagaaaaaaatgaaaaatgtctctgctcctcctgttcgtctgtcagccttatcttcttttgcgtcgccagcggagccagatcgctctgacaccatggggaaggtgaaggtcggcgtcaacggatttggtcgcatcggtcgcctggccaccagggctgcttttaactctggcaaagcggatattgctgccataaatgaccctttaattgacctgaactacatggcttacatgttccattat

SEQ ID NO: 646846 - DNA, 236 bp, Homo sapiens
tctgcagaggaagtgtgaaccaaacttttaaaataccagggaggatgaggtggagtggattgagaacaggagtggaagaaaaaatttcaacccacttttcctggtgattatttaaaaacaaaaaatctactatttaatgtttcacaataaagtgttttagaaaaagtaattagctcggccagcttctgccccaggatgtagaaagctggaagcagtgttgttcacatccttaaaat

SEQ ID NO: 646847 - DNA, 250 bp, Homo sapiens
tgacctgaaaacttgttgacaagaatgaacaccaacaacgtgctccctgggctgatgtgaccctttcttgcctccctaccccgtaatgctgaacctgagggagacaacggttagatggagtgagcagggcagaaatagcagaggggcttggagtgtcacatcggtggatggtaaacgagaatgaggagaacaaggagaggagggaatagcagaatggatcctgtggacagagtttggaaggttgctaggg

SEQ ID NO: 646848 - DNA, 130 bp, Homo sapiens
gaaagaaagaaagggaggaaagacaaagaaaaaagaaaaaagaggaagaaaggaaaggagaaagggaaggaggaaaagagagagaaagaggaaaggaagaaagagaaagagaaagaccgaaagaagggga

SEQ ID NO: 646849 - DNA, 123 bp, Homo sapiens
ccccccccccccccactaattttttttgagacagagtttcattttgtcacccagactggagttcagtgagcccagatcacgccattgcagtccagcctgggcagcagagcaagactccgtctc

SEQ ID NO: 646850 - DNA, 272 bp, Homo sapiens
cggcagatgatccagctcggtccattcaattgcgtgtgagcatcagacccagtcatcacatccattttttaataatagagtatgggtgtctataagctcacaaattatcctacatctttctcattgtggcctgttttaatagtattatgagatgggaatattgatgttcctgtgttggccctgaaccagatgtattctactttgatgccacctgcattgtatctggggttttgcattatatgtcgtcacaagatggccccccgcgattgaat

SEQ ID NO: 646851 - DNA, 257 bp, Homo sapiens
gaggaagatctaccaagcaaatgagacaaagcagagtgcatctagtcttataacagcttaaccacagtcaaagagcataggcatacatatgtaagtatcattcacaagagagctactatctaatatatatgcaccatacagagacagattcataaagagtctgagtcactcaagctagactccacagattattaatggggactttaccacccactgtcacattggcaggtcacggggcaagaggtcaggatacccag

SEQ ID NO: 646852 - DNA, 108 bp, Homo sapiens
atgtagtattgcattacagtgttttgggaacagctcgatacttgtccattctctgcatatactggttagatgaggtgagcctggtgctcttctttgcgctgatgctaa

SEQ ID NO: 646853 - DNA, 561 bp, Homo sapiens
gcctagagatcccgactagtccaaccatacagggaagcattagggtttgatacttatgtcatacattggtgttgtagctttgagcaagccatcattaacatttctagcgctctgcctcctctgtcagaggaaggctggtcagaggactaaagccccttatcatctagggctactgtcatccccttgtgctcgaatatggtagatagaaggctaaaggtccccctgagtaaaaagaggggtgaggtgttagggtacaatttctgcttgaaatcgatctgagtatactggaactcattagagagtttcattttttattccatcactgagtagaacttggcttgaacatttgaggatagagacataaaaagatcttaaggagtttctccaagaagtcacatctgttagttaaagcctgtgtaacgatcttgatggtgaactggtactccgaaagcagtggtgtatcgtagagacatcacagtgtcactggttccctatttcacttagattctccaaagcttcaaatagcagatctaaaagcatcaggcatttgtcggatgactg

SEQ ID NO: 646854 - DNA, 103 bp, Homo sapiens
tggcttgaagtgtcgcatctgcaacagtggctttcatgtggaaggcataggactcaagtgaattctgggatgacacctggtcccctctggcttctcatcttca

SEQ ID NO: 646855 - DNA, 167 bp, Homo sapiens
tgtgtatagtgtcacctatgctagactcacccggagatcagcacatcccccaagtactgcggctcctgctgtgctccacgccagcccagcgctatggcggatcggatcaacatcacgaggaagggcgcgtggccctccacccttactgtccgtgcagaacgtacatc

SEQ ID NO: 646856 - DNA, 188 bp, Homo sapiens
  misc_feature (7)..(7): n is a, c, g, or t
tcagtantgcagttctgcagagggcaccctggaccctgagacgggctcctattatactttctctctctctacagtgactgggcttcctccgtgcagttttctgcaactctggagaagtggaggcatacttgtgtgtctgggttgtttttttttttttttttttttgggcattcttaaattttgggtgg

SEQ ID NO: 646857 - DNA, 592 bp, Homo sapiens
agcgggctctcgcctctcctgcaccctcagccggcgcgcttctcttatgggcgtctgctgcattctgggctgcggtcgaactgaaagcggcggcgggagaccacacttagcaccccgctgtggactagagaactcagagaaggcagagggagagggagagagagagagagaagggacccggaggaggagcgcttccatcacgtcattgcaagatgttctggaagctttccctgttccttgtcatgggttggcggtgctggtgaaggtggctggtaagcccggaaagaaccggtcggcgggcgccatccactcgccttacagaggacggcagacctgcaatcgaactcggagagatggctgccaccacgatcgaggaggtactggcctccaagccaggaggccctggcggtcacacgagcgcgcagtaccgtcaagagtgacttggtgcaaagaccgcagcccgcctgccggcacgacgggagacgcgaggagggctgccggaagccgaaacaaacgtcaaccgatatctgcatacggccagagcaactccttctacatgcccgaggggcctgctgaaagaaggaggagagaa

SEQ ID NO: 646858 - DNA, 618 bp, Homo sapiens
  misc_feature (192)..(192): n is a, c, g, or t
  misc_feature (308)..(308): n is a, c, g, or t
  misc_feature (320)..(320): n is a, c, g, or t
tcgcgtttgcgagggagggggtagaagcaccggagggatcggtttgggagcgggtccctaggcggttccgcgcggtttttagtagccaagactgtatccctttctgcggcaatcatttcctcctagacttctgtcctttggggactttcagagtctcccccgcaagagctgaagaggccatttctggggaanaggggtgactgcggcttgttgattgggtttactgtgctaacttgcactgggctcctgccatgccttgggggagcttgccggagccggctctcctggggctgacctggtagtccccnccgcccgccagngtcaggtccttcacctggcatgcagagcgatctctcattgtcaagttgggataggtggccccgaacccatgaaatactgattggctgcttcctaggcccccagaaaagggatctataagggagtcgcctggaaatctgtattattaactaaagtgtcagatgattcataaaacccagcaagtttgagaaacttggactataactacaagtccaaaccctttagtctgtgctcaaatgaattatcctgacatgaatttctggccaccaagcattgagttaacaaatttaaaaaaaaaaa

SEQ ID NO: 646859 - DNA, 456 bp, Homo sapiens
taagagaagtgggctaagagggccataaaaacactttaaatgagattccaatggagtttccctggtatccatgaaaataaagcccaccatggcaaataaagtaatgcgaactgatggtcagaataagctgtgtaagccatgggaagtgaggttagaggtccgtgtgtcttcacttgcatgtgagtgatcgcgtgcaggaccttttgctctccgggtcctggactccacagtgcttgttcgggtcaaacaccctccctgtaaacaccagacggagagaaaaaaaaaaaacccaggtcatcacggctaatttcagaatttgtgcttccggagtaccacgaaaacttcttttgccaatacattgtgaatgacaggagaaaagtgtcttaccacgtggtgtaaaaggacctacagaagactgtggttcgactagaaactcccaaattctcctgagaagtt

SEQ ID NO: 646860 - DNA, 123 bp, Homo sapiens
aggtttctcgtgccccgtcctactcgatttcatgactaagagattttcgcgtacagggctatcacccactatggccgcactttccagagcgttccgctaatctcaaagccacttaagggctag

SEQ ID NO: 646861 - DNA, 157 bp, Homo sapiens
  misc_feature (33)..(33): n is a, c, g, or t
gtcgttctgaggatcccccccttcccccacagntgaggtgattctgaagccagcctggcgccaactcccacagagccaccccctccctacagcttcaggctgaagaatataccggggatcagaggggcattgacaaccctggccttctgatgtcacc

SEQ ID NO: 646862 - DNA, 1093 bp, Homo sapiens
tggtggttttctaattctatcaactcttttgcaactattagtgtgacttaatctataaagaagaatttttctggtacgctttagcctctactgggcactagaacaacaaaacattactatctacaggtactggtaacccctgcaacactacagattcatactggcaaaggcagcaattcttatcctactaaaattcctgaataatatacataatcgctattataccttaagaccaagaaagctgtaagcacacattatgcttaatgctaaccaccattaaggcaccttcgaaccgttgacgcagacatctataacaacaagacgtcaaataacttaacacattctccacgtcaactaggaacaatggcatacaatgagaccgataaatagaatggtctgcacacgcataaataacgaagacatgacttactggtacacatctatacccggaatactgcgaggatgtagactccagagcacaaactacagaaaaataaaatatagagaatacactctaggcatccttaggccctcagctgggctagagcaacgtcacaagaagcaaaacacaaatcacaaaggaacaacgaggacgccagcagagttacactgaccatcactctgcctcatatacaacagaaagcccatgaggacaagagcacaagacactcgacccaacgaaccacaaaaactgcgaaaccctaaacgatccctcacgagcagcacccttatcgactaccctacttcctccaaagcaacatattacggtcactatggtattacactacgtttggatgggcaatagaactttggtcacactgctgaaataaagtactattagtaagacactgaaacacaacaggctttggatatcaacaaaattagtgcccgaacaacgtactacaacttggcagataaaataggtaacacacggtgaatacatgatattagaggagacacggcatcagtcatcctcgaaactcgagtgtacaccatatggcatacgcgcaaaacaccggctcatacaaacaccagcacaaaaaacaaatagtacgcatactcgagaatattatacagtggcgagcccgaatga

SEQ ID NO: 646863 - DNA, 206 bp, Homo sapiens
  misc_feature (172)..(172): n is a, c, g, or t
  misc_feature (197)..(197): n is a, c, g, or t
tgaaaatttattaattatttactgctgttagatgaaatgaatgagcctacagataataggatgtttcactgtggtgtatgcatctgggttagtccgaactaacgtcggtgcattccgtataggccgagaaagtgttgtgggacgaacagttagatttacgccgataaatatngtgttccgagctcgatttccgtaantcttggtca

SEQ ID NO: 646864 - DNA, 1230 bp, Homo sapiens
taattcctttttttttaatgctgaattttactcccgggccataagtttttgtggtttctttcagtttctttcgtgggattatctttttctcttctgtgggcaacctctccttctttcgtggttttaggaacaactcgtggttcctttttccgataaggatcatcttcaatgtgtgtggcagggaaagagcctcagtgtttgtgggtttaatctccgacccagtgaagcttcgtgatagcgctccgggggggcgcattcttatagggtgctgtgtggtctcacttgtgcgatatattgcctcaatgtgaccaagagaatatcttacatatcttacaaccctcttaaagttttccagccatatttaacttcttcgtggcgggtattttattaaagcattgtgtgccaaagccaaaaaatattcaaggaccacttctttttgggggggcccacgcgacaccctggtgtgtcccaaggccccacatgtgtccttgtggccccgtgtgcgccaacaacccgtgcccaaaacttcccacccattgtgtttacacgtctgcgggaaagtggtgttacacagcgtgtgtatctcgtgagtaaaaagggtgaacaatttcttttcaaaaattcacttttcggggggctatatatcgcggtaattagtgcctataccccttttggaggtgccgtggagacaagtttcacaccgaaaggttggttcttatacaaagggttgaacacacagaaagaattgtggcaacccctcttttggactttgcgcagtagactttccggggggggggaaccccccgggggcccaacgggtgcaattatggcagacaccccacttttttccacaagacttcacccttcaggggccagatctaagacccgaacatcactaaccttttagggagatctccacagcagagggcccacaaattgttctacaaaccccccatgttgcgagcgtggctaacaacggtctggaagacaacagggaatatgtgccacaaattggggagccaggtgttcaccaaggggagtagttaaaaaacaccggtggaaaacggagcatacgtgcgggcccacacataggacccctctatatagcaacccaaatcaagggtgtacatgctcccaaagttgatcacccccgtgcaaatccaatgagaacagaagagagaaaaggacagatgcgatcaggggaaacgcccaacctctgatcgaagaaac

SEQ ID NO: 646865 - DNA, 731 bp, Homo sapiens
gcaaaggcccaacagccgtgacttcatgaacatccttatcatcttctactgatgcatgcaagctatacgtgtccatgagccgctcccatcctcagtcctccattgagtgtactcccagccatgtaatgtaggcaggtggcgcgcgtgatcactataagctgtgtttctccctcgtcgcgcagggattatgcataggtaagtacaatctgttgcttgcctgtctaagaaaagacaggagaacaaagaagacaaatcaatccaaactgacctataatcatccagcgtgagtccacacctggatattatctcgctgaagggagcacaggtattactggcaaaccttagtatctaagcctacaggggagacccacagatttagcagtttattgatccgacggcagtctgcccgcatcatgtgccggagatctgcgtagggaagggctacacagcgacggcaggaggctgttctggtcgattgtccctgtgaaaccagggtgaagtggggatcttgaagggtcctaggaccaaatgtctgtgatcattcccggaagtgacggtcaaatcatcgagcaggatccccattgttcagccacgcaaataacgaacggcagcttgttcatcaagatgggcagaacaagaactatggtccgggatgcggtggcccacaggctgttattgccaagcatttggggaaagcagatgccgggtggactggcttgaggcccagggag

SEQ ID NO: 646866 - DNA, 331 bp, Homo sapiens
tgggcgacagagtgagacaccgtctcaaagaaaaaaacaaaaaccaaaaattatccaggtgtggcggtgggcgcctgtgaggcaggcgaacctctgcctcctgagttcacgtaatcctcctgagtagctgggattgcaggcgcctgccaccatgcctggctaattttgtgtttttagtggagacggggtttcaccatgttgtccaggatggtcttgatctcctgaccttgtgatccacccacctcagcctcccaaggtgctgggattacaggtgtgagccaccgcgtccagcctgggcaacaagagtgaaattccatctcaaaaagaaacc

SEQ ID NO: 646867 - DNA, 167 bp, Homo sapiens
ctttcaaaaaaaaaccaggagttcctgtcttggcacagtagaaacaattccgactaggaaccatgaggttgcaggtttgatccctggccttgctcagtgggttaaggatccggcattgccatgagctgtggtataggttgcagacgcagctcccgcatgttcgctgg

SEQ ID NO: 646868 - DNA, 265 bp, Homo sapiens
ctagctagaaatatgattttatttgacaaaatttgttgcgaatattgtatgtttacatatcacctcatgggctatttatatttacaatatggctataaatatataaacacgaacagatcaagatgatctactcagaaatttttatttttctaaggttctcctagggaaagtacatttaatacagcagtgtcatccagaagataacttgagcaccgtcatggcttaatgtttattcctgataataattggtcaaattcattttttc

SEQ ID NO: 646869 - DNA, 184 bp, Homo sapiens
tgactctagagtgatcccgtgaggaccagtgctgaggacaatgcgaggcctgtcttaaaaacaaacaaaaaaaacaaacctcttgatttcacccaccacagctcccctccacattgagagaaccatattttgcgttgcggcattgaggctgccccacccctggaggaagagtacccgaaagtct

SEQ ID NO: 646870 - DNA, 520 bp, Homo sapiens
atggagctctcatcgcctagtcaaggcgagtcacccattgactacctcaatcaaaggccatcttctaccccgctcaccctgcggaccccgagcaggtggcaaaggccttgccgttgtcctccaacaaagtctagagtgtgatgatggttgtcgttcgacaatgagaaggtcccagtacagcagctgcgcttctggaagcactggcattcccggcaacccactgccaagcagcgggtcattgacgtggctgagtgaaaacaatagttcaacactgtggagcacattgaggaggtggcctataatgcactgtcctttgtgtggaacgtgaatgaagaggccaaggtgttcatcggcgtaaactgtctgagcacagacttttcctcacaaaagggggtgaagggtgtccccctaaacctgcagattgacacctatgactgtggcttgggcactgagcgcctggtacaccgtgctgtctgccagatcaagatcttctgtgacaagggagctgagaggaagatgc

SEQ ID NO: 646871 - DNA, 99 bp, Homo sapiens
  misc_feature (24)..(25): n is a, c, g, or t
aagacaatagtccacgaaagtgannagactagaggccttaaaacatgctttgcactgtacgatcttagcatcagcagggcagcagcgttctcggatgct

SEQ ID NO: 646872 - DNA, 836 bp, Homo sapiens
agcgggagagggtgggggcgaaggggaagctacgtcccggaggtgcggtgtggggcaccgggcggggccgcgggaaccggcgccccacggagctgctgctgtcagaccaaccccagggccccacatcatcacatgcgccgcgctttcaggcgccgagaactaccaggtccacggcatgccactgaaagttggcctcggcgctgaggcggggtccggccctccacgccgcgtcccgtcgcgcgacgcagaatcgcgagtctgacgagctcatggtaggatggaggcgatcagtccaccgggcgctgggcgtgcagacaaggcgcggcatcgcttggatgaatgcttggacccgtgaggtcagtcacagcggcagtcacgtagtagatcgttcgcaccgagggtagtgagctgagagtgagcctatctattagaaacagtggctcctggactgaacgttcatgatgattattcttcctggtgatactaatacagaatatacattgtgtggatgcgcgtgaaagatcgtgagaagaatctttgtatcctgtagtgactcaagtaggacttacctagcgatgatcatggcagatgtgaaagtctagtggtgaagcacagtcatttctcactgtgagaagtcgatggcgaagtgtaaccagcgatcatcaaataagctggcactcaagtcatcattccgagatctgtgccaatgttattgcaacttcactaattgcatgccagatccgtggcaggaccgtgggaggtacgatacaacattgaatgcgcagatgatggatcagcgcagagaacgcctcacgtttgactcgtcgcagtgtgaa

SEQ ID NO: 646873 - DNA, 257 bp, Homo sapiens
tcgatctagaggatcccgagaacaaaacacaaaatgccttggtctaactgagccagctctcaggggaattggtcttaatggtctcaagcggtgtggcctgtgtgaacaatgaggatcttggcttggttaggctatctgggggagaaaattgggatcttcagggagactgcaacttttttttttttggaaacagagtctcgctcggtcacccaggcgggagtgcaggggcgcaatctcggctcacaacaatcccgggg

SEQ ID NO: 646874 - DNA, 178 bp, Homo sapiens
gcatttagatcctgtgttttaaccatcacagtaaatggctaaaacataagtattcgactgtattttagaacttaagtatttatttgggaaattggttctcgattccagttgttgatgttaagaacatgtgtagtatgggcactcttcttcacaggtctgcctagtgtacaccacatat

SEQ ID NO: 646875 - DNA, 570 bp, Homo sapiens
agagcaaaggaggggagaagccccttataaaacatcagatctcgtgagaactcactcactatcacgagaacaggatgagggaaactgcccccgtgattcaattatctccacctggcccctcccatgacacatggggactatgggaaccaaaattcaagcaggcaaatttgggtggggcaccaccagccagcaaccatcatcagttcagaatcaggcaacattccatgcagctgtatttcagacatcaaaagcagcactccagcacagtcagcagtgcccatgcgtgcgtgtgtgtgtgtgtgtgtgtgtcagagacaggctgcccgggcctcaagagcatcatctacatcattcctgaggtattagggagctaactagacctgcgattaaacatacaaacaacactaaatatacatgagtacttacatcttcatgaggtcttaattcgaccatccactggtgaccacccattcaggcaccaggtatactctgcccagtaaaacaccaataacacccagcaaaagataccacgtctagagtagcgaacagaatagaaacggaaacaagaca

SEQ ID NO: 646876 - DNA, 305 bp, Homo sapiens
ttctactataaacgatacatgcacatgtatgttgtatcgcagcactgtggagggggagcaaagacttggaaccaagctaagatgtccatcaatgatagactgaataaagaaaatgtggcacatatacaccagggaatactatgcagccataaaaaagattgagttcatatcctttgcagggacatggatgaagctggaaagcatcattctcagcaaactaacacaggaacagaaaatcaaacactgcatgttcccactaataagtgggagttgaagaatgagaacacatgggcacaattatggag

SEQ ID NO: 646877 - DNA, 475 bp, Homo sapiens
  misc_feature (53)..(53): n is a, c, g, or t
  misc_feature (79)..(79): n is a, c, g, or t
  misc_feature (357)..(357): n is a, c, g, or t
gggggatacacccgggacacttgccatgcgcaagtcgaattacctcataaggnaaaagtggactccacgcgtgcgccgnttagactagtgatccccgggtgcaggaattgcgccgcgtcgatcggctgcgagaagacgacagaggccaccatcactgcctatcatttgtaaaccagcccatgaccctaacaggggcctctcagcctcctaatgactccggcctagccatgtgatttcattccatcctacgctcctcatactaggcctataaccaacacactaacctataccatgatggcgcgatgtaacacgagaaagcacataccaggccaccacacaccactgtccaaaaggccntcgatacgggataatcctatttattacctcagaagtttcttcgcaggatttttctgagcttttaccactccagcctagccctaccccccaattaggagggcatggcccccaacaggcg

SEQ ID NO: 646878 - DNA, 408 bp, Homo sapiens
gactgatctttcatgtttttcttttttgattctgttctatgttgtcctgatggaggggtaagcccctgccttctgcctttcctgccttggactcttgcaattgggccagatgagagggtccatgtggtctgagaattcaagcaatgcaggccaggtgtggtggctcacacctgtaatcccagcacttttggaggccaaggtaggcaggccaggatttcgagaccaggtggccaaaatagtgaaaccctgtctctacaaaaaatacaaaagttagccaggcttggtggtgcgtgcctgcaatcctagttatttgggaggctgagcaagagaatcacttgaacccagaaggagcaggttgcagtgaggaggaggttgcactgaggaggaggttgcagtgaggaggaggtt

SEQ ID NO: 646879 - DNA, 554 bp, Homo sapiens
  misc_feature (28)..(28): n is a, c, g, or t
  misc_feature (32)..(32): n is a, c, g, or t
  misc_feature (37)..(37): n is a, c, g, or t
  misc_feature (43)..(43): n is a, c, g, or t
  misc_feature (59)..(59): n is a, c, g, or t
  misc_feature (69)..(69): n is a, c, g, or t
  misc_feature (75)..(75): n is a, c, g, or t
  misc_feature (77)..(77): n is a, c, g, or t
  misc_feature (80)..(80): n is a, c, g, or t
  misc_feature (465)..(465): n is a, c, g, or t
  misc_feature (472)..(472): n is a, c, g, or t
  misc_feature (520)..(521): n is a, c, g, or t
  misc_feature (527)..(527): n is a, c, g, or t
  misc_feature (529)..(529): n is a, c, g, or t
agagccccccctaaaaagatatttattntttnaaccnagcccngtttgggctgcctggnggtgcaccantcaggntnttntcctttcacaaccttttgtggctcccagacccttggagccaatggagactgtctcaaaagggccctggtggccccacaccttggcccagggcagtgggacagggcatggccaggtggccactccaaacccctggcttttcactggtgggtgccttagaaccttttttacattaacagtttgctttggaagccccttgtttttttctttgggtcttgttttttttttccccttaaaaattgcatttcctgacaaaaggactcaggttgtttgaagtccctgcccagtgcatttcagcccccatagtgatggttcccctgttccctttacttagcatgtccccaccgagttttttttcccctggatggaggaaaaccaaaccgtggntttccgntcagccctccctgcccctcccttcaacccttccccatgggaaatgtcnncaagtntnaataaaaaccccttttgggtggcca

SEQ ID NO: 646880 - DNA, 110 bp, Homo sapiens
ggatttgctggtgcagtacaactaggcttaatagggacatgccactgcactccagcttgggtacacagcaagactcttgtctcaaaaaaagaaaataaattaacgttaga

SEQ ID NO: 646881 - DNA, 890 bp, Homo sapiens
  misc_feature (668)..(668): n is a, c, g, or t
tgggaaacctttaaaatccctcaaaaacggtttattatacaagtgagtttggagtcacgatgggcttatcggtaggattctctggtagcgagcgcgggcaccagggcctccaaacttttgggactcgcagcgacgagggtcagcttaccagcagggtctccggtctcaatacgtggagtgaggatgctctatggatcctcctttctggggaagccctcactccacaatatttctcgtggataaaataggccaccagggctttgggagagtggacgtgacggaatagcaataacatctcgtggcgccagcgtgtgaccaaccaccctttataccagcggaaccacggggatttgtcttaaccaccaaggccaaaattcggctctccttgtgcccggagagaaccgcccagagaaacttgggtgctcctcccatcgacagccttttggggtcaccttgatacgcgagatagcccggcagggcctacaaaatcgaactctctcaccaggggggtggccactggccacttggttccacccctctttgaatttggagagaaccccaatttggcgcccgggatgttatagggccagtggtgtgcgcgccccaaagtgcttgtgctccccgccatggagtcatacccatagagcgagctcccaggaaagagaacncttgggagaaccgagagtcgtgggccgaaggcgggaagaacccccctttgtggacgcaactgcgcggggcaatatggggcggcccctccccgaggaaacggccgcggctggagacggaacccaataagaggaaaccacaaaagccgcccttacaaaacccacgacggaggggcgcaaggggacgcgcgacaaaaagaaacaaccaaaccccaaaaataatgg

SEQ ID NO: 646882 - DNA, 346 bp, Homo sapiens
  misc_feature (341)..(341): n is a, c, g, or t
gacatgcgaagccaatattaggtcatggccgagcagaaccggaaggatgcttaagcctggttccccagccggacttaaaaatttaaccgggaggtcgctggccccccggagcagctccaaattagcaggtccgaggttttttaccttcggcgcacccttcagggtttttagatttagctgcagtccctacaacaatttgtttgcctccaaggtccttttaggcagcaggctttggggcttttgctgtcctttggagggtgttttttgggtaaagggatgggaaggaagggacccttacccccggcttttttcctgacctgccaataaaaatttatggtccnaggga

SEQ ID NO: 646883 - DNA, 168 bp, Homo sapiens
catcgagctcggtcccccgccgtacagttgcgtgggcgaagggcggggcacgagggagagaaacaatgtcttgcggctgctgttgctctggctgctgctccacggggcttgtttggatccccctgcagtgaaacaggtcctgtacggctccgcaactggtacggcggg

SEQ ID NO: 646884 - DNA, 289 bp, Homo sapiens
cacacatgtccatcaatagctctgttgacgttgtgttgggagaagcggctggatgtcattctctcacccccttatgttgatgtctggcgtgtgagcagccagtatctacacgagctctgctgcttggggtcatggcatgagcggctctcttgatgtcttaagaggcaggcctctctcattcttgcttttaatgaatcctccttcctcacacctgtgctcctctggcttcagcttctcagcagcaagcaccagccttccacaataacactatatttttatgctactttcc

SEQ ID NO: 646885 - DNA, 349 bp, Homo sapiens
  misc_feature (90)..(90): n is a, c, g, or t
  misc_feature (250)..(250): n is a, c, g, or t
gaagatgagagacaacaataggatgcatataaggtgtacttcttatactgtgctcttggagtacgcggatgagtacttcccttcagatgncacggaaaagctttgggcttaattgggaagtaagcttcttctttatttggaaaaatgaaatccaactgatacttcttagagaggagtggcatccctaggcagctgatttaagaaaatgtcttaagacgtctttgagtgacaaagcctaagaacccagacnatcctggatgagcaaaggtaggcaggaagctgaattgctgagcatgataaaatgaagtgaagccttgtgtttagggtgggcacaactactgtctcagag

SEQ ID NO: 646886 - DNA, 392 bp, Homo sapiens
attaacatgtgtgcacatggacatacgctgttgaagtatctctatttgctatccccttgggttagagattgctttctgctactttcttacctgccttcatcctaagttgggggtccactgcagatcctgaacaagtgtatctcacgaatattcccccatgtcctgtcatagctgtacctcctgtgtaagaatggacaagtgtgttcaaggctggcctgcctttgtaatcagtcctccgtgggctatgctgggatcccactagttacgcactcatctgttgcagcatatcagctgcggctgtactgtagaagaatgcaacgccctagtggcaaatgctgactccaggaatgcggaggaggaggaggactgcatagctcatcactgggggccat

SEQ ID NO: 646887 - DNA, 471 bp, Homo sapiens
  misc_feature (305)..(305): n is a, c, g, or t
gagtttcccaattcatagaggccacggcagtccactgtgatgggtggtttctatatactgggcacttttgaggtgctcctccaccagcttgggtgtgacacagatacacgtgctggcccttccagtactatgcccatattagagggattgcagtggtactagatgatgtcatttggcggtgatactggtcatctggctagaggtccttgcatggacagtgtgccccgggaagtcccgacaggatctccagacagcacccatggaccatgtagcttgcggtagctgaagcttgcccaaggtcagancagcggacttctccgtgggagccgacttgtgctctcacagcttggaggaagctcattaactgacaagcgatagaggaacttccctgtagccgcggcagtaggtaaggggggcaagagtcaggatgcacggccacatttgtttccattccgtggtgcctctaaattg

SEQ ID NO: 646888 - DNA, 753 bp, Homo sapiens
  misc_feature (166)..(166): n is a, c, g, or t
  misc_feature (201)..(201): n is a, c, g, or t
  misc_feature (381)..(381): n is a, c, g, or t
  misc_feature (417)..(417): n is a, c, g, or t
  misc_feature (442)..(442): n is a, c, g, or t
  misc_feature (564)..(564): n is a, c, g, or t
  misc_feature (573)..(573): n is a, c, g, or t
  misc_feature (721)..(721): n is a, c, g, or t
  misc_feature (727)..(727): n is a, c, g, or t
  misc_feature (737)..(737): n is a, c, g, or t
  misc_feature (746)..(746): n is a, c, g, or t
ggccgagaccccggaggcttgggtggctgcagggtctgcggcgcgcagtgtttcggtaactgctttgcctcccggtcccgcaggaggatgctggtggtggaggtggcgaacggcgctccctggtgtggggagccgaggcggtgcaggccctccgggagcgcctggntgtggggggccgcacggtaggcgccctgcccgggncccgccagaactcgcgctgggcctcccgtgctgtgatgcccgaagaggcgcggtcttggccgagatcggcgccgtgactctggtcagcgcccggtccagactctcggcaccacagcctggcctgaatccttcaagcgccagcaagaggagagcttccaggagcagagcggcctgtggcangtgaggccgggagacccgtcgtcagggagctcctgnagaaagatacggagggccagggtgntaagaaagcagaaactagaacaggcttcaggggccagctcaagccaggaggccggctcgagccaggtgccaagaggatgagacctgtgatggccaggcttcgggagagcaggaggaagctgncccctcgtnttcccagcaggaccctcaatgggtagccccttgcccagatctgctctcttgtcagctggcactgcaggctcgaccggtcaaggccgggccctggactggcgtgtccagtctaaaagactggcccacgccggcgcctgccacgagtggntacagnattacagaanctgggaacnaggttct

SEQ ID NO: 646889 - DNA, 417 bp, Homo sapiens
aaaaacccggcccttagggcatcaggaaaactagctcccctgccccggaggatttgctcagtgcttatggcagcccacctgtgtggactcagggggcttttagggctagggaaacaggaagggccttttttacaaggtaggagctgtgcttggaggggcaggaaaaaaacttagcattttgcaggcagcgggcccagccttagcaatggcaggatgtgaacttccccatcgcaaatgcagttttcagccccctgcagtggatacaaggaagggccttttttggggccggaaaaaaaaccaaaaaaccaggcccgggcaacagccttccggccacgtggaacactggctccggagttattttttgtcaaatttactccccggacctcaaccatggcaagaaccttagaacccaaccga

SEQ ID NO: 646890 - DNA, 830 bp, Homo sapiens
gtttatgccgctccatctctaggccacccgtccccatgccggttacaccggtatctcttctccgtgacccctaccggttttatcttatatttacacggccttctttctttaatataccccccatcccctcttggaacaattgcttttcaaaagaccctgttcttctaaaggatgaacctataaaataaacctgtgctgcaaaaccctaaaaactcctgggctctgactatacataagaacaccgggtttctttactattctcccctcccccacaattttttaggtccttactccccccgcgaaatatttaacatgccgacaggggaaagttaaaaagagttctttttcgacacattgttcccccacccagggtttttgcccacccctattctcccccaaggggtatgaataccgccgtgataaatttttacggggaaatagggagagtgaaccactggctctcacagggcacctagtgggcatacatcgtccatgttaaataatctggccctcatagacgacttcttgtagacgagatgggtcgcctggagcactacagggttgtagttcactcagtcgacatctccctttcctccgtctcaactaacctttctttttaaaccaccctcttctagtccccggcattcagcagtcccacgcctatctttgtgattcttgacggacccaagaatctgcaatgaacccgggagaaacaacttcttgctactcgagacatagtttggcaccccatgcaaaaacaatatggataaaaaaacctttacaaacaatatctaaggaaagaattttagggggcaaaaacagcccacaag

SEQ ID NO: 646891 - DNA, 696 bp, Homo sapiens
  misc_feature (324)..(324): n is a, c, g, or t
  misc_feature (360)..(360): n is a, c, g, or t
  misc_feature (385)..(385): n is a, c, g, or t
  misc_feature (507)..(507): n is a, c, g, or t
  misc_feature (516)..(516): n is a, c, g, or t
  misc_feature (664)..(664): n is a, c, g, or t
  misc_feature (670)..(670): n is a, c, g, or t
  misc_feature (680)..(680): n is a, c, g, or t
  misc_feature (689)..(689): n is a, c, g, or t
ggccgagaccccggaggcttgggtggctgcagggtctgcggcgcgcagtgtttcggtaactgctttgcctcccggtcccgcaggaggatgctggtggtggaggtggcgaacggcgctccctggtgtggggagccgaggcggtgccccgccagaactcgcgctgggcctcccgtgctgtgatgcccgaagaggcgcggtcttggccgagatcggcgccgtgactctggtcagcgcccggtccagactctcggcaccacagcctggcctgaatccttcaagcgccagcaagaggagagcttccaggagcagagcggcctgtggcangtgaggccgggagacccgtcgtcagggagctcctgnagaaagatacggagggccagggtgntaagaaagcagaaactagaacaggcttcaggggccagctcaagccaggaggccggctcgagccaggtgccaagaggatgagacctgtgatggccaggcttcgggagagcaggaggaagctgncccctcgtnttcccagcaggaccctcaatgggtagccccttgcccagatctgctctcttgtcagctggcactgcaggctcgaccggtcaaggccgggccctggactggcgtgtccagtctaaaagactggcccacgccggcgcctgccacgagtggntacagnattacagaanctgggaacnaggttct

SEQ ID NO: 646892 - DNA, 100 bp, Homo sapiens
tgccaggattccaggcatgagccattggatccagccccaggatacatttgtaaaggctggattcaggacaatttctaaaactgtgcacatgatgcagtca

SEQ ID NO: 646893 - DNA, 197 bp, Homo sapiens
  misc_feature (12)..(12): n is a, c, g, or t
  misc_feature (107)..(107): n is a, c, g, or t
  misc_feature (119)..(119): n is a, c, g, or t
ggcccagcaganggaggaacactaccgaggctccagcttaacggtatttggaggtcagcacggtgctcacagaagccaggaacttgcccagggaggcgtgcaccaanggggcgaactcncggggaggcgggcgaccagggtcaccagcaggcagtgcttaggagctgggagccgaccgagcccaccgaactcgcgcg

SEQ ID NO: 646894 - DNA, 385 bp, Homo sapiens
ggggtttccagctgggtttgtcaccatgccaacaggggaggaggtcaaaagtaccctgagcatgctgcccatgatgctgtcaggcatggctgttgtgccccagatgtttggtgttgggggactcctcagtccacccatgtgaaccacctggactttcactggttcggcgtctctattaagcacaacgaaaagtggtaccgcagtgactgagactgcggaaggccgagtagccatgatgtgtctgaacctgcgataactactagaagtcctgtggcttttaacccatttctcataccaagagtatctcctggactcaattacccattcatgttcctcttccctgggatgggcatggctctgtcaggcatgccagaagccccctctg

SEQ ID NO: 646895 - DNA, 349 bp, Homo sapiens
  misc_feature (8)..(8): n is a, c, g, or t
  misc_feature (25)..(25): n is a, c, g, or t
  misc_feature (78)..(78): n is a, c, g, or t
  misc_feature (143)..(143): n is a, c, g, or t
  misc_feature (160)..(160): n is a, c, g, or t
  misc_feature (223)..(223): n is a, c, g, or t
  misc_feature (326)..(326): n is a, c, g, or t
atattttnagtagaggtgggttttnaccatgttggccaggctggtttcaaactctggacctcaagtaatccgcccgcnttggcctcccaaagtgctaggattacaggcatgagccacctcgcccagcctgcttgctttctttncttttcttttctttttncttttcttttcttttctttctttctttccgtctctctctctctttctttctttctttattttnagatacagagtctctctctgccacccaggtttggagtgcagtgggtgcgatcatagctcactgtagcctcaacctatagagcataagtaatcctcccaccttnagccttcctgaggtaggccgggg

SEQ ID NO: 646896 - DNA, 500 bp, Homo sapiens
  misc_feature (491)..(491): n is a, c, g, or t
gctgccgatacagtgtttatttttctcatttttaaaaaagaaagagggggaaacaaagaaggaaaatacaaagaaagaaggtagacaacgctcttgcatagcccgaagcccatagagaaagagttggctggcttgtgagaagacatgaggagttgggaaaaggaatgccagagttccctgaaccaatacagatctctatgcaactcaaggctggcttatagagccagctccaggactctggcaccagctatcaggtctgctgaaacctaatacattcgcgggcctgaatacaagggggtagcctgttggtgagcagaggcgtctattaataatctggggtttggccatccagagggcctctatgtgctcaagattggtgcaagagcttttggtgacttgttagcagccagtggctggaatgtggtggtgggctggtggctgcaccggaggggcaaggaactacgggagctacccagggggggctacactgnggggtgggt

SEQ ID NO: 646897 - DNA, 875 bp, Homo sapiens
  misc_feature (123)..(123): n is a, c, g, or t
ggtgggcagcatggtgggcgtctacaatcccagctacttgggaggctgaggcaggagaatcacttgaacccgggaggcggaggttgcagtgagccgagatcgcaccattgcactccagtctgngcaacagagtgagaattccgtctcaaaaaaaaaaaaggaaagggaaaaaaaaattggctttatacctctttcctgtgtctcaacccgccagtgaaaatttctgaaccctccaaaatccggtggaataaatccaaaacaaattttatagcgtttaaaaatacttttaccttcttatagtactagtatccttaaaaggcctcagggtatattatcttctaaacagctacaattcagtgcagtctacattaaccaattatgttctctagcttgagaacaactaggcctatttcactgctgtgtagcctcagtgcctaacatgggtgccaaataaatatccgtagaattacccctgatttgtaaaacccattcgttttgtgttacaatggccaaaatctcaaaaggcctgtatttatgtaatctttgaccttcttacttctactctaatttctccggtatggactgccgggggtggcctagtactaagtctcatttttaaaagctcaataatgggttggttttccacatccttcccttttaccagttaactcttccccaccccggggtgctcccccaaggctatttttctgctgcccgaacacggtcccaattgtggcgtccggccaattgtgtttttcccccgtctcgcttcagagtttgcggaatgcgggggacgaccattggtgcacacatgacgggcagaacaggccccgcacgggaaaaatacgggggccaccaagttgtattaagacaaa

SEQ ID NO: 646898 - DNA, 374 bp, Homo sapiens
ttggaaaccgggagaaacatgatcttaacgagctgctgggtgaaggtgcatctgggttacgttggtcttatgtcacggagcaatgcagagtccctcacttcacaagctggtgctggggaagtatggggccctggtcatctgtgagacgtctgaacagaaaacaaaacttgaagattttggccggcggcttgggcagcatgtggtgggcatggcccccctctctgttgggtccctggacgatgagcctgggggagaggcagagactacgatgctgtcccagccgtatttgctggagtcctccattaccttggggcagtatgtgcagcctcagggggtgtcggcagtagaccatgtgcggactgaatgtggagaag

SEQ ID NO: 646899 - DNA, 452 bp, Homo sapiens
  misc_feature (1)..(1): n is a, c, g, or t
ngttctctgcatttagaggatcccggagtgcagtgactggaatctctgtggtcactgcaggctctgccttcccaagttcatgccattctcctgcctcagcctcccaagtagctgggactacaggcacctgcaccatgcccagctaattttttttttttttcagtagagacagggtctcaccatgttagccaggatggtcttgatctgacctcgtggtccgccgacctcggcctcccaaagggctggaattacaggctgtgagccattgcgcctggccaagatgtgcctttttttaaaaaaacatcggtacttcctaccaattgttgcatgagtataaggctcgggaattatcagaaggcatattggagaaataggaattaggggaccttactcatgtgccatataagcttaccttacaaacaggtatatccctattcgcgacactgcactcg

SEQ ID NO: 646900 - DNA, 531 bp, Homo sapiens
atgtatctctaataaccacaagcggctactacataccgcatctaccactccacatagggcaagtcctacagctccctactcctggcgtatctggtgatagacactgaacagtacaggctaatttgtctcttccatttcccattgctgataccataactctttctgtactcctttagtttactgtccatatttgctttctgaaacaaccatctccacagcctgaaaatattagtctagttaacctcctatccattgccttcaaaggtttgcctggcagtaatacagttctcttaattagcaaacacttctttgaacttgactctttcttagaagcaatcactattcctttgacctgcagattacacattacttggggatttacagacatctgccatactggtctcgtattcccttccttcaagtatttactaaatatccagtagacgcctttgtcttacagccatgagcttacttaaatatacatcttactactacgtatcgctttagaattaatacggcataaaaggcttg

SEQ ID NO: 646901 - DNA, 882 bp, Homo sapiens
tatgagaaagacaaattatgaaggtagaacagagtgtaggaactgggaatcggtttcagtggtataggttttaaaatgagacaggctaaccttcgggagtccaccgtctcttgaggcggtgagcagaagcttgttccttcctaatatttatagcctagaagtgtgtgcactgcatggttgccctgccacagtactgccggttattcactaggaatatttcccctaagctacccaggcagttgataaaatgactacagacacgtctgtgttaaagactaacgtgtctacatctccatatgttgtagctgtggtgaaaatgtgattttaaaaaattatcgccagttcagaactggctattcttgttcctctatttcgaagtcattttgttcagtggaatagagacagcaacgagtggtgttaacctctcgaattagaagtacgaagttgacgaccagtaaagttttgccataaataagttacacagatctctgtgttccggaaagatgtgtatcttcttaatgtgtccatgtcagagaaagtgtccccatctcactgccaagaatgacagaacactatttagatcctctttaaatgattcaagtgtaaggattctactcgcagtgcattaaccagacatatcttggacagatgaatttctcaggaaataacctttcgttaaggtatctgatacagtatagtaaagcaatcgctttatactcagtatagccctggagagatacgcaggtccccacgaaatgtcactctcattccaaggttaactcgggactaaggcactctacaattccaaatactcgaatgtttccattgatggccaggcttccaccgaattaacaggcttaacttcggggttccgaacttatg

SEQ ID NO: 646902 - DNA, 1163 bp, Homo sapiens
accagtgtggccgagcagatggctactgtgctagagggcaaagacgttggagttctactcttaggaaaactcaaggcccgcaaacggcaaactaaactccttgtttcggtcttcacccagtgtaataacagggtgttatatctggtttaggtttccccaagaagaaagctaaacacacaacacacaaacacaaacaaaacacaccttggtggcggcgcgacggactcttcgagcgccaccagcgagaagcaaacgctttgcatcagacacccccaatcatgacttgagagagagacaaggaggaacacaccaaccagaggcacaaacggtgaaaaagtggggcacaacagagcgctggaaaccacaaaggaggaaaaacactctgggggcccacagtgcacaaaaggccgctgggacacctcacccccacacgattacacaaaaacaacgccatgggagagcgcaaaacccccaggaagagaccagatactagagagacacaaaaaatcgaacaatgaaaacgcaactacacactgatgacgagctacaacaataacgcagggagagacacagcaacaaaacataaccagacgcgttgccttcacaagactcgtgccacccccgcgacgcaaacaacacacagacaataaagaagacacacacacaaacaagacgggggagaaaacatacacaacacaccagcacaaaaaaccaaacacacacccaacaaataagaaacaaaacgagcaaaacaatcagactaacaacacagaaacaccacaacagcaacacaaaacacacccaacaacaaaaaataagacagcgacacgcgaaacatacacaaagcagacgacgacaaacaaaatagacaaaaacaaatgtacaaaagagaagtatgctggtattgggggacgccagacgtgcagtcacggagtcacacgctacagcgcacgacagtgcacccccgcagagagcagacacgtagcaagatagcagacgagctaggcggcacgggtcaccagcgatgacaagaaccactcgacctagctagaagacaacacacaaccgcacgcgcccatgcagacacatcaaaggaggcgagaatgagcgatcgctacatatacaggatgctcgagactcggagtcgcgtcgacacattggca

SEQ ID NO: 646903 - DNA, 695 bp, Homo sapiens
  misc_feature (468)..(468): n is a, c, g, or t
agtgcctggcatttcccctactgctctcattctcactcttgccgccctgtgaagggggtgccttccaccgtgattgttaagtttcctgaggccttcccagccatgtggaaactggtgagtcgaaaattaaacctctttataattaaaaaaacaaaaaacaaaaaaacaaaaaacacaaaacaaagagggtggtaacaaaaaaacaaaaaaaaaaaaaaaaaaatgtgtgtggggcgcgcgcgcccccggcgccccggagaaaaagaggttttaaaaacccactcgcgcgtgggggcgcggcggggcccccaaaggagtgtttgggaacacacgggggcccacaagcgcggtgtccccagaggaagaaactctcggggacgaacggacactcgggctggtgggtgctctcctccacccaatataaaaaaagccgcgggggggggaaccacggggtgcgttgttgaagcnaaacactccacacgaggagggagttctgcaggggagcgccacacagcggggtactataacaccagacgcggggccaccaaagagcaggcgcgaatatataaaatttacccgcagcggccggagggggaggaacaccaataatcatcttactagtcaagccaacaactacatcacatcgcaaccaacatccacctatcacgatcagaaacactaacagcgccgaagaa

SEQ ID NO: 646904 - DNA, 758 bp, Homo sapiens
gctacttctctcctgtcttccccgccgacgacgctgtcatcatgacaggaaatcgtgcacttgcatgtccggggcagtgcaggcaacctaaatcggcgccaacgttttgggacgcgtgatcagcgatgacgcacggcatcagatctccaacaggtcacctaccatggggacagcgacctgcagctggaactgcatcaactgtgtactatcaatgaggccaccgtggcggtcaacgtacgtgccccgtcgccgtgctcgttggatctggtagcccaggcgaccatggactccgtgtctgctcgtgggacccattcagggcagatcttccgtgccgtgacaacattcagttttcggtacagagtgagtagctgggtaacaactgtggaccaacggggcactactacgagaaggcgcgtacctggtggactcgcgtgactggatgttgtgacgaaatggactggctgaagagctgtgactgcctgcatgggctttccacgcttgacccgactccctgagttgcggcgtggactgcggtctgcggatgggcgtaacccttcctcatcagcacagatcctggagaaagaacgtagcgcctagtacacgcggactcacttgaagcgatgtgtttgctgatggtcgccttacgccccggcagttgtagaacaacagctggatggcagtcccgtatcttagcactccctcctaagtccacaaacatcgttgcacgacagcagactgagacctactgcagtgcacca

SEQ ID NO: 646905 - DNA, 254 bp, Homo sapiens
ctgcaaaactagcataccatggactaataggaaagcatgagcccataaaccaaaagtaccaatctagtgtactgattagaaatactgagtacacacccctgatgcttactctaaagtttctttttcaagatacttaagtcaattcatataactggtataaattccatggttgtatcgaacatggttgtatcgaacatggttgtatcgaacatggttgtatcgaacatggttgtatcgaacatggttgtatcgaa

SEQ ID NO: 646906 - DNA, 422 bp, Homo sapiens
tgctaggattacaggtgtgagctaccgcgcctgacccaactttcgtctttaaaggactccagtgtttcccagattcttttttttttgggagtgggagtctcgctcggtcgcccagtctggagtgcaggggcatctcggttcgctgcaaattctgcctcttgagtccaagcgattctctggtctcagcctcctaagtagtggggatggcacgcgcttaccaccgggtgggctaattttggtattttggaaagagagggggtttaatcgtgtgggccaggcgggtctcgaagtctgggcctcaagagattggccggcctcagcctcccaaggtgcagggatcaggggcatgagccacagcatcgggccaaaaacaatctttaaccggatctacaaggtcgggcagctcaggagagcagcagttt

SEQ ID NO: 646907 - DNA, 656 bp, Homo sapiens
  misc_feature (29)..(29): n is a, c, g, or t
  misc_feature (91)..(91): n is a, c, g, or t
  misc_feature (136)..(136): n is a, c, g, or t
  misc_feature (170)..(170): n is a, c, g, or t
  misc_feature (175)..(175): n is a, c, g, or t
  misc_feature (183)..(183): n is a, c, g, or t
  misc_feature (186)..(186): n is a, c, g, or t
  misc_feature (205)..(206): n is a, c, g, or t
  misc_feature (213)..(213): n is a, c, g, or t
  misc_feature (215)..(215): n is a, c, g, or t
  misc_feature (231)..(231): n is a, c, g, or t
  misc_feature (237)..(237): n is a, c, g, or t
  misc_feature (242)..(242): n is a, c, g, or t
  misc_feature (244)..(244): n is a, c, g, or t
  misc_feature (247)..(247): n is a, c, g, or t
  misc_feature (276)..(276): n is a, c, g, or t
  misc_feature (289)..(289): n is a, c, g, or t
  misc_feature (291)..(291): n is a, c, g, or t
  misc_feature (295)..(295): n is a, c, g, or t
  misc_feature (300)..(301): n is a, c, g, or t
  misc_feature (308)..(308): n is a, c, g, or t
  misc_feature (318)..(318): n is a, c, g, or t
  misc_feature (349)..(349): n is a, c, g, or t
  misc_feature (361)..(361): n is a, c, g, or t
  misc_feature (367)..(367): n is a, c, g, or t
  misc_feature (379)..(379): n is a, c, g, or t
  misc_feature (391)..(391): n is a, c, g, or t
  misc_feature (397)..(397): n is a, c, g, or t
  misc_feature (415)..(415): n is a, c, g, or t
  misc_feature (475)..(475): n is a, c, g, or t
  misc_feature (637)..(637): n is a, c, g, or t
ctagcaagacgcagctccccctcagcctnagcgcccccccgcagagaggggacagagaaggaaaaaggaaggtgacacaggactggggttnaaatactcagaaagccacacaatagaagacaaaaagtagcaagcncccaagaaagcggggacaaggaggaaccagtgcncgatnccgccctnttnccagctgggggactgtgtnnccaggantncgtggggcaaggggtnggattnggagntnttnaaggatttgggggtggaggggctcaaggntggacccaccctncncttngactnntgggctnagggcaagtnaggcccgaggggccccctgcagttggcagtnatggggccagtngaggcntacagcttggtnaggtccagcttnagcttntagggtggtaggctgtcntcacaggcgtgggacggcggcgggtacaggggccaatcgggctccatcatgaagcccttnttctgcttcagggtcagaggctggaacttgaggtgtctggccaggcgcggtcaccagggtggagcagctcagccacagcatcaccagcacggagaggaagaggcagcaggccaggatccagcgaggcagacccgagcgccgggacatgcaactgaggaagtnattgtcctgtggctcttca

SEQ ID NO: 646908 - DNA, 133 bp, Homo sapiens
gactgtagtgcagtgacaccatctcagttcaccgcaacctccgtctcctgggtccaagcgattctcttccctcagcctcctgagtagttgggataacaggcatgcaccaccatgcctggctacttttgtcttt

SEQ ID NO: 646909 - DNA, 117 bp, Homo sapiens
agggttaccgatcggactaagttccagaagcaagagataaagtaataatgggtactgtggggaaaaacacagaagaacaattcggtaatatagtggtgatttacaagtcaagttaaa

SEQ ID NO: 646910 - DNA, 113 bp, Homo sapiens
accgctacgtcgtgctgactggagacgtgaccagctctggagtctcccttgagtcccttcctaggacgcagtggtgctctagggctcagtgtgtttctctgcttgtctctctt

SEQ ID NO: 646911 - DNA, 1136 bp, Homo sapiens
tatgcaacaaatgtttattggaactcctgctgaatgtcattctgaaaactgaggaccagtggtaccaatttggacttatcatcaccaaagggaaacagaccataaagaaagtaaacaaattataaaatttaattttagatagtaagggaaagcttccctgaggcaatgactatttaagcagagacttgtataaagtgaattaaatttttacccagtgttaaggtgaaattgggtgaggggacattccggacattagggaacggtattgtattgaaggcctcatgacaaggagagcagatgagttcataggagctgaaagtaatgcacatatggctggggcaaacagtttgagggtggcgctgaatagcttaagaggcacatactcgggaattgggcaaacctggcatgcaaaactgtcatgtgtccctataatgatcggtgatacactctgagaaatgcatcgtaagggggtatcatattggttgtgaacatcactagggtgaattcacacaaacctagatctaaacacctaggctatgtgtaatatagcctgtgtaacaaggataaaacccgttaaaggtgtccctgtaactagaatacgcttgggcaatggtaatagcaagggtaacgtctttgggtatctcaaaccttcgacacggtaacacaaatactttagcattcacattgacccttggaacagataaggttgaacatgaggaggttcccaattatagaagaaaatatattacaaaaaaagatatcactagtagggcggagggggtaaacacgtgttaaccagcatgggaagagaacggtgaaaaattctagagcagaaatggaaacagcgtgtaaaatataataccaatttatatatataaaataaaaagaaagaaaatgaaataacaaataaaacaacaagagaggggggagcagataataagaggagaaatacccactatttataagaccagtagagatataaaaacggcggcataaaaacgagagaacgtagtataagaacgtgtagtagaccacacggaaatattaattacagaataaatataaataaagaataagataaaattaaacactcaaagattagaacagagaccagataatagacatcatataaacaa

SEQ ID NO: 646912 - DNA, 299 bp, Homo sapiens
gaaaaggggggggcccccccttttccccgggggggttttttccccctggggggggccccccccccccccccccccaaaggggggggtttccggccgtgggcccccggcccggccccccctttttttttttccaggaaaaaaggtccccccctggggcccgattttttttttttccgggggccccccctttggtttttaaaagcccctttccctgggggggcttggggggggtttttttttttggggggtttaaaacccgggggttcccgggggggccctttttttttttttttttttta

SEQ ID NO: 646913 - DNA, 783 bp, Homo sapiens
  misc_feature (1)..(1): n is a, c, g, or t
  misc_feature (73)..(73): n is a, c, g, or t
  misc_feature (85)..(86): n is a, c, g, or t
  misc_feature (125)..(125): n is a, c, g, or t
  misc_feature (139)..(140): n is a, c, g, or t
  misc_feature (178)..(179): n is a, c, g, or t
  misc_feature (207)..(207): n is a, c, g, or t
  misc_feature (209)..(209): n is a, c, g, or t
  misc_feature (241)..(241): n is a, c, g, or t
  misc_feature (336)..(336): n is a, c, g, or t
  misc_feature (355)..(355): n is a, c, g, or t
  misc_feature (365)..(365): n is a, c, g, or t
  misc_feature (404)..(404): n is a, c, g, or t
  misc_feature (413)..(413): n is a, c, g, or t
  misc_feature (423)..(423): n is a, c, g, or t
  misc_feature (433)..(433): n is a, c, g, or t
  misc_feature (436)..(436): n is a, c, g, or t
  misc_feature (446)..(446): n is a, c, g, or t
  misc_feature (464)..(465): n is a, c, g, or t
  misc_feature (486)..(486): n is a, c, g, or t
  misc_feature (489)..(489): n is a, c, g, or t
  misc_feature (508)..(508): n is a, c, g, or t
  misc_feature (518)..(518): n is a, c, g, or t
  misc_feature (520)..(521): n is a, c, g, or t
  misc_feature (524)..(524): n is a, c, g, or t
  misc_feature (540)..(542): n is a, c, g, or t
  misc_feature (551)..(551): n is a, c, g, or t
  misc_feature (563)..(564): n is a, c, g, or t
  misc_feature (576)..(577): n is a, c, g, or t
  misc_feature (579)..(581): n is a, c, g, or t
  misc_feature (583)..(584): n is a, c, g, or t
  misc_feature (614)..(614): n is a, c, g, or t
  misc_feature (635)..(635): n is a, c, g, or t
  misc_feature (679)..(679): n is a, c, g, or t
  misc_feature (776)..(776): n is a, c, g, or t
ntcccctaattttttaaatctaacacaatgcttagcacaaacaatactcaataaataacacattaaccaagtnacattattcttnncactctctagagttgtgtgcgcgttttacggcaaactgnggggtaggtaaagnnagacatccggcagacttgactgagaagggctccaaaanntgagcagccaaagcgccgggtacccccntnctaagttagcaaaatgaatacagcattttccnagcagtctagaaatccgagctcactggggggcatgacaagggtttgggggtggtccgtgttccgggcctcctagttgggtcttctcctatttctnggttctttatttggggtcngtcccaatcnaggggggcttctgccaaagggcaggggattccttatgcngcctggggngggctatgcntccgcggtgnccnttcgctttgncactgctatggcgggggnnccgttccggcggtgggttgcnacngtgtgggccagctccggtntgggttgggncnnccnttcatgagcgcgttgnnncttgtgcangggcagcggtgnntgcgtccggttnngnnncnntttgtccccctctacgactctgcgtggggncgggggtcgggggctcacagngcaacagcagcgatggtcagaaaataagtgccagttccaatgcnagaactctctaaagttcattggtcacaattttttttaaccacctcacctaccatggcttttttcttttctcattatcttgccaattatttctttcgnaattcaa

SEQ ID NO: 646914 - DNA, 381 bp, Homo sapiens
tgtggggggtccccagtgatatagatctgggcgtaagactctgctgtgaggcagacgttgggactgtagaggctgacaggaggcagaggctagggcctggaggggccaccaagatgcatgagctgggcctggatgaggtcgaacttgagaaagttcaggacctggacagagaaggctgggaggcaggagctgggtctaacgaggccattgtaacgatagagctgtgcctgtggaggctgttgtgaggcacgtagcctcatctgacggaggctgccgtgacgtaaggtatgggcctaaataggccattgtgagtcatgagcttggtctgtaaaggctgactggagaaagttctgggcctggagaggctgacgggaggtcaga

SEQ ID NO: 646915 - DNA, 302 bp, Homo sapiens
ggagctcggtaccagattcaccggcagctgcgccagctagcacggagctaaaggggatgccacgtctccaggagacgatgccactgacaggctcaaaatcacatggtaatttacaagtttgtattaggaatgcgttagtggtgcgcccgctgaagacatcacacagcaaccaggtttcagcatagccagtcccacaggagcccagcaggaaaagattacgagacctaccagccatttcagaattccacaagaaattacgatgagtccttcttcgaggaccaggtccaccatcgccctcccgc

SEQ ID NO: 646916 - DNA, 322 bp, Homo sapiens
  misc_feature (211)..(211): n is a, c, g, or t
cgcaagaaccagacgctgttgaagaaggactagcacctccatatagcctgaatccaaagcgggtcacacttgctaccacatggtctatcgcatctgatgctcctgcagcgcatggagtaaatggaaagagcctggtagaagcgacaattatctgcggtggagacgccattggttctgaaaacacaacatcggtatatggaaggttattgcnaattgactccggggcgttcaaccaatagctcccgcagatagatgtatacaccgagccgctttgtatctctgttgactctcccggtgaccacaccccggattggcaatgtag

SEQ ID NO: 646917 - DNA, 816 bp, Homo sapiens
gaggcgcaggcagcgccatccaaaggagatctcactccgcccagcagtgactcctgtctccctcaaaaaggccccaggcaacgttcagcccccaagaggaggcccagcgtaccccatcctccaaaggggatcccagcctgccaggcagtgactcgctccttctcatgaggagaccccagtgacaaggacgcgtgcacaagtgctgacatcatgcccaaatcgaagcgctcccgagtccagggttccgaggcgccacccatggggggagaacaccggtaacggcatgaacagatcaggtgacaatcacgaatcgttgcgcgccagatacagagggatgcccaaagcagaaaccgacgaatcacggctaaaaagggggcacacgcatggtgaccacagaaccggagcggagccaccgtacagcaggctacagagaagagagaccccgcggaggaacatcaatcgtggagccgcgcccgcgcaaaggcggggaccacatcacagccacgcgcgaagaacgtgtacagtgaacaccggaagcaccgcatcccgagtgggagaagacgcccacaaccacgaagccagacatgcgaccaacgtggacgaagcaaaaagaaccgtggaaacaacgtaacccaccttaggatacctgaaaaggaatgcgggccacacagaaaacgcgagatagccaacgggggggacactctgaccaacagtagaagacagagggtccatggaaactggtggccgaccacacaccccttccgggacacaaacccaaatgacagtgaaaccgacggcatcagagccccaatagcc

SEQ ID NO: 646918 - DNA, 130 bp, Homo sapiens
ctgctattcctctatgaagattcctgtttagctgtgggtgtcccgggtgggtgtgtgtcgatcaaaggacaaagacagtattttgacaaaatacgagtgaggatttacactacatcgtccaagggatgaa

SEQ ID NO: 646919 - DNA, 422 bp, Homo sapiens
ggctaattttttttttttggtatttataagtaagagagggggttacaccatgtaagccagggatggtctcgatcctcctgacctcgtgatccacccacctggccaccccaccgtgctggaataacaggcgtgagccattgtgcctggccaaagatggtaattccactgagtattggaaagtccacggcttgctgtgtgaatagtagggcaaagtaccggcactcaccttatgtcctaatgaaagtagcaatcagtgagtaaatacctatgatgtaatttctggggggtaaataagtgctatagggagaaccaaagcagaataaggggtcccagagggatgaggagaatattggtagaagggacattaagggaaggctcctctggataggagcgaagagtgtagctgccaaggcgggggaatc

SEQ ID NO: 646920 - DNA, 912 bp, Homo sapiens
gaactacgggagccctattacaagcctgaaccctggggagacgcgagaatcagctctccatcatctccagaggaggatgtcatggtagggatccctcaccttctcagtggactatgaactgtcccgaaaagaagcgcctgagtggtgacaactccaggagtgcccacggtgctgcgcaggtgcatggaagtgacgcagacccagtggatctgaagtccttagcatcagtattaggttgacacagtccattccatgagcaaactggcaatcgtgcgctgaaggaccgagatgtgcgtgtcgagaaagacgccttggattctctgggtgttctgactgagactcattcagccgttcgtatggacagtccccgtgactgtcagactgtctgggaccatggatgacatgaacattcccttgtccgtcaggttagaccggcgttctcctcggagaatgattgtcacttggcagaggtcaatggtgccgacctgggcgaaggggtgggacccccagctactaggcaatggtactaacctgacccagggaacagtcactcaagaaaggaagtatcccaggaaagatgcatcatcagaggggggagcctccaggtgtctcctgtcataatcagcctgttggcaacaaggaagaagtgacaggtgggtggtcctcaataggccagatcacttgccgaagatggatatcaccggtctctcaggtcactccttatgtcagcggtgaacgtctactacggccagaaagcgcattgccaagaaagaaaggcccatgtgaatgaaagtgcacttttgaacccccaatcttcatgcagtcttgcatcttacgagaattcccacctgcacctacctggctgatatagcatagagtcattgtaacgattaggtgaccaccaaatgatgg

SEQ ID NO: 646921 - DNA, 572 bp, Homo sapiens
  misc_feature (171)..(171): n is a, c, g, or t
  misc_feature (173)..(173): n is a, c, g, or t
  misc_feature (178)..(178): n is a, c, g, or t
  misc_feature (194)..(194): n is a, c, g, or t
  misc_feature (226)..(226): n is a, c, g, or t
  misc_feature (231)..(231): n is a, c, g, or t
  misc_feature (233)..(233): n is a, c, g, or t
  misc_feature (255)..(255): n is a, c, g, or t
  misc_feature (320)..(320): n is a, c, g, or t
  misc_feature (344)..(344): n is a, c, g, or t
  misc_feature (355)..(355): n is a, c, g, or t
  misc_feature (358)..(358): n is a, c, g, or t
  misc_feature (360)..(360): n is a, c, g, or t
  misc_feature (365)..(366): n is a, c, g, or t
  misc_feature (369)..(370): n is a, c, g, or t
  misc_feature (373)..(373): n is a, c, g, or t
  misc_feature (391)..(391): n is a, c, g, or t
  misc_feature (393)..(393): n is a, c, g, or t
  misc_feature (396)..(396): n is a, c, g, or t
  misc_feature (409)..(409): n is a, c, g, or t
  misc_feature (411)..(411): n is a, c, g, or t
  misc_feature (428)..(429): n is a, c, g, or t
  misc_feature (436)..(436): n is a, c, g, or t
  misc_feature (456)..(456): n is a, c, g, or t
  misc_feature (462)..(463): n is a, c, g, or t
  misc_feature (468)..(469): n is a, c, g, or t
  misc_feature (494)..(494): n is a, c, g, or t
  misc_feature (499)..(499): n is a, c, g, or t
  misc_feature (507)..(507): n is a, c, g, or t
  misc_feature (512)..(512): n is a, c, g, or t
  misc_feature (528)..(528): n is a, c, g, or t
  misc_feature (534)..(534): n is a, c, g, or t
gggggagggtggtagggggcagatctttcaccagtgtttaagcaacatcttcttgatgctgaccttgtgatagtgagttctcaggaaatctgcttgtataacaggtttatacaacatgtggcagctttttcctctctctgtcttgtttctacttctgccatataaaacatncnattgntgcttggtcttctggnatgattgggaggcttcctgagtcctcccagangcagnancctctatgatttatttaaagcntgcagaaccatgagccagttcaacctcttttctttctgattatacagaaaattagtgctgtgaantggagctatgaaatgccttcaagnccttttccttnttntnttggnnatnngcnctcagcttcttttcaggnanatntctgaagcctgcntnaatttttctcctgaaanngactttncttcttttaccacattgccnggctgnnacaanntagctgaaaatgtagaagcaggttnagaantgtgtaanggccngaggttggagagtttngaggtnttggaagaggtcagcttgtgggatcctctagatcaccg

SEQ ID NO: 646922 - DNA, 359 bp, Homo sapiens
ctaataaatccagagatctgggagcaccagatggagtatctccaagctcgaaccacaaggtccaagaaactcttctcctgcttagcttgcctcggcccatgtaatccgtacatgaggccacttaatgaggacacatcagatgtatccaaatcctcaccaatctctgccatcagcactctatagtccgaaacaaggtgagggtgtcctgagcacggtgggtctccacagcttttctgtccatcttcaagatccgtctgagcagggcacgatcgcctcactctgtagagcagttcagtcaagtccccgagagacagcttacctctttcccgtaaaatatccagacggtccctgaccttagg

SEQ ID NO: 646923 - DNA, 952 bp, Homo sapiens
tggtgaagactatgacgacactgcgtcagatagatgtgcacatgttcaatgcagtgttcgttgcgttggacaaagctgcccccggtgaagtctgccatccgtgggcaagctcctgtggtatcctacatgcgactatggacacatcaacgcgtcctcatcgacggacacagtcctccttcggggcgggcggaatgacggccgaaggggcctgcaatgtgctcctatgcctttgactgtctatactgcaacaagtggttcactaccaccgagtgtcaagggactagttccatggtggcccggggatgggcattcagcctgtgtccgtagtgctaacgatctatgttccattattgggggcgtaacggagcagcatgcggacatgtttttccaatgacgttcgacaagctagtatacctatcagcatgacatgggaactcttatctgtactaagggcagtcgctgcacgctggtgggaattccactcagccacaatgctgggaagtcacatgtatgtcttcgggggccgtgtcgaccgttttgtgtcccattccattccaacaatggagatttactgcaagcgcattcgagtctttgaactccagaactgagggcttggtggaatggcccccgatcctgtgtgctgaggggccggagcactcggcccttggtacaatggggagctgtgctcctggtggtgatacttgcagcgagcgggtgtttccttactcttcagttagcctgtgtccttaccgggccaagactgcccggggaggggcctgtcccgcgggccagttgcgtcctgggtacatggctcttggggccgcctctggaggccggactgcctacccggcttggggttccgctgatcggcgcggctactgacctgtctttggggggcacacagcctctgaggcctcggcccaccggttgctgcctcctctcccgttcttgt

SEQ ID NO: 646924 - DNA, 235 bp, Homo sapiens
gttcaatagcagcctggccacatagtgaaaccccatctctactaaaaatacaaaattagccgggtgtggtagtgggcacctgtaatcccagctactcgggaggctgaggcaggagaatcacttgaacctgggaggcggaggttgtggtgagccaagattgctccactgcactccagcctgggagactccgcctcaaaaaaacaaagaaaatgctatggaaacttctaaaactagg

SEQ ID NO: 646925 - DNA, 461 bp, Homo sapiens
cgcttagagattttgggggccccaagttttcttttcctttcacatttccccctttttctgtttaaaaatcttttggagaaagcattttagaagaaaacgagtctctggtctcaggtttcgtctggtctctcacagctgggatggtttattcctaggcagatgggtcttgagttattaggaaagctcctttttctcaggttgagaatcctcatgtcctatgaagagaaaataggtggaggaagggagaaaaacaacaaacaaaataatgatcctagaaaatcgatataggccacactactctgaagtccaaacatcagtaggcaggtatgaaagtagcttatatatgtaaacaggttgctgttattttcttctgaagtttaagttgtctagcttcagttcacagggcttcacaaagcacagcttagctttcagtgactccaaattggggaaaataggaaaaa

SEQ ID NO: 646926 - DNA, 352 bp, Homo sapiens
gagcacagtcctgtagggccagaatggccaggtccccggcagggtggcccccactggctgggtgcagactgggagtccaggtggggtgcaggtggcacatttctggtgtgtgtagaggcatggaagccggctcttttcagacctggcatgggtctcagggtggcctctgccctaactaggaagtctgggcctaggctttcttctggtgccccagctccatgacctcagcctcttgtgaccccagtgtctgtcatgatcctgacctctctccaccacagccgggctggcccgttctccagcagcaggtgcggcgcctctgtccccatcccagtccccatgcgtggattgccag

SEQ ID NO: 646927 - DNA, 1361 bp, Homo sapiens
gccaagatgcccacaccgtaaacaaggcgggagggaaagaatggtggctccggcccccagctgtcgtgacgaagcatagcaggctacataaacgtggtgaatcccctgctttgagaagacaggcctaatgtaattttccggtagttggaacaggcaccatccatgtcccaaaagagtaccctcatccgctattggtgcaagaatggcccctgcatatagtcgagcgtatgcaggcggcatagcagccatctctcgtaatcagtcgtgcctggtacggctgcctcctgacgattaaccagtttcaccacagtgctcccttggtacgcgtccagaatcagccataactcaggactgtctttactcgactgtgacctcagcaaggtacgggacccagaagatcaaaagacaatgagagacgaacgcactgagcacctgcttgggcacccgtgttgcccgtagaaaatcgactggcctgcatgtgctaatacgggagatcgtccgcaatccgacagcagatgcagccttgtcctttcggagccacggacgtttaatccacacgttcaaccagccttgtgttggcagcaaccaagcacaagcctcaggcgtggaatgaggtgagtttgacaacacggaccgctgtcgatccccagtcggagccttggtaagatactaaccttggccctggccctggctgctcggtcacaaacattgaggcgggttcccatttatcttgccgactttactccaatcgcgacgagcaatgggcacacgaccgatggcagaactgcttgtacgatccagacagcgaaatgacacatggcagacccacatggtcgaccctttcaccacgcgtcgttggaaacctcgcgaaacggaaccataaaggggctggctattagagacttaaagacctggggttgggcacagccttaatccaggggaacgcaacagtcagcacaacattgaaccacggagttacgaagtgcactaacttcccagccggatcaaaattggcggtgcttggacacacattggtgccttgggggatcccttacaggatcttggtgggcgttccgaacttacgcccatcgccttctgaaaaacaaaccccaaatcagaccctaaaacataaaacctttggaccacactcaataaccttgcacgttcaaacttgtaccacctcgtaagactattacctttcgacccatttaacacactaccagttatggcgctcaattacatccacacaaacaaaacaaaaacacatctacccagcacgccatcctcatccaggcgcacgcacatcatccatctccaccaaagtacacacaatctgccaaacacccaccaccagcacacca

SEQ ID NO: 646928 - DNA, 229 bp, Homo sapiens
  misc_feature (45)..(45): n is a, c, g, or t
  misc_feature (60)..(60): n is a, c, g, or t
  misc_feature (82)..(83): n is a, c, g, or t
  misc_feature (113)..(113): n is a, c, g, or t
acagtagctactcttaggtatactatatcacatacatgattatanatagatggagatcantccagaagaacagcatgactannctccaagcattaatttggaaatagaaatgnagaggtgtacagttcatcctcagtagggttagctatgctttgtgcctacctagaacttttaatcactggaggctgtcataatcttccacatccacaccgtccataaagcatatgtt

SEQ ID NO: 646929 - DNA, 360 bp, Homo sapiens
ttgagagtatacggatgggaggaaagtagcagacatcatctattgtgtgcaggctgtctcatgtagtagcgccattgtcgttacattcattttgtgtaatataaagcgtgtgtcatgtcaaagtgaaagacatttcaaatctgtagcataggctagtgggcaggtccgcacagtcgaagccacacctggtctgttttctgtgcactgtagccttagtgtcacctttcttcttgtgtctccttatggtacactccagcggttgccttttttatcatttctactgaagttgggaaattcaaccccagaaattgacagatgaaaggagacaatggttgtgtagggagatggagaaaatgctta

SEQ ID NO: 646930 - DNA, 697 bp, Homo sapiens
cttttttctccccttcgcatgtttagtttctttcctttctcacaaaaccagttcggcgttccggagaccattttctcttccctcattggtcacactacacatagagctgctgtggttggccttcattctccagggagcttcttccattagttctgcgattctgacccctggttttggctctttcgcagctgtctcccttgcacatcaataaagatgacttcaggcatctcacttgaagatccatcagatgatctgagagcaaggtctcccccaaaaatccacggcatgtattctttcgtttagaatctgaaagcctctttctttcaaggcttgatgactctcttaaggtatttgttatgcctctcttctgggtttttcgttttgccttatcaagtagctcaaattctttctccatggcaacagaaactgcttctatttcgctggctgctgcttctttctctttccttagcatacatgtcacagctctgtttagtctctggctcttaatacgttaagcatcttctttctcctgttgtgctaatctaaagaaggaatcaattcggagctgtgtcttttattcagtaaattcacttttaagaagatattctttggccgggcatggtggctcacacctgtaatcccagcactctgggaggccgaggcgggcggatcacgaggtcagctcgtgccgaatcct

SEQ ID NO: 646931 - DNA, 519 bp, Homo sapiens
  misc_feature (50)..(50): n is a, c, g, or t
ggaaagaatagtaagaaaagccccagcttccctcccatgaacagagcccnccgccggatcatccatgacttggcccaagtttatggcctggagagcgtgagctatgacagtgaacccaagcgcaatgtggtggtccctgccctcagggggaagtccgtttgtcctcctacccccctgacaggtgtgctttaaagggaaatgcaggcccggcctccccccccgattcctcatcacagacatcagtcagacaaaaattctgggagcagtaattttcagaaaataaccaaggagcccataattggctattttgacgtcccgggctaaaaagatcatgatgcccttagataaaagaatgtttaggtatagtggaggcttttttgccaacaaataaatcatgcccgttcccctctgcctggcaaaatcccagtttcccaaactgttttggtctgacccatcccaagcatgagtgggtcagaaatcccttgtttattcctgtttgtataaagtgtttccttatta

SEQ ID NO: 646932 - DNA, 786 bp, Homo sapiens
cttcgccgcctccgtgttgtttgtcttgggatcaatgctcgtcttctcgcgctccgttcgtgctctccgctgctttgtgggtggtcacacctcgtggggctttctctctctgtttttgtctctctctccgtgtgcgcgcccgccatttcgtttgtaggggcgcccctcaaccgggcgtacactccttccccacctgttgtcttgtgtgccgtgctatttttgtttgttttccgacacttcttttctcccgctgtgccctctatgtgtttgtgtgtcttctatactcagtctgttctctcacctcacctctctccatctcctccgtcggcgtggcggaggtctctctctctcttattcggctctctcttcttccctcctttcgatgtttggtgtgggcgcggccgcgctgttttttcccacccaatatatttgttctctccgccacccgcggtggtgccctccgcggtatgtcgatttgttatatatgagagaggcgaacgcctcttgttccagcattcgttctccccaccccccccgccctgtcccctgctgttgctctccccccctcctctctgtgggctcccctcctcctcccctccgcggctcccctctcgcctcttttctcttctctacctgcccctccccctctcttcctaggagggcggggtgtggggggtgtgggcggggcgaggcccccccccccccgtcttgggggtcgggcagaaaaaagaattttttgttttattataaaaaaaaattttgttttttttatgtatgtgtgagata

SEQ ID NO: 646933 - DNA, 375 bp, Homo sapiens
cagtctttaaaattcgtctctgatttgccagagaaaaacggtggtagccatggaaatcgggagtgaaggagcactgcttcattgtgctcagcccttcctagggcctctgcccttgattgtccttgagctactcttctgctctgtaagttgtggacaaactgtaggtatgtatgtgtgcgtttgttggtgtgattgtctgtgattgtcagtccctggctattgattgatgttgtcatcaatttagcaaatttatttcctcattcttgatgtcctgaatatatgtctgcactttaattgctcctcttaaccagtttaatcattctaccatttccctatcatatttaattagtttaataatattttttgacacatgtt

SEQ ID NO: 646934 - DNA, 366 bp, Homo sapiens
ataagcagaaacacgtcagttaggatttccttctgcataaagttataagtagtagtaatagtcttaatcatagtctaccatcaaatatttaggaatatctattaatgtttagatagtatattaacagcatgcaataattacatcataagttctacaagcagaggcagtctattgcaaggaccttctttgctgccagttatcataggctgttataagttagaaaactgaatagcaacactgaatcctgtagaaatgcacttagctcagtaatacttgagttgttgcaatatttgattatccatttggttgttacagaaaaattcttaactgtaattgatggttgttgccgtaatagtatattgcact

SEQ ID NO: 646935 - DNA, 394 bp, Homo sapiens
  misc_feature (11)..(11): n is a, c, g, or t
  misc_feature (198)..(198): n is a, c, g, or t
  misc_feature (263)..(263): n is a, c, g, or t
  misc_feature (274)..(274): n is a, c, g, or t
  misc_feature (333)..(333): n is a, c, g, or t
taaacacggtnaaaacccccatctctactaaaaatacaaaaaattagcccaggggtggtggcaggcacctgtagcccccagctacttgggaggctgaggcaggagaatcgcttgaaccccaggaggcggaggttgcaatgaaccgagattgtgtcactgcactccagcctgggtgacagagcgaggctccgtctcagnaaaaaaaaaaaaaattggccaggtgtggaggcgcatgcctatagtcctagctactcaggaggctnaggtgggaggntcacttgagtcctggaggtcaaggctacagtgagccgagatggtaccactgcattccancctgggcaacaaaggcagactcaaaactgcagactcaagcaacagagcctgcctccaaaat

SEQ ID NO: 646936 - DNA, 477 bp, Homo sapiens
ccagtgagataacttagagcaggtgatctcgcgatctctatacagatcacaaaattccactctacaattcagtgataagattactacatacgcattttcatataagatgttacttgtattgctgctttaatatgaacagccatgatgcaaagatttttctaaaatggaaaactacatgcagcaaacttgtgtcccaatcttcccagggaaaacaaactatgcataaacacaagaagaaatatcaagtgtaacaccaacgtaaacctactgcatcctcagcaacacactgcataatgaacataagaaacacatttaagggtcaagacaatctgaataaaatccttaccaacattacatggttacgtaattaatgtctttgtggaagcaatgacttccaaaccctcttgccactacttaacaagtcgtgtgtaagtgtaaattcacgtacttctgaagcacttcagtacactggagtgc

SEQ ID NO: 646937 - DNA, 186 bp, Homo sapiens
aaaatacttggtataccagtaattaactctcattttttaaaaaaatggattgaggtggggcaaagaagcatagaagagggaaaatgtgggcaatcagaaacctaggtcattgaaaatgaccccaaaagatctaattaaactaaagaactgctgcacagcaaaagaaagtaccatcagagtgaacaa

SEQ ID NO: 646938 - DNA, 1122 bp, Homo sapiens
  misc_feature (818)..(818): n is a, c, g, or t
tggagaactatggaatgtgcactgatgagaactccagaaattcagtccaacttggctttcactggggaaaaattgggtccagaaaggctgagtgatgtacccaaggccatcccgttggctggtctgctattcctgtccttaggatcacataatacaattttttttttaagaggagctgtgcacctcaatttgctgtctagttgagaatagagattgtgtgccttcatttcatttgacatttacccagcatgcctcagttccacaccgtgaccagtgtaagaagaggaactatgataaaaacagttcaacaagccgcaaagagggtgggaaattctgaagtccagaagcgagtgtgatctttggaatagtggctgctgtgcccttgggcgccatttgaagaatcactgttcttgaaagtgctggttcactttctgcagtaagaagtgatttatgggcttttatgtaaaattttaagaatgacttgggtttcagagtagcctttgaaactttgctggcagcttttcattttgtcattggaaggctaagagacttttctcctttgttcaaagaactccttgttcttcagggcttgaacggcaaaaaaaccttagacaactttaacgaagtttaaaaagtatgttctggttttggagcagaaaaaagattcgtgaactggttagtacttagcaccaaaagcagttcagaatgctcagccccacaatgtgtgtaggctacatttatagccagagaaacgaaaataacttaggttgcctgattggctgcagtctggcatttgccttacctgaacatgttttagnagccttcagccgacgattgactgaaggtttggctgctgtgattggctaaaattcggctacttgttagaagaacatacttttaggttaggttacgagttgtttacacgttaagttacaattcactgtgtacagaggcagctttaggccagacttaattcagcttcacagtgtccctcattttgctcagccccttaattttgagagattgaccaaaatcccacgcactgacactaccttctgtcactatttgacctcattatggaactcacagtttacaatgttaaatcagttagcggattcaaaa

SEQ ID NO: 646939 - DNA, 780 bp, Homo sapiens
  misc_feature (16)..(16): n is a, c, g, or t
  misc_feature (476)..(476): n is a, c, g, or t
gatggtcagttactgntagtctagtcagacgaggagtccaagcgatgctcgagtaatcaacattacgcgccggccgtgaggttcactttctgcagtaagaagtgatttatgggcttttatgtaaaattttaagaatgacttgggtttcagagtagcctttgaaactttgctggcagcttttcattttgtcattggaaggctaagagacttttctcctttgttcaaagaactccttgttcttcagggcttgaacggcaaaaaaaccttagacaactttaacgaagtttaaaaagtatgttctggttttggagcagaaaaaagattcgtgaactggttagtacttagcaccaaaagcagttcagaatgctcagccccacaatgtgtgtaggctacatttatagccagagaaacgaaaataacttaggttgcctgattggctgcagtctggcatttgccttacctgaacatgttttagnagccttcagccgacgattgactgaaggtttggctgctgtgattggctaaaattcggctacttgttagaagaacatacttttaggttaggttacgagttgtttacacgttaagttacaattcactgtgtacagaggcagctttaggccagacttaattcagcttcacagtgtccctcattttgctcagccccttaattttgagagattgaccaaaatcccacgcactgacactaccttctgtcactatttgacctcattatggaactcacagtttacaatgttaaatcagttagcggattcaaaa

SEQ ID NO: 646940 - DNA, 140 bp, Homo sapiens
ccccacattagaagggccatatgagcaggccaatgcataaatctccgggtatagacggatccacttgtttataagcatgggacagcacaagacccacagtacgtatatcctgcatgggagggcaataatggctctagcag

SEQ ID NO: 646941 - DNA, 186 bp, Homo sapiens
cgaaaagtgcccataatggcaggtaataatgggacagtggttctggtcagtgatttgatggaaggggtgtagatatatattgttgtaaataataaaaataaaaaattgttgcaagtaatggtactactgttgcactaacccaaaagtaaaagaccaaatatttctcctactttattacttacaaca

SEQ ID NO: 646942 - DNA, 116 bp, Homo sapiens
actgatgtgtgtgatctcctgagttgatattttctgtgccaccgatgcgtgtttgaaagttccgaagtatttgtatatgatgccccatctttttgtctttgtgtctattgcggggg

SEQ ID NO: 646943 - DNA, 183 bp, Homo sapiens
agctatacaccatttaaaatcacagttacggctaggacagtagctcactggctataatcccagtactctgggcaggcaagatgggcaaatcacttgagctcagtgagttcaatgaccagactgtggcaacactggccacaatcttgtgtggtatagtggtggtatatgggtggtatagtgggg

SEQ ID NO: 646944 - DNA, 552 bp, Homo sapiens
agcgggggggcgagcgggctggccgaggaggaggcggcggcgtggtagctgcctcctgtccggcgggccgggccgggccgagccccggtgcgctgcggcgacgcctggatcctgcctccgccaggccggctgcctggtgccccgaggaggtctgctgagccccaggtccatggtcccctctcgcaggacgtggaacctgggagccacgccctcgctgcggggcctgtggagagtgggccgggccccggagcccgagccggggatggctcgccccgccacagcccagacagcccggacgccgccgtttcccacacagccggtgccggggatggttgatgaacctgggcgtggtagaaatgataccctcgagtcatgtcgtgtgacgaggtactccagtgtcgctcgaagtgcagctcgcacctagctcgtagctcagtgccgagcccttagcgtggactgggctggccgccggaagcccccacgggactctacctgatccctgcgaggtagaatcgacctgaaggagaagctcattagcaggccccaggaagt

SEQ ID NO: 646945 - DNA, 1400 bp, Homo sapiens
ccacccaaaggctccaccgtccgtaataccatcacattgaggattaggattttaacatatgaattttgggggggatgcaatcattcagcccataatcaccctctaacatattaatccatagttattatttcaactccctgtctgcatagttccaactactcaggtcaactgagtctaggtctgtatgttgtcttctcttgcatcttttcgccatctcaatcaattttaatggctcgcaatgtcaacagcatgcttagtatcgtcaggcacagtagcaacactgcaggtcaaatcagtaattcattccctggcaacacagcccatggttgccctctttgatagggccatatagtcatggaggagctctgaacatccactctcaatcagggagttcgggcatgcgatttgtgtttctattgatagccagatgattaccttatgactgtaccaatagcacttacaaaatatcctcatatagctacatcgtatatgccttgacgcgtagcgcactgaggtatttgaccacgcagcaagtcacacatactacacccacagacacaacaactatgccatcttcaggccatgcaagagccgtgtaccatgatgatgcctgcaatacttcaagaggaagcggatcctcatcacaccaaagaaagataagacctccaacatgatcaacgtagcatacaacaacacagcacacatgcactcagcaacacaaaacgacctgaccaccagcatcaaatacgacgagagcaaacagacgttgacacaggacgcacaagaccacccagaacaacgacacaacagcccccggaacaaccccacatagacgcaacagacaacgcatcaacgaaacacaaacgcagacacatcaacgtagcacaacgacgaatcaaaggagaggacaacaggagcccacagaaacaggcaccgaaaggaggcaaacgcgcgcacccaacacacaccaggccgaacgaacaacacacacaagaaacaaaagcactgaagcacacgcacacaccgaccaagcaaccacaacagcaaacaaagacagagagatgaagcagggaaacgaggtttcactcttccacccacgccaagtgggaagaagagagggcaggacagcgcgaagcgggcagcggagcaccatgaacgaaccacaggcagaaagaaataagaggaagcaaacaaacacgaggccacaagaagaggaagacaagagaaagaaacaaaacgcagcagacaagaagcagcaaagagaagagaaaacgacaggacaccacgacacggcgcgccggcatggcgcgcaccgacggagagcggctataaaccagccagccacgccgagaaagcgaagacacacgagtctatcatgcgaggagaaggaacgacaagag

SEQ ID NO: 646946 - DNA, 331 bp, Homo sapiens
  misc_feature (249)..(249): n is a, c, g, or t
aacgggctagaggactgccaggagcccagtgctgcttgcagctggagggcggttggagctacgttggaatccaggctgatgacccttgattagaccttttggggagctaagaagactcactaaacacgtacgtttgaacaaggcttgtagctacccctatgggtctacctgatggcataactatgctctgtaactgtgtctgtcaccgtgtgccggcccagcgtgataaaaattgatgaagtggcaccnccctacagaaaagggcatggtacaagggatgaggaaatcgctggcactcacattcagcacagtcagggcgcgctcggcaaga

SEQ ID NO: 646947 - DNA, 209 bp, Homo sapiens
caagaggatcccaagcttacgaggcattgcaattacatctctccacacagagctgtttctgatgcagagaaacttctcatgccagactcatgacttctggaaggggttgacctctttgtctcacagttgaaggagaccatatcaagtgaagtactgttcctgcctgaccctagccaatttactacatcacactttagacacccctcgtt

SEQ ID NO: 646948 - DNA, 1285 bp, Homo sapiens
gcagaacaaggaatcagcaaacgccgggagcaggggcctgcagttaccgctgagggcagcagtggtgctgctagcagtgaccccgtgaggtgaaagccagcggccagcactgatctgcacgagagacgtcacaccaccttatcaaaacatggccggacgtggggaggcatgaggagtggcatggagtgaaatcatattatggcatctcacaggccgagtcgggtccacgcgcgcactctagtcgaagcattgcaggtctccaagaggtggactcgtaggactccacatttatgccgcacacctcgaacagacatcaatacctggttcaaaggcacggggctgtttcccacacggacaagttcaccattcaagggttttccgtccatggcaggggatccacgagccactctgccgtgacataatcaaatactcccatatccttataatattacctccagcgacaaatacgcttccattttctggttcacctgtgtggggggtatcaaaaacacaggtaaattggaaccaaactggcgcacacccggactgctcctatatgcaacaaagtcccttgcttcaaatttaggactttcctcggtggcatcaagttaactacaaatacatagcgcacccgcacagcaaatagggcgggccagaacatcccgcgggcggcacaaccacagacccaaccaaaaccccacgtttcccctacataacgccgcgtgcatacactggagactccacaaaaacaacgctgcagaacaccaggaaacaggatccacgcccatagcacccaagcaaacactaggcacatacaaccagacgccaagctgagaggactacacagcacagaaacgaaccccaaagtggaacgaggatgccagccacatcggacctagcccccaacatggacacagtacagagaccagaaccaatgagcaatatacacaacaaacctgacaccggccccacccacaggcagtaacagaacgcgcccgccagacccagacacacaagcaacggatgcaccaacggagccctacctacacccagacacaccaccctacaacacccaaggcctcgcaccccaaccagacagaaaaacagaaccagcaccaacaacaagcacaaaccacacccatccgcaacccccacaacagcaacgcaacacaggacccaacaccccccacacccacgccaccccgcacctgctacaaacacaccacaccacaacacaacccaccaccccaccaccccacagcaaccgacccacccactcaccacc

SEQ ID NO: 646949 - DNA, 393 bp, Homo sapiens
ggttctgatgctcttccgggagaaccgaggtgtgtgacaatttgacgctggatgctgctacccccggcactgccacagcccacccccagccctcggccactgcttgcactgaagccagagcccaccacactgagcccaccacctaggccgacacccccactgctgctggagtagtagcttccactgctacctccggcaagacctccaccgaggccgccgccaagacctccaccgaggccaccgccatagccactgccactgccatatccagaggaaacactgcttgtgacaacagagatgttgactggtccaactccttctccactgagtctgcattcctcgccctccagcagcttgcggtaagtggcgatctccacgtccagggccagcttg

SEQ ID NO: 646950 - DNA, 120 bp, Homo sapiens
atccgtcattagaggatccctaaaggcgagtcctgggtaagactggagatcatccctggtgtgctgtccatctgacgaagtccatgatgctggacattgagagcttctcctatctcaacc

SEQ ID NO: 646951 - DNA, 1080 bp, Homo sapiens
  misc_feature (1)..(1): n is a, c, g, or t
ntttgaagggggcgatttgacaaactgtttaaacgcgctttcaagtaggggcttttcaaagacgtcccccaggaggggaagtgcagaaaaaaggttgctttcaatcgaagaggtgccaaattttttgcatggccaaccaaaatttagtccttgcagtcctggagtttggaaacttctaggttgctacctatgggcaactttggtttaagggaccatctccacatcaagtgtaataaactctcctgtccagcaccatttacgtggagcccattccacggttgtatgaattcctttgctaccacctccaggaaaagaacagtatccccgtgtatcttttagcttcacttacaccactagtaactagtaggtaattaatcccaagcaattgcggtaatcccccccagtaccctgcaactgttttatctgtttgggactcccaagctgatgcattatgccttccaaacccagcccgatacatggtgaggtggcgacattgaaaaacttgcgagcaacaaaccctcccgggaaaaagggcgtgggaaaaagaatgaaaaaaaaagtatataataggaaaattcttgataacactggaatatgattaaaagcataaagagtattttagggaaagacatttctatatgcgcgagggagtgtggtaacataaaaggattatagagggtataacctcatataaggagtggagggcattctgaaaatatcgagcggagaggaggtaatcaacccctgagagaggagacttgagaaatattgtaggacgtaggatattccctcgttgtaaatgaggaaaggctgaagactcactgcaaatcgagcttactggataatgattccggagaaaggcctgactataccaactttgaacacaaatcggaccaagatcattccactggctgatgcttctaataatgatgaatctacaccttcgacccacagaagtgcactcattgtgcactatttctgaagccaggaaacaataaaagcaggcagaataccacctttaggtgaacgttcaatcccagaaagcatgttaacataccaagaggggcaattgaaatatca

SEQ ID NO: 646952 - DNA, 263 bp, Homo sapiens
acgattctggccgctctcggggtgctactgcgggagcagaagcatctactacctaggaccagctcctgacggtcagcatgatcatcgtgcaccccccgttctacaccgcccagatcgaagcgcacttcgccctgctgcagcttgagcatctggtcatggtctccagacctcgctccagcgactcgtcaccctgccccccctggcctcatatgcagcttcccctctgggcatgccgtgactgggtcactgcgctggggactgca

SEQ ID NO: 646953 - DNA, 255 bp, Homo sapiens
atgtggggccatccagtaccgcatctccctgcagtttgacttctttgagacagagggcaatgatgtgtgcaagtacgacttcgtggaggtgcgcagtgtactccacagctgactcccaaagctgcatggcaagttctgtggttctgagaaagccccgaggtcattcaaccttccccagtacaaacaaacaattgcgcattgggcccgaccaggaaccggagctccgaattcggtaaatcattggtccatagcctt

SEQ ID NO: 646954 - DNA, 278 bp, Homo sapiens
atggactcttagaaaagcttgtaaatgcctatattgtgggcttttaacagtatttaagggaccacttaagacgagattagatgggctctcatggatatagttcctcatttgtcacaggtgtcttgtgattgacaatcatgagcgaagtgaaatagcatagaactacaagggaatttagtatgtaaatcgtgcctttactacatgtgtgatctgcaaaccctgcttggttctgagctgcgtctattgaattggtatagtaataccaatggctttttatc

SEQ ID NO: 646955 - DNA, 416 bp, Homo sapiens
ttgagggaggaaggagcaaccagaagaggaagaaggccaaaaagtgacattgccaaagcagctgcagcagctgctgctgtagcatcaacttcgggaatcaacccactactaatgaacagtctgtttgctggaatggacctcaccagcctccagaacctacagaacctgcagtctctccagctcgcaggcctcatgggctttccgccagggctagcaacagctgctgctgctgggggggatgctaaaaatccggctgccatgttgcctctgatgttgccagggatggcaggattgcccaatatgtttggactaagcggattgttgaataacccaataacggctactactggaaatgccactactgcttccggtcaaggagagactgaggatggcgcttcaaaagctgaagagaagaa

SEQ ID NO: 646956 - DNA, 129 bp, Homo sapiens
tatacattatttactcaaatcctaacctatctaactcagaattgctgtatatacttaatcactattatattgggctcattatttatttatttatttattatatgggcggggcggacaaaaataaaattt

SEQ ID NO: 646957 - DNA, 936 bp, Homo sapiens
  misc_feature (686)..(686): n is a, c, g, or t
ggagagaactagtctcggttttttggtgttttttttttagctgctgaaacagacactcattaatttccccaaaaggaggcaaaagggggtcctgggggagtctctgtcccagcccggacaggcagatctcatttccagaaaaagcaattccaaaaaagcgccagcggggtagaggcccaggacagagggggaagagcagggcgccgaaggtgtggtgctccagcacacccggggctagcgctgccaggaaaagctgccagccctcggccagtgacaggggcgcctccgtgcagctcccgccacaggaacaggctgccaaggagcgtggctgccgggctggtcagaaccagcagggcagatagagggtccggggcccatgaggcttggcaagcgcaagcaggggggcccctgggtggtgggccatgaggaagcccagtgagaatgtggtgaggcgcgaatgcagcccagctgccgtcgtctaggtaggatcagggctaccactcttcagtgccatcaagcccctgtttgggggcctgtgtgcttaccacccgggtggttctggtgcggcccggccggcatgtcgttaattcgcagcagttggtcgccaaagctcagccttgtgccagtggaaagtgcgtggggggcacagtgttggcccaacagtgcagagacatataagtgccaanatcccaggctggcgacatacacgcaaaggttgccaaaaaggaggaaaagcccaacccgtgtaaggggagacgagaccacggcgaaggtgaacccccggagcccctagggcacattcaaagcataacattgtgcacaacagtaacaactcatgatacatgaacacacacaacaaggaggttaacaacaggaaaacagagagggcacgagctccgaacaatcgactacaccaagatcatgagaagcacacac

SEQ ID NO: 646958 - DNA, 388 bp, Homo sapiens
ccatgaggcaggttcacaacggattgcgttcgcggcgcaattgtatgtaatgggccagggaaaggcaggatccagtgagatatccttgggtatacacatgcgtggagaaagaaacatagatgagatagggtattggaccatggaaaaagttaacagattgatctagacgaaaaagttggataaatatgagaaaaagaacacgacacggacgccgaaaacaacacgtacaacatacagcacacagagcccgcaggacggccgcgaggaagcacaagagcagccaccacacgctcggcctcggcccaactgaagagggaaaagaccccaccgagcaaacaggaccaccccaaggaacacccatggaagcaactgccgccacacaggaacc

SEQ ID NO: 646959 - DNA, 491 bp, Homo sapiens
aacgcaatatgtgctctagaaagcaggatcacacaccaagcgggaggcatcgtgggaaaaaatgttgggtgatgggtggatgcttgacctgctccctgggtaacagggcctgaaccaataagggagagagattgatggtcatagctgatatcggtcagaccgtaagatctagtgttgaaagtgaatcacatcattcatctgatcaaaaccctcgcagagctcccatgttccttgggaaaaaaaacacagttcttttaacagcctgcaaagtcctctgtgacctgtgtccccgttacttctcacttctcacctcttagttatcacactctctgctctaggcatgctggcttctatgctgttccaatacccctggaattggaacctgagacctactatagactaaatgtttgtgtccccctaaaattcatatgttgaaacctagtctccaatgtgatagtatttggagagtgagcctttgggagctgaggagg

SEQ ID NO: 646960 - DNA, 1627 bp, Homo sapiens
  misc_feature (1278)..(1278): n is a, c, g, or t
  misc_feature (1321)..(1321): n is a, c, g, or t
  misc_feature (1360)..(1360): n is a, c, g, or t
  misc_feature (1467)..(1468): n is a, c, g, or t
  misc_feature (1484)..(1484): n is a, c, g, or t
  misc_feature (1505)..(1505): n is a, c, g, or t
  misc_feature (1544)..(1544): n is a, c, g, or t
  misc_feature (1571)..(1571): n is a, c, g, or t
  misc_feature (1575)..(1575): n is a, c, g, or t
  misc_feature (1577)..(1578): n is a, c, g, or t
  misc_feature (1592)..(1592): n is a, c, g, or t
aacggctaggtagcgaggctgggtgtcggaataaccttggttgcatccattttgccatgagcaagcacaatttgggaatattctactttaaaaaggctctgcaagagaatgacaatgtctgtgcacagctcagtgcaggtagcactgatccaggtaaaaaattttcaggaagacccatgtgtacgttactaaccaataagagatatgagttgctgtataactgtggaattcagcttcttcacattggaaggcctcttgctgccttcgaatgtctgattgaagctgttcaggtttatcatgcaaatcctcgcctctggctacggctggctgaatgctgcattgctgccaataaggggacttctgaacaagaaactaaaggccttcccagcaaaaaaggaattgtacagtctattgttggtcaaggctatcatcgtaaaatagttttggcatcacagtctatacagaatactgtttataatgatgggcagtcttcggccattcctgtagccagtatggagtttgcagccatatgtctcagaaatgccttgttgctgctacctgaagaacagcaagatccaaagcaggaaaatggggctaaaaatagtaatcaattaggtgggaacacagagagcagcgaaagcagtgaaacttgcagcagtaaaagccatgatggagattaaattcattccagctccaccttcttctccattgagaaaacaggaattagaaaacttaaagtgctccatacttgcttgcagtgcctacgtggctctggctttgggtgataacctcatggctttgaatcatgcagataaacttcttcagcagcccaagctgtcaggatctcttaagtttttgggacatttatatgctgcagaagccctcatctctctcgacagaatatctgatgccattactcacttgaacccggagaatgtcactgatgtctccttagggatctcttcaaatgagcaggaccaaggatcagacaaaggtgaaaatgaagcaatggaatcctctggtaagcgggcccctcagtgctaccccagttccgtcaactctgccaggactgtgatgctgttcaaccttggcagcgcttactgcctgaggagcgaatatgacaaagcccgaaagtgtctccaccaggcggcttcaatgatccatcctaaagaggtgccccctgaggccatcttgctggcagtctaacgttgaactgcagaatggtaatactcagctggccttacagatcatcaaaaggaatcagctgctcccctgcangtgaaaacacactctgaagtgagaaagaagccagtgttctacngcctcgtccacccgatccagcccatccaaatgccggctnttcaccactgtgcagagaaagtgatacttcacttttggaaaactgttacctgagacccaggggagaatttactggccattttagttgtatcacagcagaatgaatannagatggtgaaggctgntaattttgagtcaattctacncctgacttttggccaaaagcttacttaaaattaaggatntactaagtcatcatcagctgtttttcntaantnnagccagctattaantttgagccattatgtaatatatgccataggcaatt

SEQ ID NO: 646961 - DNA, 136 bp, Homo sapiens
cactacaagcggtacgatgttgtcattgctgtgtgggctgaacagaaagtctggtgccacttcacctgggtcgcggtgtgaggcagtttcgagttgatcttgctgtggtgaaagcgcgcgccattgctgcgcatga

SEQ ID NO: 646962 - DNA, 167 bp, Homo sapiens
  misc_feature (160)..(160): n is a, c, g, or t
atcctctgtatcattacttacaagttgtgtcccttcacccagcctcccccaatggcaacatcttgcaaaactacaatgtagtctcataaccaggatattgacattgatacagtgaagatacaggacattctcatcaccacagggatccccagagagccgngaattcg

SEQ ID NO: 646963 - DNA, 766 bp, Homo sapiens
  misc_feature (480)..(480): n is a, c, g, or t
gaagaagaggggtcttattgcagagaggttggtgctccagagatacagttggtcctacgattaactgaatattctctaacactgagtggtatggaatcctactgcgttcgaatggtttgtgcatgatgtcatatgcgacgagtacatctccatcataacatcgtagtctgatccttgccaggccgtagaatcccattttctacattgtaaggcgatgaattaagacaaccggcaatgcctcagggataaaaaacctgtaggacattgaaatggtccgcaagagtggatgtgtacttgtccaaacattttcggagtgcaatctggtattgctgccagcctctcctgatcggcgtatacatgcatcagatgtgcatcctggagcattcctatgcatacctgaaaaacctgttttcgagcagtcatttcctgcaaaaatatgcactgatgtgggttaaaacagcatcgtactaaagtctggantcacctggacttatcaccatgttatgattcaccatggtattagtcgcgcatgggcaagtccgcgaaggagagggacttctagccattttgaggtggtttaccctattgatactatggtacagcgaatttatttcctcccttccttgagagttcatcctgtgagggcctttggcgttcggatcccaagatattgcgcctactttttgactcatcgcagagggatcttgttcacttctggaaagaacaaactttctaaagtggacctccattgttttcactcgcttct

SEQ ID NO: 646964 - DNA, 2052 bp, Homo sapiens
  misc_feature (1703)..(1703): n is a, c, g, or t
  misc_feature (1746)..(1746): n is a, c, g, or t
  misc_feature (1785)..(1785): n is a, c, g, or t
  misc_feature (1892)..(1893): n is a, c, g, or t
  misc_feature (1909)..(1909): n is a, c, g, or t
  misc_feature (1930)..(1930): n is a, c, g, or t
  misc_feature (1969)..(1969): n is a, c, g, or t
  misc_feature (1996)..(1996): n is a, c, g, or t
  misc_feature (2000)..(2000): n is a, c, g, or t
  misc_feature (2002)..(2003): n is a, c, g, or t
  misc_feature (2017)..(2017): n is a, c, g, or t
gcgattttgccatgttactcaagctggtctcgaactcctgggctcaagcgatccgcccgcctctgccttccaaagttctgggattacaggcatgaaccaccatttcccacaaattctacattttgaaaatgctctctagactggtaataacaacaacaaagatggatctaatcataaagctgaaagtggagctctaatagaagctgcaaaatcaaagatacatcagtacaaagtacgagcttatatccaaatgaagtctctgaaagcatgtaaaagggaaatcaagtcagtcatgaatacagctggaaattccgcaccctctctctttcttaaaagcaattttgagtacttaagaggtaattatcgaaaagccgtgaagctattaaatagttcaaacattgctgagcatccaggattcatgaaaacaggtgaatgcttgagatgcatgttctggaataaccttggttgcatccattttgccatgagcaagcacaatttgggaatattctactttaaaaaggctctgcaagagaatgacaatgtctgtgcacagctcagtgcaggtagcactgatccaggtaaaaaattttcaggaagacccatgtgtacgttactaaccaataagagatatgagttgctgtataactgtggaattcagcttcttcacattggaaggcctcttgctgccttcgaatgtctgattgaagctgttcaggtttatcatgcaaatcctcgcctctggctacggctggctgaatgctgcattgctgccaataaggggacttctgaacaagaaactaaaggccttcccagcaaaaaaggaattgtacagtctattgttggtcaaggctatcatcgtaaaatagttttggcatcacagtctatacagaatactgtttataatgatgggcagtcttcggccattcctgtagccagtatggagtttgcagccatatgtctcagaaatgccttgttgctgctacctgaagaacagcaagatccaaagcaggaaaatggggctaaaaatagtaatcaattaggtgggaacacagagagcagcgaaagcagtgaaacttgcagcagtaaaagccatgatggagattaaattcattccagctccaccttcttctccattgagaaaacaggaattagaaaacttaaagtgctccatacttgcttgcagtgcctacgtggctctggctttgggtgataacctcatggctttgaatcatgcagataaacttcttcagcagcccaagctgtcaggatctcttaagtttttgggacatttatatgctgcagaagccctcatctctctcgacagaatatctgatgccattactcacttgaacccggagaatgtcactgatgtctccttagggatctcttcaaatgagcaggaccaaggatcagacaaaggtgaaaatgaagcaatggaatcctctggtaagcgggcccctcagtgctaccccagttccgtcaactctgccaggactgtgatgctgttcaaccttggcagcgcttactgcctgaggagcgaatatgacaaagcccgaaagtgtctccaccaggcggcttcaatgatccatcctaaagaggtgccccctgaggccatcttgctggcagtctaacgttgaactgcagaatggtaatactcagctggccttacagatcatcaaaaggaatcagctgctcccctgcangtgaaaacacactctgaagtgagaaagaagccagtgttctacngcctcgtccacccgatccagcccatccaaatgccggctnttcaccactgtgcagagaaagtgatacttcacttttggaaaactgttacctgagacccaggggagaatttactggccattttagttgtatcacagcagaatgaatannagatggtgaaggctgntaattttgagtcaattctacncctgacttttggccaaaagcttacttaaaattaaggatntactaagtcatcatcagctgtttttcntaantnnagccagctattaantttgagccattatgtaatatatgccataggcaatt

SEQ ID NO: 646965 - DNA, 319 bp, Homo sapiens
gaaacacgtgagggaaaatgatcaaaagagaaggaaacggccaggcacggtcgtcacgcctgtaatcccagcactttgggaggctgaggcgggcagatcacctgaggtcaggagtttgagaccagcctggcccacatggtgaaaccccgtctctactaaaaatataaaacttagccgggcatggtggcgcgtgcctgtagtcccagctacttgggaggctaaggcaggagaatctctagaacctgggaggcgaaggttgcagtgagccaagactgcaccactgcactccagcttgggcgacgaggatcactccatctca

SEQ ID NO: 646966 - DNA, 1526 bp, Homo sapiens
ggcctggcctcccacttggttgcggcctggcctcccacttggttgcggcctggcctcccacttggttgcggcctggcctcccacttggttgcggcctggcctcccacttggttgcggcctcccacttggttgtgctccatacttgcttgcagtgcctacgtggctctggctttgggtgataacctcatggctttgaatcatgcagataaacttcttcagcagcccaagctgtcaggatctcttaagtttttgggacatttatatgctgcagaagccctcatctctctcgacagaatatctgatgccattactcacttgaacccggagaatgtcactgatgtctccttagggatctcttcaaatgagcaggaccaaggttaatgaggacatctttgatcagaactggtcactgtttccatttccctcctgtcataattcaggatgtgtggaaatttaggcatggtggtaatgagaagaaagttttaggttggctttccacatttttgtctgtacttactttgtagcagttgtttgctaagtagacctgagagttaatgatcacatcatctaaattctcacttttgaaaggctggtactgttagaatggttaattttggttctgatactatttatttgttttcctttggagtgattctaaaatccataggggagtaaaaatattgcattcaagagtcagttttagtccaggcgtggtggctcacgcctgtaatcccagcactttgggaggctgtagcaggagggtcacttgagcccaagagttcaagaccagcctgggcaacctggtgagaccctgtctctattttaaaaataagggacaaacaaaaaacacaacaaaaaaaaaacacatggaggacagcacaggccacgaagaaccaccaaaaacacaaggaggggacgggggccccaaaggaaacagaaaacatgggcacaaaaccgtgttccaaagaaaaaccaggagagagaaaaaaggacgggagattcacaccacaaaaaaaacacgcccggggggaaacagcgcggtttcgaaacaaaacacaaaagaggacaacacagagaaaaaaaagagagacataaacaaagggagagacaaaagagaagacaaatcataaaaataccccgacgagtgcggaaaaagaaaaacaaaagaaaaaagaaaaagagaagaaagacacaaaaaaaagaaaacaaagaagaggagcaagacaaaagaaggaagagaggagaggaggagaagaggagaggtaggcaggaagcaaggagaaagaggacgagaagcgccgaaagagaaagaggaagatacagaaaaggcaagggaaggagaagagaggacaagagaaaaaagagagaaccgaagaaaagaaaagaaaaacagggggagacgaagagagagaggcagaaaaggaaagagggaaggaaagcggaaagcagagagaaggaacagaagaggagagacaacgaagaagaacgaacgacgagaggacgcacgacactaagcgagaggagct

SEQ ID NO: 646967 - DNA, 496 bp, Homo sapiens
ggtagtgatctagaggatcccggaagcaactgcacaaagataaagacaaagagtatcattggaagaaggggtcagcggctcctgcttctagtgaaaaagggccctgagctttagtgcccttggtatttattgggtaaaggagatagggagaagggggggtggttgtcggtcagcagcttgattcacagcaggctcacaagatggcattcttggaacagtaggctctagatgtctcagtagataacctcaaagagcatggcgccagggagtgattgccctcagcgaaccttctggcggctgaagcagaagtgagttggcccacattctgcacttatgataaacagttggctgtttgatcatatagcctcagtggaatgctgagtgggtcacaacccatgggcattcagctctctacatttccccctttctgtttatgaattaattgaaagaatgtaaggccaggctgggcagctctcattttctgatgggcagtcca

SEQ ID NO: 646968 - DNA, 991 bp, Homo sapiens
agtgggtaccgggacgccgtgaggcggaagctgtgtatggcgggaggctgtggcggtcccttggtggggaagctgttgctgttgctagacgacgggaactagctctcgtcacttcctcagcccgccgtctgcccactcctctagccggaacctgggggcccggagccggggtaggcacagagttgtcctcggaggtccaggacagcggccagcccggcggcgggagtcagggccacgccacctgcagggaagaacccgagtcgaagcgggaagatggctgcagacaagcctgcagatcagggagcagagaaacatgaaggcacagtctggaaattatgatgcctgtctacaacaccttgcctgtctacaagatataaacaaagatgattataaaataattttgaatacagcagtagctgagttttttaaaagtaaccaaacaacaacagataatttgagacaaacacttaaccagctgaagaatcaggtccactcagctgttgaagaaatggatggattagatgatgttgaaaacagcatgttgtactataatcaagcagtcattctttatcatctgcggcagtatacagaagccatatcagttggtgaaaaactttatcagttcatagagccttttgaagaaaaatttgcccaagcagtgtgtagagggaaattatagcactaaatgcccacaggagaaagcaggaaagatccaaaattgacaccctaacatcacaattaaaagaactagaaaagcaagagcaaacacattcaaaagctagcagaaggcaagaaataactaaaatcagagcagaactgaaggaaatagagacacaaaaaacgcttcaaaaaatcagtgaatccaggagctggtttcttgaaaggatcaacaaaactgatagaccgctagcaagactaataaagaaaaaaagagagaagaatcaaatagacacaataaaaaatgataaaggggatatcaccactgatccca

SEQ ID NO: 646969 - DNA, 571 bp, Homo sapiens
atatttaaaaattgaatctggccgggcgtggtggctcatgcctgtaatcccaacactttgggaggctgaggagggtggatcacctgaggtcaggaccagcctggccaacatggtgaaccctgtctctactaaaaatacaaaaattagccaggagttgtgtgccgtaatcccagctacctgggaggctgaggtaggagaattgcttgaacctgggagctggaggttccagtgagccgagatcgcaccactgcactccagcctaggcaacagagtgagaccccatctcaagaaaaaaaaaaattggaatctatctcactagagaacaggtgaactagccctcctaaccggaccaggcacaagacaagaaattctagcctatagatccccttccaaggtgccagtgaggacataagccaaacggtatacggcctccaaaggattacacacttatggccccggctcatcaatctggaggacgtcacggattcttttccacaacggtatgccaaatgtcctagtcaacggatcttcaaaggtgtcaagaccttatgaatcgggtctatcagactaa

SEQ ID NO: 646970 - DNA, 111 bp, Homo sapiens
tgataccccttgaccaagaagaccctcattggggtctatgattgggacccctttctgtaactatcatgctactgcactccagcctggtgcaacagagcaaggacctgtctc

SEQ ID NO: 646971 - DNA, 318 bp, Homo sapiens
cggagcccaatggctaggtttagaaatggctttctgtcccacccccacccccccaaatggtcaaaaaaatcatgtaatttctccaaccttccatgtctaaaatggtgacgattccgtcatatgcacggaggatcaatgagctaattcctgtggatttcagacaaatgatcagaaatgtcacccgttcgtttgttctcctaccagtatgtgctgtggtggctgatcttatgtgtcacctttgcctggccatggttcccagagacctggtcagccactgtggaagtttttatgatggtgcagtaaatatgtgggcaaaat

SEQ ID NO: 646972 - DNA, 249 bp, Homo sapiens
cattccgggggaggagtggaactgctcactctgccagtgtgctccctgtacctgaaggaatgaggatggcagcactcaacctggatggtgcagacagcgacttggcgttgtggccaggctctcaccagccaaccagcggaaatgtgagcgtgtactgctggccctattctgtcacgaaccctggcgccccactgtgatcagctggctaccgactccaccttctccccggaccagcccggtacatgcaag

SEQ ID NO: 646973 - DNA, 776 bp, Homo sapiens
  misc_feature (297)..(297): n is a, c, g, or t
  misc_feature (300)..(300): n is a, c, g, or t
  misc_feature (306)..(307): n is a, c, g, or t
  misc_feature (311)..(311): n is a, c, g, or t
  misc_feature (314)..(314): n is a, c, g, or t
  misc_feature (316)..(316): n is a, c, g, or t
  misc_feature (340)..(340): n is a, c, g, or t
  misc_feature (346)..(346): n is a, c, g, or t
  misc_feature (350)..(350): n is a, c, g, or t
  misc_feature (358)..(358): n is a, c, g, or t
  misc_feature (370)..(370): n is a, c, g, or t
  misc_feature (512)..(512): n is a, c, g, or t
atccacctgggggggctttcagactgcccctgcccgggcctgtgcccggaggtggtgcccattagctccatggataaggtcgccggggtcgtggttgcacgccactgcaggaccaacatggtcccagcttccgtggacgccattaattttcatgacaagatcagaaaagggtgcgtcatcaccatctcgggaccgcatgaccctcccgagcaataagatccatggagatcgaggtgttggtggacgccgaccctgtttggcagcctctcaaaagcgctaccgggccccagtgccttnttnacctanntgtngtnanccaggaaggcaggtcctgcctgtnccccanctgntgccccanacccaggaccanaaaaagcgcttttaggaaggcaaagggcggttcctgcaaattaaggcgaaacgacagggccccgcggagcctcagccctagactccctcctcctgcccctggtgcctcgagtaaccatggcaacgggcccagtgtccagtcncttaaaagttccccccttggcccaaaaccccattcccattgaaagctggtgttgtttgaagtttttgtatcccagtgttaacctggactctttcctgcaaacctacccccccaagctttttttatatccttccaggatcaatgctacccagtgttgtccccagcgccgggaggggttgggcaaaaaccctcgggaatgcttccgagccccctgtagggtatgggaagaacccagcccccctaataaaactgctgcttggctgga

SEQ ID NO: 646974 - DNA, 101 bp, Homo sapiens
atgtaaccactggcctacaccacagccagagcaacgccagatctgagccgtgtcttgcgatctacaccaacagcttaaggcaacaccagatccttaaccca

SEQ ID NO: 646975 - DNA, 150 bp, Homo sapiens
ttatgcctgctcggctagcaaagtgctcgagattacaggcatgagccagcacgcccttgctgcacaccccctttctaagtatagaagaatgtggaaggggtgtagtgggtatcatttacaaaacaaaatacacgcatttccacgagatca

SEQ ID NO: 646976 - DNA, 782 bp, Homo sapiens
gggcctgaggagcgcggagcccggcgctcgtgtccggcgccatgtgagggggctcgggggccgcggtggggcctgggctgctccccgaccggatgatgaggaaactgaggctcatagaggtcacatggcttgctcgaggccccccaggcagtgtgaacccactagtcccgtgcccccagggtcaactgcaggagcgccgatacctacccctcagcagacggcggagagaaatgagtagcaacaaagagcagcggtcagcagtgttcgtgatcctctttgtcgcctcatcaccgatcctcgatcctctacagctccaaacagtgccaaatgaggtcttccattacggctccctgcggggccgtagccgtgcgacctgtcaacctcaagaagtggagcatcactgacggtatgtccccagttctcggcaacaagacacatgcctctcggtgccagcagtgtgtgagttgtcagcagctccagccacctgcgtgggcgaccaagctgggccctgagatcgagcgggctgagtgtacaatccgcgtgaatgatgtaccaccacctggctactcagcgtgatgtgggcaacaagagcactacgcgtcgtggccattccagtgtgttccgcgtgctgagtgaggcccaggagtttgtcaacggaccctgaaacgtgttcatcttctggggggccccgagaagatgcagaagcccagggcagctcgtgcgtgtgatcaggaggcggctggggttcccaacatgggagatttgcggtctccggcgatgtg

SEQ ID NO: 646977 - DNA, 969 bp, Homo sapiens
  misc_feature (771)..(771): n is a, c, g, or t
gaaactcatcactagacattcttactaaagacacgtactacgttgtactcacttccacggatgtgctatcactaggagctgtatagccatcataggaggcttcattcactgatttcccctatatctcaggctacaccgtagaccaaacctacgccaaaatccatagcactatcatatcatcgggtaaatctaactttcttcccacaacactttctcggcctatccggaatgccccgacgttactcggactaccccgtatgcatacaccacatgaaacatcctatcatctgtaggctcattcatttctctaccaggagtagtattaataatgttcatgatttgagaagccttcgcttcgagatcgacttagtcctaatagtagaagaaggcctccatatacctggagtgactatatggatgtccccccaccctaccacacattcgagagaagcccgtatacataaaatctagacaaagaaaggaaggaatcgaacccctccaaagctggttgtcaagaccaaatcgccatggtcctccaatgacgttgttctcaagaaacataatgagaacggacatttcgggttctgtatgttggagagggtggcccatcctggggtactaactgtccgccctgtgggtcgctaggggtgtgaccagagcccaaccttctgcctctgactccatgagtgagtcaagccttgcggggaggtcagccctaattaagcctgacgttttgattggaccttggcgcgaataatggcacggggttanacctaggttaagaacagcacggaaaagagaaaaggggctgttgacacacccggtaaaagggtagacttttgggcacgcaagccacccgaattgaagattttcggtcacatgtaacaccaaaccctttgttgtctgacagccactgttttctacacgacccagttatgcttccaaaggaaccagaaatagtaagttcct

SEQ ID NO: 646978 - DNA, 466 bp, Homo sapiens
  misc_feature (9)..(9): n is a, c, g, or t
aaggatganataggagccaaggtatgctatgagccaaggattatgagtaatccagttttgtgcactttaagccatttgaaaaacagaaaagcaaaacaacaaaataatttttaagaaattgaatatagggtgttatgctctgaatgtgtccccctaaaattaatcaccaatgtcataagattaggaagtagggctttaaggtagtgattcagtcatgaagggagagtgttcacgaatgagtttaggatccttacacaaggactggatggagtgggcttcccctgttttgcccttccaccttctgccatgtgaggacacagtgcatctcctcctgaagacacagtgcacaagataccatcttggatgcagagaccagaccctcaccagacaccaatcctgctggcaccttgatcttggacttctagcctatggaactgtgagaaatacatttctgttcttcagaaaa

SEQ ID NO: 646979 - DNA, 130 bp, Homo sapiens
  misc_feature (52)..(53): n is a, c, g, or t
  misc_feature (63)..(63): n is a, c, g, or t
tcggctcggtacctttaaagcgtcatgctggcgtggctatcgattacgcttnnttttcacganccaggcatcctgccagtggaacccacgcccggctcaaagtgagtgcgccgctgttccactgcatgca

SEQ ID NO: 646980 - DNA, 84 bp, Homo sapiens
tccgggtagtggcgacggaccgtttactgggctactttccttacttttatttactaccacacaccctacgatctgggcttacac

SEQ ID NO: 646981 - DNA, 367 bp, Homo sapiens
ccaaacccctgaccaattggatggggcccccccccattaagggtgggggtccctctattaaaaattttaacaaaaattttaactgtgaaaaaggccctgaatttttgttgctaaaaatttggtaaaaccccttttaactaaaaagtgaggacgtggaggaactcctccattttaggctttcaaacgtaacaggctttttgggggggggggggggggggggggggggggggggtgtgttttttttaaaaaaaaaggaattcaaaccctgggattaaaaggtatgttttcttaaaaaaaatttatgaatgaatggataaaaaaaattccgggaaaaaattttaaaaaaaaaaaaagtttgtttttccca

SEQ ID NO: 646982 - DNA, 523 bp, Homo sapiens
  misc_feature (11)..(11): n is a, c, g, or t
  misc_feature (17)..(17): n is a, c, g, or t
  misc_feature (96)..(96): n is a, c, g, or t
  misc_feature (199)..(199): n is a, c, g, or t
  misc_feature (208)..(208): n is a, c, g, or t
  misc_feature (248)..(248): n is a, c, g, or t
ggcagccctgnggtggngtcggctcttatagctgaaacctaaggctggcgattcttcttggaggcgtggtaccacttggtgcttccgacgtacccntctggccctagttgaaaaacggagccatactgctgtgtgtagcgcgtcatttttaaggtttgcgagtatattttattttccctaactttattaagatctcaanttgaatganttgcgtggcctctttatcccctcatcaacggctgccttanggcttttattctactgttttattactatctatcctcctcctccctcagtctatcttatttttggatgctttcaaagtgaatgtagcagatttcaccagttaacttcataatattttatacacttgaagtctagctttttgaacagtacacaaatgtgactaaattgctatagatgctgttaaagaaggtataaaataaatgccccagttttggaaaaaatttaggagccttattttaaaagtaacaggtattctggaatcctggcatggagttgg

SEQ ID NO: 646983 - DNA, 370 bp, Homo sapiens
agaactcaagcagtgtggcattgcttcataaacatcttcagctcttgctgcctcatgccacagatatttattcacgttccgcaaatttgcttaaagaaagtccttggaatggcagtgttggagaaaaattgagagatgtgatctatgtgtcagctgcaggcagtatgctctgccagattgttaactccctactgttactcccggtgtcagtggctcgtcctttattgagttacctcctcgacctcttgccacctcttgattgccttaatagactcctgccagctgctgctcttttagaagaccaagaattacagtgggcctcttcatgggggggccagaagtaattgacccagctgggtgtgccaattac

SEQ ID NO: 646984 - DNA, 103 bp, Homo sapiens
agtttcactcttaaagagtggctggagccgaaggtatagccgagattaatgctcctttttctttatctgatctcggcttagtggctgaagactgacactgccg

SEQ ID NO: 646985 - DNA, 892 bp, Homo sapiens
cgcgccctccctccccatcccacccccctccttcccctcgatccagccctcatgaccctgaccctggccgcggctgcaggcggctcgcccaggcgcgcagccctcggtcccacctccctctggctcgggcctgagcattccgcagcctcggccggcccgggcctcttctccgctgctctgctcccccaaggactttctgtgccccactcctacccaggcagggctgccctgtcttgggtcctttacgggggaccattccccagcgtccctgagacactcatcctgggatttcttcccctaaatacagacattctcaaaccaaatgagacctcgaggtccctacacctgatcctgcctcccactccctgagccacactgagaaggaaggtctctcctttagggaggactctggcgcctgcaaccttgatcgacagcaaagatgtccagtgtgtatcctgcatctgcctttcctgaccattcctcgtgccccattctccgtgggatagattctcatggggagtgggggagccttcgggtgtggcagaacggcatgatggaattcataaggtgagcagaaactcaaggaaaactgtccaaataccggctcgactcctgggtacgctggagcaaggatgaagaagctctgagactttgcacgtcagtaaccaccaacaccatgcctctggttcccacactgcagggatcacctgaagtagaggatctcatgtaacttcatggctctctctgaacttctgtttctttatctgtaagatggggacatgtaacttcatggctctctctgaacttctgtttctttatctgtaagatggggatcagaaactctgtcttaaggagttgttttgaggattaaatgaagaaacatgaaaagcaa

SEQ ID NO: 646986 - DNA, 764 bp, Homo sapiens
tacagcagacgtaaaaattcaaattattttaaaaggcaaaatctatatacatatgtgcttttattctatatctcaccttcccaaaagacactgtgtcagtccatctgtcgtattttcttacacgagggagacaaattatttgcaaaactgtgctaaagtcaatgatttctacgggattacttgacttctgcttatggaaaacaaagaaacagacacagctgcacacagaaaactatcagcatatggagagacttattcaaagtgacaggggacacatcatatttctgcattttacttgcattaaaagaaacctctttatatactacagttgtccctatctctcccccgacccccaccgacccaccacacacatatattacagtttatcctttcataacgaatatctccgtaagaccaatacctgggcatgagaagaatcctgagactgcctggaggtgaggcagcaacattagaaactacttcctaattcttctcaaggctgctggcaaactatatctcacactatcggagcagtacacatgttacacacctggtcgagcacgacattgctggatctcctggaacaaatactcaggtaccatccatcctcacagactggcaccggagaccaggcatgaagagaaaacgcaacacccctggacccacaactgcacaaccaggaacacaatacccaacatgcaaaaacacccatcaacacaacagaaaatcaaaacgaaacaccacaagccaccaacagagcaaaa

SEQ ID NO: 646987 - DNA, 344 bp, Homo sapiens
tttatacgagagtgagcttcccagtgccaacgtccacataggacagggtgtgctatccgccagtgctcctcaaagggcttcttctgttagccccgtggatgggcttggagtaatcgtactcatcaatccgcaccttgtagtcttccctggcatgctgcgccccgtgactccttccgtgcctctgctccgtagatcgtctgcagcgcacacagcattaggttctgcagctccagggtctccaccaggtccgtgtcccagaccattccccggtcgaacgtcttcaggtgcttaaggtctccatagagcttgctgatttaccaacaaaccttcttgcaacaacggct

SEQ ID NO: 646988 - DNA, 158 bp, Homo sapiens
tcatagctgttctagatgtcccggatagctggagaagcgtggcctgtagatgatgatgcatgaggcatatggacaacagatagatggatagacgtgagaggtcagtggacaccagactggaaagatggaaaggtcagtgtgccaacagaacagatggg

SEQ ID NO: 646989 - DNA, 400 bp, Homo sapiens
ccactattctggtaagccaacacactccataacctgacccttagagtgcatggaggacacggggccagtcctgtccttggcacagctgtccaggccaccacactgcttctctggatacgccagggcgcttgcccgatccatcatcatcggtggaaagcacattaatactctgatctttgccttataacttattatttatattgaagtattttttagctgttttttagattgcccttacgagctagagttattttcacagttgaatatttttacaagtatgtcccaatcatttcagcattatatttgtttcttttagtaaagcttttaagtggatgtcactatgcaagagaaacacagttcaaaatcataccgtcatacatataccttgcctttggtagtg

SEQ ID NO: 646990 - DNA, 147 bp, Homo sapiens
tgcaggtgattctagtaggatcccacaattggattgttgtaatgaaggataaatgctcgagggaatggctaccccattctccatgatgtggttatgtgcactgaatgcctgtttcaaagtatctcatgtaccccataaattatttca

SEQ ID NO: 646991 - DNA, 277 bp, Homo sapiens
  misc_feature (5)..(5): n is a, c, g, or t
ttatntttattatttttttcttttttgagatggagttttgctctgttgcccaggctggagtgcagtggcatgatctcggctcactgcaacctctgtctcccgggttcaagtgattcttctgcctcagcctcccaagtagctggtgtgtgcctgtagtcccagttgcttgggacctgaggcagaagcattgtatgagcccaggagtttgaggttgcaatgagctgtgatcaagccattgtactacatcttgggcaacagagtgagaccctgtctgttt

SEQ ID NO: 646992 - DNA, 243 bp, Homo sapiens
ctaacgccaatcaaggacctgccgtgcttctcaggctattccttgctggaaataacggatcattctggccggacgtggtggctcacgcctgtaatcccagcacttagggaggtccaggcgggcagatcacttgaggccaggagtttgagaccagcctggccaaactgcaaaaccacgtttctaccacaaatacaaaaaacataagccaggcattgtggcacacgcttgtaaccccagctactc

SEQ ID NO: 646993 - DNA, 220 bp, Homo sapiens
gtctctgtacaagagatacccctcactctggcaggcgacatagccactgctggaacagaggacagaaaatagtggcctcgtcgcatgatcacggatacactactctagccaccaatgtgaccctgttttaagcctccgaagtggaagagattctggatggccacgatgagaagtacaacgcggtgtccatcagcacagagccccccatcactgtctcctg

SEQ ID NO: 646994 - DNA, 141 bp, Homo sapiens
aatctagaatccaacatgaggctttacatctacggtctagctatggttccagatctcttccccaagagatccctaaggaaacttagtagactacccacagactaccatacctggaagaagcagtagccaccagggtacaac

SEQ ID NO: 646995 - DNA, 308 bp, Homo sapiens
gcatgtagttattttaatataatgctagatttaatttgccaatcttttgttgagaatttttgcatctatattcctaagagatactggtcagtagttttcatgtgatctcttactctgtttttagtatcggggtaattcgggactcagagaatgaattaagaatttcctcctcttctatttttttgggagaatttgaaggattgggtgttaattcttttttaaacattggggtaggattcattatggaagccatctagtcctggggctcctctttcctgggaagtttcttgattgctggattcaatctc

SEQ ID NO: 646996 - DNA, 562 bp, Homo sapiens
tgtactttggtcttgctgtccaagaggatcccaccttacagcgccttttgggacattggtgtgtggtggccttggaatgtgcttctcgtgtacatcgcgccatcatgggtatatggttagtggtgtgggttagtaggcctagtatgaggagcgtaatggagtggaagtgaaatcacatggctaggccgaagttcataaggagggctgagaagggccccggtaaggggtcaggggcgggagtttaattatatgataggcatgtgatgggggggtcataatgtgtggtcgtgcaggtagaggctaactagaagtgtgaaaacgtaggctgggataagggcgacagcgattccaaggatagtcagttagaatcagattggtgaggatgataagtgtagagggaaggtcatgggtggatatggctaggggggcgctcccaattaggtgcatgagtaggtggcctgcagtaatgtaaggggtaaggcgtacggccagggctatggcttgaattgagtaggcggagtggttcgataatacctagtatggggataaggggctgtagggg

SEQ ID NO: 646997 - DNA, 402 bp, Homo sapiens
  misc_feature (95)..(95): n is a, c, g, or t
  misc_feature (104)..(104): n is a, c, g, or t
  misc_feature (187)..(187): n is a, c, g, or t
  misc_feature (194)..(194): n is a, c, g, or t
  misc_feature (257)..(257): n is a, c, g, or t
  misc_feature (280)..(280): n is a, c, g, or t
  misc_feature (289)..(289): n is a, c, g, or t
  misc_feature (293)..(293): n is a, c, g, or t
  misc_feature (328)..(328): n is a, c, g, or t
  misc_feature (372)..(372): n is a, c, g, or t
gcctcccccaggcctctcaggggcccaggctcattacctccctgacttcccgtctctactggaaatacaagaattagccgggcatggtggtgcanacctgtaancccagctacttgggaggctgaggcgggaggatcacttggctccgggaggcagaagttgcagtgagctgagttcacgccactgnactccancctggatgacagagcgagactctgtctccaaaaaaaagagaatataagggaagaatcacaaanactggtttgaatatatcttccanccaggcgcnggcngcacgcctgtaatcccagcactttgggaggccganacgggtggatcacttgagatcaggagttcgagaccaccctaaanaacaatggtgaaaccccgtctctactcaaa

SEQ ID NO: 646998 - DNA, 1068 bp, Homo sapiens
ggctgcagcggcgccaggactgactgcgccgtggaggctggtgcagtgttgtgagttggaagctggggagctcggcatggcggtcgccgactagcagtcgcatgggtgccctcgtgcgttgaggccaggagcggacccgggtcgatggccccgaatggtgcatcagtagaagcaagcaggctccagtcggcgctagcttgcttgggactgcatggagtctgtgtccggggcgcacagacaagacgtcgctgatattcctgggcgtcaacagctgccaaggtgcaactcagagtgagcctggacgttggcgactgggacgctccgccataagacgctcaggtgcgatcctgtcgaacaacgagcggcccaagccggtcattacgtatgcctgaggagcaaagggaccccggattaggttcaacagaagaaacagttttagtcgggggaccagtggaggatacggtgtggagcccaagactggggaccgggccactccccagagatgaatcacctagcccctgtactcttggctgtacgcgaggcggatcctggggaacgcattagagaccaccccaatctcctgccagttcgtggagggaatcgctgaaggcaccttccagcatagtggcgagttggctcagcgtgatgagaaaacactgtaaatccgggatgaaaggcattgaattagttcttgtctgggaccgttgccctcgaagtggggtccagcgaacccaatgtggcctggtaccgtataacatgacgggattgcactagttgggctaggaacccggcaaacgtacgtagtggcaccgatcataagctccccagcattcgccaaggagccttacaagaacggcattgttccaggacgttttccgcatgcgttcgttgagaccatcctcgtaccttggaaaacagggtggctctatgtacctaatgcttgggttggcatgactaatatggggaaccaagagtttagcgtacttcgcccaagtatctccgagtcatagactcccggcaggttgaacgtcgcgtcgttgcgaggagtgactcctatggggtccctta

SEQ ID NO: 646999 - DNA, 236 bp, Homo sapiens
gcaggtgtgggggcagcattgtctcagcaccagctccgcagtgccgcagccctgagggcctgggcctgaaagagaaccagctcggaggacaacctgtacctggctgtgctcagggcctctgagggcacgcacgatgagcgggatcgtggacagaagccgtacttgccatccttctcaacgttgtcggtggtggagcaccagaggcacgccatctgctgctgagccgcagcctcgtg

SEQ ID NO: 647000 - DNA, 1983 bp, Homo sapiens
tcttttcctggtccctccagcatctgagtcctggggttctgccagcaactgtctgtcttttcccctgagaccggatccaatttccagtccttggcatgttgggtaatttggggttgtatcctggatgttttaaataatcagatgcgaggctctgagccctgcgagaacgcgcttgagaatgttggcattttcactttggcgggcactcatcccggctgggtcaggccacaagccgtatcccagccgctgtgtgcagtggatccgtgttggctcaattctcaaggctgttgctgtgcggcctgttccccacacgtgctgctcagctcaggcaagcaccgagcttgtgttgtttcatgctcagcgtggaggcccctcctccaggtcgctgctctgtggggttcccatacactcaggctcctaggaggagtccatttagaaagccagggtttttctcagagtcttagttccttgtgctgtcatccatttcacacgacttgggccctgctcggggcaacacagcaagagaaaagacagggaaaataagagagggaccttgcacacacacgctctggaccacagagccctgtgcccagctcctctgtcaatacaggtggaatctcgtgcaggatcgcaggggtctgtgatgccaccaaagagcaggccgggacagggttaggagagaaaggagagggaagtgggggtttctcctacgcactcttatttgcagagggaaaggcgggtttgtattggggttgtcggtctttgcacccacggcacagttgtgagacacccccatcctcagatcaaagccgcacatacagctggggaaaaacaaaacaaaacaaaacaaaaacagtaaacctccatgccagttgttggtaagttttgagtttcctccccagccagctgctactgttagcgtttcacagtcctccaggagtcgctttttatattctgtccaaagggagagaggagctgtagtggctgtgctccatctctgccagcccagaagtttccagaagtgctcttctgattttacaggtgaagaaccggagtcctgggggtgtaacaagcccaggtcctcaaggcaagggtgggaactcacgagcgcccaactccaagctgtgtcctcgccccgcaagcttgtgctggtcactgctgccctgtgccccccggatagaaacactgctggaggagaagcctttctcagagccctggggaaggggatggtcaggccacctacactcctggccctgctccactggctgcactggagtggcatctggatggacagcagccggctggagactgggaggaggcctgggtgcaggaggctggggcgctgggcagcatgcgccgcggggcagcaggacgcaggggcctcccagcgggactcgcacgtggcactctctggggcaggtggtgacgggaggcagacacactccaggggagtccctcagtcaccatgctccaggtacttgcgcctcacgtttagaaccagggtagatttggagactcctgggatcttttgacaaaatttctctccaatctctaagtacaaaggatgctcctacaaagggccagatggcaagtcctgggatggaacccctgcccttggtgccaccactgctctttcataactgtgggctcttccgaaagtgacttcatggctcagtgcctcagtttccctttttgtaaaatggtcatcatggctgggcgcggtggctcaggcctgtaatcccagcactttggggggccgaggcgggtggatcatgaggtcaggagttcgagaccaacctgaccaacatggtgaatccctgtctctactaaaaatacaaaaattagctgagtgtggtaggtgcctgtaatcccagctactcaggaggctgaggcaggagaatcacttgaacccggtaggcggagcttgcagtgagctgagatcccgccactgcactccagactgggcgacagagtctctgtctc

SEQ ID NO: 647001 - DNA, 131 bp, Homo sapiens
tctagaggatcccttaggctccccatatgtgtctatgagttattccatttacagctgagaataccaccagtgtgaattgtccatgatccacttacaggcaaattttcttcctcccgggtagggagctcgaa

SEQ ID NO: 647002 - DNA, 359 bp, Homo sapiens
agtatattaacataaattctattactgatcattgaataagaatccagtaattgaacaaatcctatttaatgacatccttgttgtcatatgattgtctattatgctgaccactgatttctttgaattgctgctctctctatttaactaacattttgttcagttttgcctccggtggaagcagaaagggttttttcagctgttagatcctaaaaatcaatataatttatttatgctcagataaataactctatcgatatatttttgaaccttttatagtactagttttctttttatcaagtacgaacataaatctgtttttgccctatatccttataatacaaatgcattagactgggtag

SEQ ID NO: 647003 - DNA, 1752 bp, Homo sapiens
  misc_feature (612)..(612): n is a, c, g, or t
  misc_feature (940)..(940): n is a, c, g, or t
  misc_feature (1118)..(1118): n is a, c, g, or t
  misc_feature (1126)..(1126): n is a, c, g, or t
  misc_feature (1128)..(1128): n is a, c, g, or t
  misc_feature (1132)..(1132): n is a, c, g, or t
  misc_feature (1138)..(1140): n is a, c, g, or t
  misc_feature (1146)..(1146): n is a, c, g, or t
  misc_feature (1150)..(1150): n is a, c, g, or t
  misc_feature (1173)..(1173): n is a, c, g, or t
  misc_feature (1179)..(1179): n is a, c, g, or t
  misc_feature (1183)..(1185): n is a, c, g, or t
  misc_feature (1189)..(1189): n is a, c, g, or t
  misc_feature (1197)..(1197): n is a, c, g, or t
  misc_feature (1199)..(1199): n is a, c, g, or t
  misc_feature (1202)..(1202): n is a, c, g, or t
  misc_feature (1216)..(1216): n is a, c, g, or t
  misc_feature (1218)..(1219): n is a, c, g, or t
  misc_feature (1225)..(1225): n is a, c, g, or t
  misc_feature (1230)..(1230): n is a, c, g, or t
  misc_feature (1232)..(1232): n is a, c, g, or t
  misc_feature (1242)..(1242): n is a, c, g, or t
  misc_feature (1247)..(1247): n is a, c, g, or t
  misc_feature (1258)..(1258): n is a, c, g, or t
  misc_feature (1260)..(1260): n is a, c, g, or t
  misc_feature (1268)..(1268): n is a, c, g, or t
  misc_feature (1283)..(1283): n is a, c, g, or t
  misc_feature (1286)..(1286): n is a, c, g, or t
  misc_feature (1296)..(1296): n is a, c, g, or t
  misc_feature (1298)..(1298): n is a, c, g, or t
  misc_feature (1303)..(1303): n is a, c, g, or t
  misc_feature (1309)..(1309): n is a, c, g, or t
  misc_feature (1318)..(1318): n is a, c, g, or t
  misc_feature (1321)..(1322): n is a, c, g, or t
  misc_feature (1324)..(1324): n is a, c, g, or t
  misc_feature (1333)..(1333): n is a, c, g, or t
  misc_feature (1337)..(1338): n is a, c, g, or t
  misc_feature (1340)..(1341): n is a, c, g, or t
  misc_feature (1348)..(1348): n is a, c, g, or t
  misc_feature (1364)..(1364): n is a, c, g, or t
  misc_feature (1371)..(1371): n is a, c, g, or t
  misc_feature (1378)..(1379): n is a, c, g, or t
  misc_feature (1388)..(1388): n is a, c, g, or t
  misc_feature (1391)..(1391): n is a, c, g, or t
  misc_feature (1406)..(1406): n is a, c, g, or t
  misc_feature (1411)..(1411): n is a, c, g, or t
  misc_feature (1452)..(1452): n is a, c, g, or t
  misc_feature (1469)..(1470): n is a, c, g, or t
  misc_feature (1479)..(1479): n is a, c, g, or t
  misc_feature (1482)..(1482): n is a, c, g, or t
  misc_feature (1488)..(1488): n is a, c, g, or t
  misc_feature (1491)..(1491): n is a, c, g, or t
  misc_feature (1501)..(1502): n is a, c, g, or t
  misc_feature (1547)..(1547): n is a, c, g, or t
  misc_feature (1560)..(1560): n is a, c, g, or t
  misc_feature (1656)..(1656): n is a, c, g, or t
  misc_feature (1674)..(1674): n is a, c, g, or t
  misc_feature (1682)..(1682): n is a, c, g, or t
  misc_feature (1687)..(1687): n is a, c, g, or t
  misc_feature (1729)..(1729): n is a, c, g, or t
tagggtatagacgcgagagagcccacctcgtgggtgtgccgggagatatattctcgcggccaccacgcgagaggacgcagagacccacacccatagtagggcccggcgggtctggggccgccaagaagacaaacacccaaaggcgcgaccccgctcgttggtgcgcggcaagaaagcgcgcccgtgcgcgccaaccaaaattaagggggggtcatccgccccacgaaccgaggacaagaagaacaaaggagtaggggggtgtgggcagaacgacgccgagacggtgtgtgtggctcggacagagacaaagacagagagaaatgtgtggtggtacagatagagtagagacggttgggtagaaagaagcccgccccatccacctcggcgcgaaataaagggtcgcccacaaaagaatggaaaagcacgcaaaatgtaaggttggggggagaaaaggaggaccccgcgcgttctggttgctgaccccccaccggaggggctctcccccatcaacaggggggaggccccccccccagaagaggtgtggcgccacaaatgtcagctggaaggattgggggtgtctacatccaccaacaggagaggttcctcgatggntggggttctttaggaagaagaggtgggaagagtttcttctttcgcccatttaggaagaatatggtcgccacacgagaagagattataatgttggaaaaggaggtgttcgccgacaattgttttaatagacaaagaaaaattgtgccacgaaagccgtttgggagttattataatcctcgtgggggcacgagattaatggtgttccacaccacgagggggtgtaaaaaaagacaacctcgcgcgcccctcgtggggagcttgtagaagcgttgttctccccccattcaggcggccccatcaggaaggattatcgtttttgtagccaccnccccgtggggcaacacacagaaataatggtgggttgtcgccgccccatcagggggttgccccacacaagagatatgatggcgccccaagcacgacacagtagtggagtgttgggaaaacgccctgctcacacaagtgtgagagaagtctgctcaaagaagacagtcaccccccgcagntgggtgtnanactntgggcnnnttctgntctnctgtgtgtctctgtgggtttggngtgttntgtnnnactnatataaananacnccgcacacacacantnnacaganatatncncgagaagacnctctntttttatatgncnctcacgcnacccacacacacagngtntccgccccanantctcnggaganagataaganatnnanatggagaanctcnncnngagactncgcagagagaggtgcncacagancacacanngagactctnganaagagaagttgggtncacantataaattgagttgccacgagccgccacttggagaaaaganacactatgagaaaaggnnttgccacanttntatttnatncctcctcccnntagaatgttcttcgttatgaaaaagttaaaaatgctgagaagaangccccaagtttgnaattgggagaagctcactggaggcttcactggtgaaaggcacgtagtttctggagaaaaccccctcggggaacgagacaccggtgctataaattgnacgagctgatggatatgnaccccccntcccngaatctgttttaagttccagacttccaatagtggcccaattnaaagtgctatttgtgatggttta

SEQ ID NO: 647004 - DNA, 1735 bp, Homo sapiens
  misc_feature (1033)..(1033): n is a, c, g, or t
  misc_feature (1156)..(1156): n is a, c, g, or t
gtggctctgttggcgctgctcgtgtggtggtcacgggcgtcggcgcgcgcgtgttggtttgttctcgtcctcttgtcgtcttgggtgatcgtgtgctcctgtggcggcgtgggtgagcgcgtgcggtgctttactccccaccacgcttgtgtcttttgtggtggatggctcgtggttgctggatccgtcgcgtggttgtgtttgccccccgactgcgcttgttatgtggtgggtgtttctcctcccctgttcggagcgagacggtgtggtgccacaccaagacggtgggttgtgtggggcggcccaccagataggtatgttctccaccccgctgtgtgtagcaatcacatactattttgggtgtgggcacgccagctgggtgtatcaccccccccgaggtgggtgctcctctcgtcctcttgggtgttagctcagcacacccgggtgtggtgggtatcaccagaggtaagtcctctccccccatttgttcgggggcgcctcctcgtgtagggttggcccccggttttttttggccgccctcttgtaggggagcaccacttctgggggaacctcctttttctgaagtaagacccccccctcatgccttgtttgttggtccgccacaattttgtgggccctctctctggcggcccctggtagggggttttttctctgccacgggagacacgttgttgtccccattgttttggggccgcacacagaggcgccgctcatatggtgtgtgtgtcccctggtgtggggctccgcttgcccgcgcacgatcacccccgggagtgggggctacacagcgtttaacgccccgcttgttggtcatgtggttgcccatcaaatacgagatgtatgcgtgtgtttgttcacccatggggctgtgggagggagaggtatttcaccccgctgttggtgggtggacattcatctgtttagaatgcccacgggggagtgttttcctccccgcgctccaggttttgttgatggacctcttgttgttgggcgcagactggtggccaccganacactgtcgggcttggggtgattgatcggcgcacacgcctggctttgaataaatgagtgacccaccgctttataggggggagcgagatccccccactctttacgcttcttttcttctagctcncacgagcgaggtgttttctggagaacaatctcgtgggaagagtctcttacgacgctctgtcattgtttagaggcgtcgacccctcacatggtgggttgttgacacacgagacaattggagaggcccgcctcgcttaagcaggactaccacaagcggtgtgtttgacaccactctagagaagtataagagatgttttagcgcgctctctctgtctacagagcttgggtgcgacacagagatgtgtgggggcgccacatttttagagatttcgcacattttttcacgaagaggaggcaccacatcacacttgtgaaactaaatataggcggttttttttctttgcgagaaacactgcatactttttgtcaaccacggcctcgtttataacgttatattgtgaattatttcgtgccccggtgccctcagagaggctgtcgggtcctttcctcctcccctcacacggttggggtttaaacgagggagaatacccaaacagtgagagattttttttttatttttaagccccccactttttcccggtcccccaaaggggaaaaaaaaataaaaattaagtttata

SEQ ID NO: 647005 - DNA, 667 bp, Homo sapiens
  misc_feature (67)..(67): n is a, c, g, or t
  misc_feature (70)..(70): n is a, c, g, or t
  misc_feature (80)..(80): n is a, c, g, or t
  misc_feature (90)..(90): n is a, c, g, or t
  misc_feature (117)..(117): n is a, c, g, or t
  misc_feature (146)..(146): n is a, c, g, or t
  misc_feature (174)..(175): n is a, c, g, or t
  misc_feature (184)..(184): n is a, c, g, or t
  misc_feature (187)..(187): n is a, c, g, or t
  misc_feature (207)..(208): n is a, c, g, or t
  misc_feature (218)..(218): n is a, c, g, or t
  misc_feature (228)..(229): n is a, c, g, or t
  misc_feature (231)..(232): n is a, c, g, or t
  misc_feature (273)..(273): n is a, c, g, or t
  misc_feature (316)..(316): n is a, c, g, or t
  misc_feature (318)..(318): n is a, c, g, or t
  misc_feature (344)..(344): n is a, c, g, or t
  misc_feature (369)..(369): n is a, c, g, or t
  misc_feature (413)..(413): n is a, c, g, or t
  misc_feature (450)..(450): n is a, c, g, or t
  misc_feature (463)..(463): n is a, c, g, or t
  misc_feature (496)..(496): n is a, c, g, or t
  misc_feature (500)..(500): n is a, c, g, or t
  misc_feature (504)..(504): n is a, c, g, or t
  misc_feature (538)..(538): n is a, c, g, or t
  misc_feature (540)..(540): n is a, c, g, or t
  misc_feature (554)..(554): n is a, c, g, or t
  misc_feature (571)..(571): n is a, c, g, or t
  misc_feature (573)..(573): n is a, c, g, or t
  misc_feature (579)..(579): n is a, c, g, or t
  misc_feature (633)..(633): n is a, c, g, or t
aggcgcttgtattgaaactttaggttttcttgagctgtggtgctgagggcaggaagaagacactaanagngaaatgtgtntgtggttganggaggattcctgcagttcacttgaggnggcggaatcttctggtggagggatgcccnccggcgtgggtcaggggttgtgtgctcnnggtggaccnagnggttttccttgactgtggtnnagatactggnggatagtggnngnnccgtgtggttgggacacgtatgtacacttggcgttacggcntgatcacgtgacagttgcagacacacgcccactgctgggtaantntccaggtggaagaggctaacatcacnaggtgttgatggccaccattactancaccagtccaataacgttgacacccaggccagctttcaccatanctttgatctggcagagcccatagctgaagacgatggnattagggggattncccacaggcagcatcacagaaaaagaaatgcanatgntgantgggatcagggtgtagagggggttaatatgcagngnttcagacaggcagnacaggatgggcaggaananggtganggttgctgggttgctcacaaactcagtgacaatggacacgaggatgcatgccancagggtgacagcccacggtgggaggctgctcagg

SEQ ID NO: 647006 - DNA, 104 bp, Homo sapiens
  misc_feature (59)..(59): n is a, c, g, or t
  misc_feature (82)..(82): n is a, c, g, or t
cagagatgagctgacggaaatcttcaagaagatccggaggaaaagggagtttcgggctnatgctcgggccgtcatttccctnatggagatggggttcgacgaga

SEQ ID NO: 647007 - DNA, 692 bp, Homo sapiens
  misc_feature (35)..(35): n is a, c, g, or t
  misc_feature (102)..(104): n is a, c, g, or t
  misc_feature (125)..(125): n is a, c, g, or t
  misc_feature (137)..(137): n is a, c, g, or t
  misc_feature (155)..(155): n is a, c, g, or t
  misc_feature (170)..(170): n is a, c, g, or t
  misc_feature (172)..(172): n is a, c, g, or t
  misc_feature (181)..(182): n is a, c, g, or t
  misc_feature (199)..(199): n is a, c, g, or t
  misc_feature (204)..(204): n is a, c, g, or t
  misc_feature (207)..(207): n is a, c, g, or t
  misc_feature (232)..(233): n is a, c, g, or t
  misc_feature (235)..(235): n is a, c, g, or t
  misc_feature (244)..(244): n is a, c, g, or t
  misc_feature (248)..(248): n is a, c, g, or t
  misc_feature (262)..(262): n is a, c, g, or t
  misc_feature (279)..(279): n is a, c, g, or t
  misc_feature (300)..(300): n is a, c, g, or t
  misc_feature (304)..(304): n is a, c, g, or t
  misc_feature (307)..(307): n is a, c, g, or t
  misc_feature (420)..(420): n is a, c, g, or t
  misc_feature (435)..(435): n is a, c, g, or t
  misc_feature (448)..(448): n is a, c, g, or t
  misc_feature (456)..(456): n is a, c, g, or t
  misc_feature (469)..(469): n is a, c, g, or t
  misc_feature (473)..(473): n is a, c, g, or t
  misc_feature (515)..(515): n is a, c, g, or t
  misc_feature (598)..(598): n is a, c, g, or t
  misc_feature (636)..(636): n is a, c, g, or t
gcggctttttcatgaaatgcttggaggtgaacganttctcagcctgtaagatccgaccatcccattaactttgaagtatctcttgattaatagaagaacaannnggagggtgaagaaaagggggnacatgctaaacnccttttgacaatcatccnaatgtgggggggggncnaccggttcnncaactcccctttttctnttttncgnctttcttcttctcactcttgttttnngncttcctggntggnacagcctggcagtncctagagcccctgagangagccctggttctccaaaagntggnggnggggaagccctgcaggttgcgctgaccacttcccagagatctgacagtccgtgctcccaaaagtttgaaccaacagcctaatgtgaaaagaaactgcactgaaaggtaaaggnggaaatggtgatganctgggcttatgtnagtttgtntattttttctttngttngccccagtaatctttctctctgtttcagcctcaggcgtaccncgttctggttggtgggttctgcagggatctctcccaccactgagcctctagtcccaaaaccatccttgacaacatcgtgtgtntgttacttccctttgcccacctccaggccacctggggnagcccacaggcagccaagaccctgaaatgaaatgaacacaaagtctgactcggtaa

SEQ ID NO: 647008 - DNA, 233 bp, Homo sapiens
gtggcacagaggctgggcacgtcccggagaaaaagctacagggctccggtagaccacatgaaggtcatcccactcagtactgtccaaatcgaaccgaccttcttgtactggctagtactgagaacacatacctcccatcggagtgtgaccgcacgctctctgtccaccagaacgcgaagcttctggaccactgccaagttcccgctcacccgataaatgccatccacatctag

SEQ ID NO: 647009 - DNA, 292 bp, Homo sapiens
gtcgatgaggtatgcaaatatgggtgagtatctgatttcaaagtgagctttgatcagacgtagtggttctcccagcacgcagcttgagatctagagaacagacagactgcctcctcaagtgggtccctgacccccgagtagcctaacggggaggcagcccccagtaggggcagactgacacctcacacgaacaggtacccctctgagacgaaacctccagaggaacgatcaggcagcaacatttgctgttcagcaatattcgctgctctgcagcctccactgctgataccta

SEQ ID NO: 647010 - DNA, 313 bp, Homo sapiens
accttccattgaaaactcctccctctggaattgtgatccagttgagccgtggcttgttcagaactccttttcttggagtggaatgatagggaggtgtgcctcgtgttctttccagaggttcaagcgtgcagtgtggagaagcttaggattggtgagctcaggctcacctgggttcaaattttggtcctgcatttctagctttggttcctttttctataaaatggggcttataattacaatttcccagaattctgaaaagcaaatatcataggtaaagtgcctaacaaatatgtagcccttctgtcgtcttctc

SEQ ID NO: 647011 - DNA, 430 bp, Homo sapiens
  misc_feature (202)..(202): n is a, c, g, or t
caaatgaaacttacttaactcaatacttagaaatttcccgaggtattgggtcgaacccccggtggcctggtgcggcccaggcgggcactggtaaccaggaaaaagcgcacccagcaacatcttatttttaatggtcataaactctccactttggggatctgtaatatcagtcgcatatctttcctgccatacaatataactnacaagcgatattttgttagtgatcccatgatttcgttaaaagtgtaaatgaaaggatgccctaaaagcatccttagcgagcagagagtcagcggaaatagctgatttaagaatcatcctgggctgaagattacatgcaagcctaaaggattgagttatcgcattatgcccatgaagccatgtacgcccatatacacaccgactaagccaatcaacagactgggaaaat

SEQ ID NO: 647012 - DNA, 1102 bp, Homo sapiens
ggagagagagagagaactagtctcgaggttttatttttttattttttcacgcttaattcacttaatttttcttgtataacaccaccctatgttgtacccacagctggagcctgagtccgctgccagggaaactctggtgtgggtcttgcacacaggtgtgtcagtagaactcctgatcagggagacttgtgtgaatacagtctcctatccaaaggtcgggggtcaggtagctagtaggtacttagaaatggcatcaaacggtggccttgcgcaaaagttgcccacgggctgtgcagtgcaccaccccggtgctgatcagttgtacgcagtccataggaataccaagcacactacaatgagccagaatatactacaggacccacgggtggcggagaaccacatagccaagagtgcccccagtggggtgcccgcggaaatacagggcgatacacaagcaacaaaaaccccgaaagaacggacactgaacaccatttaggaaaagggagaacaggatgagggaggacataagcacgaaattcattgggtagcccccccaacaagtcaagactcatcagcagacgagccacatcgggggacgcaaccagaagagagacaaagaacgaccgacaaggggccccagggagcactaagaatgaggagcgcccccaagacgggaaaacaggggcggggatggacaccacaaacccctccctctaatggaggtacgaacgacgttaaacaccaaccaccaaagcaaaaccaggaacgaggtacagacccgaaaatgacaaacgccccccccaccgcaataaaagagaaaagcaaaaaaagactgcaccattagtgaaaactcactgtggaaagcaccgccaactggaggcgggcgacaaaatgggaggaagacagtgacaaacaacaaggccagctgtggggcaaaaaataagcacctattcaaaaagaaaaccgattcagaaccaccgttaagtaaaccaaaagcaaggccggccgccccgacaggaggaaaaacaaacacacacacagaggaaagccaacggaggaaaatcgcagtaaaaaataggccgcgggggacagcaaagagtgt

SEQ ID NO: 647013 - DNA, 203 bp, Homo sapiens
tgtctcccaagctaatgaggatactcgtgccttagcttctcaagtagctcagattacaggcgtgtgcaccatgcctgggtaattttattttgtatttttagtagagatggtgtttttgcatgttggccaggctggtcttgaactcctggcctcaagtcatctgcctggcacagactccccaaagtgctgggattacatagcgt

SEQ ID NO: 647014 - DNA, 490 bp, Homo sapiens
gggtcacatttgggaattcccacaagcctcttgtcaaaagacgaattatgctcacttgcctgtgcaaccctgagccacaatcccccccctttaccccacgtcaaaactgaaggtgtcataggcagccccaactgggaaagcccagggagcgagcccccggaggggcaaacgaggctccctccaaggccccttttttacaaaagtctctccagcctttgacgggtgcagaaactagacgggccccccgaaagcagaacggcccatttgagcctggattactccccaggtgaaagtgcaggaaagaatatgtttgtttgctcccagcacccatgcctgcctgcctacctcggccttatccaggccctttttttgttgcaggctgagcccagccaggttccagtttgtgttaaaaacagccctctttgcaacccagtggctttgcctgtttttgaccctgtcagggtataaaagcttttgatactttcaggta

SEQ ID NO: 647015 - DNA, 200 bp, Homo sapiens
tacagcagcaaaatacatcattgcatgcaattttgtaagcactcacttcactgctcatgcagcattccgcagttccaaagcaaatctcatcagcatctgtgcttggcatctcaggtccatcaggcaacaccacaactcccacacacatgcatctcaacacttcactatgtccagcacacaacatcatccaaccggcagca

SEQ ID NO: 647016 - DNA, 203 bp, Homo sapiens
acccctccctctaaactccaggcgcggtgtttcacagctgtaattttagcttttcgggaggcagagcaagaggatctcctgagcccgttagtttgaggcttcagtgcgccatgatcacgccactgcactctagcctgggtgacagagtgagtccctgtctcaacaacaacaaaaaatcacacatgtctgatttgcgcagcttg

SEQ ID NO: 647017 - DNA, 453 bp, Homo sapiens
cgtcaactcgtcaaagtcattctccatccagcgttgttctgttgctggtgaggagctgcaatcctttgtaggagaagaggtcctctggtctttagaattttcagcttttctgctctggtttctccctatctttgtggttttatactacctttggtctttgatgttggtgacctagagatggggttttggtgtggatatccttttagttgatgttgatgctattcctttctgtttgttagttttccttgtaacagtcaggttcgtcagctgcaggtctgttggagtttgctggaggtccactccagaccctgtttgcctggttatcaccagcggaggctgcagcacagcaaatgctgcagcacagcaaatactgtagaacagcaaatattgctgcctggtccttcctctggaagcttcgtcccagaggggcaaccacctatatgaggtcgacgc

SEQ ID NO: 647018 - DNA, 796 bp, Homo sapiens
atggtattccttgtgctttgattgcatttctctgatggctaatgatgttgagcatcttttcatatgtttatgagccattgtataccttcttggagaaacgtctgtacagatccttgcctactttttttgtgcctcagcctccagagtagctgggactacagatgtgcaccaccaggcccggctgatttttggatttttaatagagacgggattttgccatgttggccaggctggtctcaaactcctgagctcaagtgatccagcttcctcggcctcgcaaagtgttaggattacaggcgtgagctgctgtgcctggccccctttgcccacttttaaattgggttatttggcactagcccacatcgtgaaaccctgtctctactaaaaatacaaaaattagctgggatggtggcatgagcctgtaattccagatactcaggaggctgaggcaagagaatctcttgtacccaggaggtggaggttgcagtgagctgagattgcgccactgcactccagcctgggccactgagtgagactccgtctcaaaaaaaaaaaaaaaaaaaaaaaaaacaacgcggggggggggggtcacgctggtattcccagcattgtggagcgcgacaaggcgggatcacgagggccggagatcgagacaccgtggtacagtgggaacccgttctataaaatacacaattacggggggatggaggcgctgatccagcccgggagtgagaggaaatgcgtaccagaggggctgggaccaaagccatgccaggggacaaaaaccgtcaaaaag

SEQ ID NO: 647019 - DNA, 135 bp, Homo sapiens
tgagctgtgacgtacgcagcaacccagagcccacggtctatgactggagcacgacctcaggcaccttctcgacctccgcagtggcccatggctcccagctggtcattcacgcagtggacagtctgttcaatacca

SEQ ID NO: 647020 - DNA, 233 bp, Homo sapiens
  misc_feature (114)..(114): n is a, c, g, or t
aaaatgttcacttccaaacacaacctttgtaaaaatcccacttaaagtttgtttctaaaattttagcacaccaaatgcaataatatttttggctgttactgctctttcacactnctagtctcagtggcaaaaactaccagtacctcagcctctgtcagtttttaacatctattataaactaatacaaaaatttaaaatgtctttgcaaaaaaaaccaaaccagcaaacccaat

SEQ ID NO: 647021 - DNA, 409 bp, Homo sapiens
cttcgggaaagggaatgaaggggattggaaaaggattgaaaccttcaaaataatgaatatcctgaaagccccttgccattattttgaagccttattttttcctataaatccttagcaattgaaactaacagttgcctgggtatggcaactcatgccctgtaattccagcactttgggaggtcgaggcaggtggatcatctgaggtcgggagtttgagcccagccctggccaacatggcaaaaccccatctgtactaaaaataacaaaaattaatttggtgtggtggcaggtgcctgtaatcctagcaactccggaggctgggcaggagaatcacttgaacccaggaggcagaagttgcggtgaaccgagatcgcaccattgcattccagcctgggcaacaagagcaaaa

SEQ ID NO: 647022 - DNA, 140 bp, Homo sapiens
cctagttttagaagttcaatagcagtctaagtctgtatcaagagatgaagggataaaaatatgtcatatattttgggaatgtattttatccataaaaataatgaagatccggctcatgtggggacacaacaggggccact

SEQ ID NO: 647023 - DNA, 282 bp, Homo sapiens
agagacagggtcttcctctgtcacccagtctggaatccagcagcacagttcgacctcctgggttcaaccttctgagtagataggccacaggcatgctcaccacactcgcccaattttttaaaaattttaaaaatatttggatatagtgaagtctcaaatctgctagctgctcaactccgggattacagcgcatgacccaccacaactggacaaggctttcactctatatatataaggcatatttatcagtgatataatatgctagcacagggatcagcaacc

SEQ ID NO: 647024 - DNA, 113 bp, Homo sapiens
ctccaggactcatgccattctcttgcctcagcctcctacgtagctaggataacaggtgcctgcaaccatacccggctagtattggtaatgtaagagatacggggactcctcta

SEQ ID NO: 647025 - DNA, 96 bp, Homo sapiens
  misc_feature (65)..(65): n is a, c, g, or t
tgccccgggcgggagggcaccgaggcgcggggacgcacgagagtcccgcccatatgcgtcgcccncgacccgggcagtcggatatggtcccgcacc

SEQ ID NO: 647026 - DNA, 428 bp, Homo sapiens
agaatttggcagtacgtccaactggtctcacaaccgcagaccacgtgtaaccacgccagcccaggatctccacatccggcttcttcacctgcgggatcatctgagaccagccacttagacagctgatgaaactatgcatttgcacaaccgattcgcaccaactgtcagaaaccgtctcagggaagctcatctgcgtggtcgtcttcctcaccagggccttgacttgactgcagttcggcgtcgtaaccaacttcagtgggcaaatgctcacctttgatggccagtctgtgtagccatttgattagatgttcaggagtcttatggcttgggagtcgaagctgttcagaagcctcttggacctagacttggcgctctggtatcgattgcccgtcgacgcggccgcgaatttagtagtagtaggcggccgc

SEQ ID NO: 647027 - DNA, 147 bp, Homo sapiens
ttcgtggtgttatattgtaattgagattgctcgggcggaataggttatgtgcattaggagtagggttaggatgagtgggaagaagaaagagaggaatgtaaagttatacttatgccttgtggggttgaggtgaaagaggaggggggt

SEQ ID NO: 647028 - DNA, 200 bp, Homo sapiens
tattaatgcatctgaagtatgcatgtaagggataagtgcttattatatacgatctgtggagtcttaaatatcaaccatggacactttcatcctgaccccttccctaggggattatcaggactgagaaatttttccatcgacgccttcctaacaatcgtaggactcgttcctgtgggcatcactgatgggctagtacactt

SEQ ID NO: 647029 - DNA, 282 bp, Homo sapiens
ggtaccggcatgtgctgtaggccagcgctttgggaggccaatgggggcagatcgcttgaggtcaggagttcgagatcagcctggccaacatggcaaaaccctgtcttttttgtattttgtaaaaatacaaaaaaaaaaaaacttagccaggtgcacgtctgtggtcccagctatttgggaggctgaggcacgagaattcacttggacacagaatttggcaattgcagtgaaccgaatttgcaccattgcactccagcctgggggacagtgcgagactgtttc

SEQ ID NO: 647030 - DNA, 926 bp, Homo sapiens
ttacatgacgtggggacgtccggtttcggagcgggagtgtcgttgtgccagtgattataagagaatcatatatggtggtgatgttgatgaataggcgagaacgatttatcatgaagggttcccagtgcgcacaccgttgatacgtgaggcgctagtcgatcatagcatctgtgagccatatgtctccatggtctctattgcgggcggcacgacgaggtcatgcccgctgaggatacctcttacacatgtcgacagttaataactagataggctatcatcttgggagtagagtgataccacggatggaagtattgggaagaatcccagtgaatgtacatcacctgtgaacaaaaatgatctttgtcgggtattagagaaggaaggatgacactgggcagacttaatagcttatctcaataaaagctacgaatgagtaataattggccagtgccttatttatattcaaaagagaaatgtctcatgactggtttatgtgtaccatcctttaatagatcttatacatgctagaattcagatcatgaatgactgctcgaatatatgttgggcagtcctgattgaaactaagactggcttgtggtttaaactgaatatgttcaggttttgaacttttaatagttactccaattcagtaaagtggtatcactggttaacccttttaaagatatgagtgagacttcgttaggaatgttcacgtttaacaaggatgggagtgcccgcttaaaattgcgcgaatgctgaatttgacaaattacggtggggaattttttacaatgggggatggtgtgggttgaaacaggaaaaccggttggaaaaaaatgctaagagggaagagaaagaagggaaaggggagataaaaaatcgtgagaagaaaagaggagggggaaaaaaccagaaagatgaatatt

SEQ ID NO: 647031 - DNA, 168 bp, Homo sapiens
tcactcggcactggtgacacagaggaggtagaatttacttggctgagttatagagggggcagcacaagttcaatgctgatgaatttgaagacatggtggctgtaaagcggctcatcccagatggctgtggggtcaagtacgtccccagtcgtggccctcccctcctct

SEQ ID NO: 647032 - DNA, 369 bp, Homo sapiens
  misc_feature (4)..(4): n is a, c, g, or t
  misc_feature (35)..(35): n is a, c, g, or t
gacnaatacagagaacccagatggctgtgtttcantcccagagtgaaggatttgccttaaggcccaggtgcggtggctcatgccctataatccccagcattttgggaggcctaggctggcagatcacttgagatcaggagttcaagaccagcctggccaacgtggtgaaaccccatctctactaaaattacaaaaaaattacccaggcgtggtggcacatacctgtagtcccagctactcaggaggctgaggcagggaatcacttaaacccaggagtccttacaatcgattcagtaacatctaccttaaagggtcatgagccgagatcacgccactgcactccagcctgggcgacagaggaagatgctg

SEQ ID NO: 647033 - DNA, 131 bp, Homo sapiens
aacccaactaacatgtccagcgtattccatgttcgtaatccaagaaaataaagccctcgttgctcacagacagcggtgactactacagtgatattcctcacggcaagcaaccgcatccataatccttctaa

SEQ ID NO: 647034 - DNA, 505 bp, Homo sapiens
  misc_feature (102)..(102): n is a, c, g, or t
  misc_feature (108)..(108): n is a, c, g, or t
  misc_feature (127)..(128): n is a, c, g, or t
  misc_feature (476)..(476): n is a, c, g, or t
  misc_feature (478)..(478): n is a, c, g, or t
gagtcaggatagtgtccatcacacctcaggggataagagcactgattatgctaatttttaccagggattgtgggattgtactggagctttttctgatgagtngtcatntaagcgtggtgatgtgatnnacattcttagcaaggaatacaatagatatggctggtgggtaggagaaatgaagggagccattggcttggtgcctaaagcctacataatggagatgtatgatatttgagagtcctggaaaaggaaaatctctgctgtctgcaaatgcttggattagaagcgtcatgaaagcacgagtgacagctcctaacctctcctgttttataaacatactatcttgactgttatttatgcagtcgctcatttatcctctgatgtgaaataaatgaaggtataagtttagagccaccgttaagttatacctgtgctatttgccaagaataattatagttttattacccattgattgngngagaatcacacaatttatacgaactgc

SEQ ID NO: 647035 - DNA, 364 bp, Homo sapiens
gagtctcgctctgtcacccaggctggagtgcaatggcatgatctcggctcactgcaacctccgcctcccgggttcaagtgattctcctgcctcagcctcccgagtagctgagattacaggcacgtgccaccacgcctggctaattttgtattttcagtagagatgaggttttgccatgttggccaggctgggctcaaactcttgacctcagatgacccgcctgcctcagcctcccaaagttctgggattacaggcatgagccactgcacccagcccaacactgggattcttttatccgctggctggctcttccgcagttgaattgtgtgacttcttcccctatctgaggcccagtttttcttca

SEQ ID NO: 647036 - DNA, 270 bp, Homo sapiens
attttaacactaaggattaatcgggcatagtaaaaaaagtcacagttggtgaataaacatcagcctcaagcaggtagagtaaatgtcagaactaatgaatgtgccagattaagaaggactcagatgattcaaagaatgcaaaaaaaaaaaaagccaggtgctcatggatctataaaaaactgatgatggatggcctgagggaacttacgctggtgtttccgaacccggccttggtctggcttcttcaccagcctggtgtgttgtcgacgc

SEQ ID NO: 647037 - DNA, 190 bp, Homo sapiens
tagaatgatagaatcgagctggtaccgaatgtgtaaagtggtgcagttgtaaggatccaccatgctctatgtttacgttaaagatacaaaataagaggggacattttggaacaatctgtaatattcttcgtgaatctgtctagataaaacagcgacgaggaataaaaaaatgaacatccccgtggaaagc

SEQ ID NO: 647038 - DNA, 149 bp, Homo sapiens
tgttgaggtggtggcaggcaccatagtctaatagaaaacaaccgaaacaaataattcaagcactgcttattacaatgggactgggtctctattttaccctcctacaagcctcagtagtacttcgagtctccctccacaacctctagaag

SEQ ID NO: 647039 - DNA, 243 bp, Homo sapiens
actgccaacactcagtttttcagcccattctgatgggaatctagtggtatctcattgtggttttattttcatttccccgggtgactaatgctggtaagcatcttttaaggtactttttggccagttgtatattttctgtgaagtggctgtcaaatcttttgcccacttttaattggattgtttgtcttattgagttgtaaaagttctttatatatactgtattaaagtcctttgtaagacaca

SEQ ID NO: 647040 - DNA, 261 bp, Homo sapiens
tgcgattcaagccgggcacggtggcttcatgcctgttatcccatgcactttatcgaggcatgatttgggctggatcacttcatgccaggagttcaagaccagcctggccaacatggtgaaatcccgtctctactataaacccaaaaattatccagatctggtggcagacgcccgttcactcccagcttctcaggcactctgatgacggaatttcgcttgtacctgtgaggcggcgtgcagtgtcgcgatcttggctcactg

SEQ ID NO: 647041 - DNA, 695 bp, Homo sapiens
ggacacgggaggcacggagactgctcacctgctcggccatggccgtggagggacccggcgccaagggcctcgcgctcggcctcgcgacccctggcgcgagcttcccgggctggcagccaggcctccgtacccagtaaagtgcgagataccgaagccaggaccgggtgcctccgacgcgacacgagtcgataggacggggacgccgcggacggcatatagcatggcgggctcggtgccatggcggggatcccccaagggcacgagaacgcgcaagggacccagaccaatggagctctgagcacccccgaggcccgacagacataacctagccgctagaaaggccatcgtgactagacaaacggtgacggccaggacagcctaaatgcgagtgcagtggagggccgtcagcacgtgacgtccctgacagaggcccttttggcaagcttagatccttgagagtcgcgacttggggaaggtgcgagtgaacggggagagagtgacgattccacgtagcatgagagacacaaaaaggaagaaggcataggtaggaccacgaattgggaacgaggagtggaattacatacaattccgtttggcttattaaagaagggatgatatgctgtggaatataagagttagagggtcaaggtgaacgagtgatagagaaggaagatttgctgtatagagtaaaatgg

SEQ ID NO: 647042 - DNA, 750 bp, Homo sapiens
accaacggcgcatgcctgacttaggaaagattggccataatcaagcaattgcctgaagcaagatggagtgcttgggcaaggacatgaagatcacgatactctgggtactctgtatcttgtcactgacgaagaagggattagcgaccattgctatgattataaacgactctgtgttgcgcgcgtaatgataatgcgagagcagacatagacacgagtcgataggtgtaattagatgatagtattagttgatagcggtgtcaacatagtccacgtgttaataggagccaaaggctgagcagagcgtgcgcatactttagctagagatgaacctggccaatgagtactatagctttgcacgcaaagatctcttcagattacatgaatcgccgttctacacaagagcgcctttgaatgtagacatgccagtaacctgcatctgcagatgcgagcgacttaggacatgtaatacaatagtaagatagcacttcgttgctgacagttatgccctgagtagagcgtactcagtactagtcatactacatgaggatcaggattgacctcaacgcatactgaggcacgtgcgaacatagttaacgttgggcttcgtcacccttggaattactagccattaagctaacttgtacaacacccttaggctagtgctggagcgggatggcaccaacttgtaggagatacgaactgaacgaccgagtactttcaagacggacaccagtggtctctcccttgtcg

SEQ ID NO: 647043 - DNA, 854 bp, Homo sapiens
cgcggcagcgcctctgtctcgcttttacttatttttcccccctttcccctttctttttttgtttttcttttctttactcccctcccgaccatttatcaccattacccctcggaggcgcttcacccggaagggggaaaagccggctcataacaaaaaagaaagacgaagaaagcaaaacaagaaagaaaacgaacacacaagaaaacaacaaacaaaaaagagaacagaagaaaaaaaagacaacaagagacaaagagaaagcacacagaagaaataataaaaaacaaacacataaaaagacaaagagaaagcaagaaaaagaaatagagaaaaaaaaagaaaaggacaaaaaccacgaacacacaaacagaacaacagaaaaaaagcaaaaaaaaaaacaaaagacacacataccacaaaataacaaaaaaaaaaacgaaaaagaaaaaaaaaaaaaagaaaaaaaagacacaaaagaagaaaaaagaaaaaaaaaaagaaaaaacagaaaaaaaaaaacggaaaaaaagaaaaaaacaaaaacaaaataagaaaagaaaaaaaaaacacacccaaaaaaaaacacaacagacataaaaaacaaaaaacaagaaaaaccaaagaaacaaagagaaaaaggaatcaaaaacagaagagaggaaaaacaataagtgaaaccaaaagaaaaaacagaatctagacgcaagaaggaacaaagtaaaagacacaagacaaagaaacaaaatgaataaaagaaaaagaaaagaagaaaagaaaaggaaaaaaaaagaagaaaagatatgaatataacaatgataaaataaaaagaagcataaaacagaaacaaaagacac

SEQ ID NO: 647044 - DNA, 1004 bp, Homo sapiens
aataggggacgtgttacggcacacatacgagggaaatgagggccgagagctcagagatctgaaagaagtactaccgctgactgggtgtgtagagaagtgctaaagcggatacacacgtcgtcgttgtgacggaaggcagagtgcgccaatatatgcccctggatacatgtttagtggaaggagaattgacatgtgtaatagtctccgactttctgagtgaccccggattttgaagaagacggggccatgcttgagacgggtattcctcgctagtcacccgctgcgagccgtgatgagagagaaaggcccgtgtcgaggaatgctcaaatagttacccgatgaagggtcatcaaagatttcaggtgattaagtggtgacctggttgagaaggagtacttactgcagatactacccgaaagatgctccaggaagcgtttctgcgcaatgagggttccttcatagtgcaacccctatcacggtcatactcgagcatacacagcctggagttaaagtttgcatagacattagtcgtctgcagggactcgttgcattggacattcaatctttgtacttggactgagcaatgattttgacaatagtatctctgagtgatcgctagctcttgagattgtcactcctcctttccccttgggttattttgaaacttgcttggttgaagtcatgaccttgtccctcattcaaaggcgtaaataccacccattcctaccaagcagacgcagacccttcacataccctaattctgacaacccagcctgggtagttgctttattcagggttttattgaaagggcgaagccgtgccatggacaaaagggattaacaaccctgcgttgggccaaaggttttgaactcacaaaggcaataccctccctggaacccgaagggtgttcctcaagaattggaagtcactttctgcacaattggtggcccaggggtataactcacaaggctccctcctgtggagaagattaccgggcaagggga

SEQ ID NO: 647045 - DNA, 866 bp, Homo sapiens
ggggcattgaatttacagagtaaagttttaactgagaatgaatggcctttcgcagttcttctggagtatggaaaagagttggtattgaaagttcctcaatggctgggcactgtggctcatacctataagtctcaatcactttgggaagctgaggtgggtggatcgcttgagctcagaaattcgagagcagcctgggaaacatggtgaaagccctatctttaccagataatacaaaaaattagccagtcatggtggtgccagtctagtggtcccagctactcgggaggctgaggtgggaggatcacttgagccttggaggtggtggttgcagtgagccaggaatcatatcactacatctccagtctgggttgaccggagtgagactccatctaatgaaagaaaaaggaaaggcaactatgttagctgtagtccctctcctctgaaaatgtgaactggcatgagctgttgtgcatcagtctagtgaaatgcactggaaaaatggtgtggtaattcctgcttgaggtatgctagaaagagagaagataatacttgtagacatataagtgctgatcctttgtagccagatgaagtcgttacttaaacaatagtggtggtcagaaggtaataccaaaaggagggatatcaagaactaggttatggtgggttgcaagtagttgtctgaatttttaaggcatagacatgatgtagattcgcattgagctatgagaaaaccagtgtcttgatcagtgggggagttttcaaaaattatccttgttagacatgattctccatgggtgagatttaagggatgatggaaacaaacattgaggaggctaggagaataagaggaatgcagtgttcagaag

SEQ ID NO: 647046 - DNA, 607 bp, Homo sapiens
gggggtcacactaggctgtgcacatggtgtggggctgtgagagccccaggcgagtactccggatctccttagggagctctgtgaagaggtctggacagagaagactgaagtggctgtggtggtgtcagggctggggaggagagggacgggctgcaccagtgcaagtgccaacttcgtctccctagaaccttccactgccaacccttgtgaagacacagtccaggcatcattcgggcacctgtaggacggaccttgctaggtaagcttatctctctgagcactgagtgtcaaggaagcccggttcggtagctaggtgttccctctgaaacagtgatgctctcagaagggtggtttcaagtcccttgggcctcacccattcgtggcacttggggtctccccgcctcactctatctctgtgtgtccagagaggaggaaaccctgccttgagactggcccttgcactggtggagaggagtaggccctgcaccaatgggggcacctggtgtctggcctcagggatccacatgtttgagacagattggtccacttcagactggcctgtgtctagctatcatattggtggtgagcatatccaggaaaatcattg

SEQ ID NO: 647047 - DNA, 152 bp, Homo sapiens
agcgaagtctagagtgactctagaggtctttaacacgcatctcggttactgaacgtagcctcctggtcaagcaatcttctgctcagctcccgagtagctggaataatagttgcccatcaccacaccaaagctaattttggaatctttagtaa

SEQ ID NO: 647048 - DNA, 160 bp, Homo sapiens
  misc_feature (36)..(36): n is a, c, g, or t
gcgctgattctagaggatcccgctgacagcgaccanaaaagcccagtggatatcaaccccagttttctagaaactctgttcctctgctgttggccctcagcctgggggtcccctgagccaaagatgcaggtgtccgctcagaccatggcagctccatctc

SEQ ID NO: 647049 - DNA, 127 bp, Homo sapiens
gagttaatggttgatagataaaaatgcaaagcatctagtgccagtgagtgagacccaggtgtactatcctaccaccccgtagtggtacccctggtgcaggtctattttttcttggtaacactccacc

SEQ ID NO: 647050 - DNA, 442 bp, Homo sapiens
ccccctacctactgcgcccttgccgccccccgccctcagcccccgcccccccctctccccccccgccggcgccccccccccttcttctctcttctctccccgcgccgcacaccctctcccggcccgccgcccaaccaacacccccccccgtttttcactcaaccccttcttggcggccgggccctttaaaaaaaggcaaacccccccgtttcctactttcccccaggtccccaaagggggaaggggaacccccggccttgaacttttgttttttaaaaacccggcccccgttttccccgggaatgggggggccaacttttgggacccccctttgtttctttgtatgtttgtaaaaagggcccttttaaaacacgggaatgttttggtttgtaccgaccttgacaaatgggtgttaataaaaattccttttgccccaagggta

SEQ ID NO: 647051 - DNA, 738 bp, Homo sapiens
gtggtgtctagctctgaatggggaaactgggggcagcaacacttataggcagttaaagccactctgccctctctcctactttggctgactcttcaagaatgccattcaacaagtatttatggagtacctactataatacagtagctaacatgtattgagcacagattttttttggtaaaactgtgaggagctaggatatatacttggtgaaacaaaccagtatgttccctgttctcttgagcttcgactcttctgtgcgctactgctgcgcactgctttttctacaggcattacatcaactcctaaggggtcctctgggattagttatgcagatattaaatcacccgaagacactaacttacagaagacacaactccttccccagtgatcactgtcataaccagtgctctaccggattccatcactgaggactgatgttgactgacatcattttctttatccgaataaacatgggggtctattagctggaagccttacccagtaattggcatgacatctgagcacagaaataatggcaaaaacccaagcaaaccaatacatggtgctggaataacctgatgcccagcccaaggagttgattctgcggttttgacctagggaaactagaggcttcacagacccttcagaaggtttacgagaggcatatgcttcaaatgaaagatatttttggcaacaaatagggcatggttcgcctaggcctcataaagccggccttta

SEQ ID NO: 647052 - DNA, 219 bp, Homo sapiens
ggcctgccgagtgggtccctgcaaacaaacaaaaaaaaaaaccctccccaaaaggagtaatccctgagaggattctcaaatgcataaataatttttcatttagaattttctcgactttccctcaagggatctgaaatttattctcaattatccttctaattgtgtcaaaggcccaagtccagtgttatacaacttggccggtctgatacaatgcagaat

SEQ ID NO: 647053 - DNA, 207 bp, Homo sapiens
  misc_feature (18)..(19): n is a, c, g, or t
taaactttgctgtagagnnggagggaaaaagaggaagatagtcttcttgtcgtgggccgtcttatcagcctagcaataataaactatcaccatagcaacaggaagtctaattgatggcagatgttgagccactttaaaagccacgccaactgaatgccaagctgatgctgtaaacctctctcctctcccgcggctagactaatcatg

SEQ ID NO: 647054 - DNA, 264 bp, Homo sapiens
  misc_feature (86)..(86): n is a, c, g, or t
  misc_feature (98)..(99): n is a, c, g, or t
  misc_feature (105)..(105): n is a, c, g, or t
  misc_feature (110)..(112): n is a, c, g, or t
  misc_feature (114)..(115): n is a, c, g, or t
  misc_feature (123)..(123): n is a, c, g, or t
  misc_feature (166)..(166): n is a, c, g, or t
aatcgagcttcggtaccacatgaggctcttacacatggtcggcgaggagaatcatcgacaatgacaccgaggaggagtctacctcnggcgctggatgnngggctnttgtnnncnngcacatcngctacatcatggccgagatctgcaatgccaatgtcccccagantcgccagagggttcaccagatcctaaacatgcgtggaagctccatcaaaattgtcaggcatatcatcaaggagtatgcagagaacatcggggacggcc

SEQ ID NO: 647055 - DNA, 213 bp, Homo sapiens
attcgcggccgcgtcgacattttgtctctcagaggatttggtctcacaatgaagctggcctcatattatgagttagggaggagtccctcttcctacattttttggtataattttggtaggattggaatctgctcttctttatacatgtgttaaaattcagctgtgaatccatctgatacaaggctttttctgggtgataaggaattttttatt

SEQ ID NO: 647056 - DNA, 398 bp, Homo sapiens
aacaaacactgatcttatttctgtcactatagattaaatttgtgtctggcttctttcacttagcataatgtttttgagatttattcatccatgttgttaagtgatcagtatttgtttctttttgttattagctaagattgatgaaaacctgaacctacaacttaaaaaaaaattgtaatgtcttcttgacattgattctttgtgggaggtatattgtgaaatcacagtgaatcttaagtattaaagtgtgttcaagcagataactgttttagatatacttgatctaatgttattttcttttgctttttttacttgaactgttaaagttacaatgaaaaattattttaaagtcatacttcttggttaatttaaaagccttctcaacactaaaaaaaaaa

SEQ ID NO: 647057 - DNA, 387 bp, Homo sapiens
  misc_feature (1)..(1): n is a, c, g, or t
ngttttctttctctttatacctttaagatcatatcattggtcataactcctttttcttcttcagacttaaatattccctgttagtttagctttctaacaagtcattttactagtgtatttgttttgtttttcattgttttcctatccctaaattttgactttttttctctttgtatactgtctttcagtttggctgtgttaatgctatgactaaatcttcaagtattcataccaggtgtatggatgactaaaaataaaatttcccacctggacttaaaatttgcctttagaaactggatacaatataatatccaagttctctcctccagtactttttgtttgcttgttttgctaaaatgttaaaaaaaaaagtaagttaaaatgtga

SEQ ID NO: 647058 - DNA, 364 bp, Homo sapiens
ttggcacgagcacatttgatgtgaaagcttagatctaacaatgagaaagaaccacaacctggacagcaaggagcatagcattcctacattggaacagcatgtgcaaaggtctcccagcaaaggggaaatggaaaggatagcagtttcaaccttcatttaatttttaattttaatttttttgctgcaaccctcaaatcctgggcttaaatcagtcgtcctacttcaacctttcttggtgcccggaaatacgggcatgaaccatcgcccctagtcataccactcattattatctctttaagtctgtaattggtccaacaggctcgttggtattctgtgaggcctcagaggtcagatttaactcgcc

SEQ ID NO: 647059 - DNA, 186 bp, Homo sapiens
cgagtcctgagacttgtctgttggagacggattacacctttcccacttgcctgaaaaggtcaaggaccttaacttggctgatccatctagcctcagtgtgctgctgccctgaggcgctagtcacagctagctccgtcgcgctgcacgtcagcagcgagtcagaaggcgagacgcgacagaacgtga

SEQ ID NO: 647060 - DNA, 438 bp, Homo sapiens
attggcgacatttcaaagactctaagataatcattgcttcccctcaatagtcagaatccaccatgtcagtatccataatcgggaaactaaagaggtaaaagaaaatcaactaaaagtgtacgcttgttagtatagacggttgcatgtagcagggagaccgcataatcgctcttggggattaaccctctggccctgaaaatagtaaagtcagaaaattaagataagtaatatatacttaaaatacttaaaacctgtatctatatccattttcaagagatgtgacagttaagagatgacggaaattatattattataaatgtttactgcataacagtacaaaattgatgttcccaaaaagagggtaaaaaaatctttaactgacattaaacatcttaagtaatttggaaaaatcccaaggttgaaatggtcgccaatccg

SEQ ID NO: 647061 - DNA, 351 bp, Homo sapiens
gagatatcccctttcttgttctgctcttgtgggtgtgcccggcgggcctgaatttccccttgtggaaagaagctcctttcactggcactaagtcttgcatgaaaccgggaggaccacacagtgcagggaccagaagaacagcatgtacccagcctgttcccgacagcgagaggcgggaagcttctgggatcctgtggttcgcagctcaatcaagctctacgtcccgatatggtgacaacttctccagagagacgtggggcctccctgccccatgaggaccaaggccaagccaccagggatgcggcgattcaatgtgtctgagtgttaacattaccctgttccctttccttt

SEQ ID NO: 647062 - DNA, 160 bp, Homo sapiens
gagcgtgggctaccctgcagctactatggtcctatggtagagtgtacttgcagcgaggcacggacgtgatagaatgagaggctgcctctcctttgacattcacaccatccacgtgtgtctgcaccttgcagtcttacttggattaccatctgatggtccc

SEQ ID NO: 647063 - DNA, 268 bp, Homo sapiens
ttcttagacagagtctccctctgttacccaagctggagtacagtggcaggatcatagcccaccacagccttgaaaccctgggctcaaagcaaatcctcctgcctcagtttcccaagtatttggaactataggcatgaagcaaccacgccaagctaatctttcaaattttttgtagacatggagtttccatatgttgcaaagggaactcctggctctcaagggattctccaaccttggccccccaaactactaagactacaggcatgag

SEQ ID NO: 647064 - DNA, 365 bp, Homo sapiens
gcttcatagtcaacatgtactggtcagaccaagggcttttgatctacctgggaaaatactttggtgttaacctttgaaaatagttaatcttggcagggcacagtggctcacgcctgtaatcccagcactttgggaggccaaggtgggcagattacaaggtcaggagtctgagaccagcctggccagcatggtgaaaccccgtctctactaaaaatacaaaaaaaaattagccaggcatggtggcgggcgctactcgggaagctgaggcaggagaatcgcttgaacttgggaagtggagcttgcagtgagccgagattgcgccactgcactccagactgggcgacagagcaagactccagctcaaa

SEQ ID NO: 647065 - DNA, 867 bp, Homo sapiens
gcgcgatacgcccgtagccccggcaaacggccccaaaggggcgatgcagataccgaaggtatctgcgctctgtattagggaggtcgagctgggcctgaagggcagaagcaggaccactacctgcgtatgatgctgttgcgccgtgaccctaccctcgcgaggccgaagctggggcgctgatcgtgggcgcgctgggttgcgatgattgagggcttctcggagtggtctcatagtaccgagacttcatacagtactagagcagcggggaggggggacgaccccagtgtacatgggtgacattgggctgaggggaaggacggtggtctcacagttccgagtgagagaaacttcaatcatctatgtcagacgggaagcctatcgttctcactagtgtatctcgatgttctgcgccgatgagacacgagtcgaggatggcacgagctatggcggttgtggaacgtgccttgggtgctgtccccgtgacaccaggtggaaaccataccgttgcttgtcgcggtgaccactaacactggcagatggtagagagccgctggtcgcgttgtgggacctctcaaacatgcgtggccaaactcaatccaatgctggcagtttcagtcatgcaagagtcaggatgatgaatatcgattgtagttgatcatcgcctaaatggccgtggagccggcagaggcccggtagttcagaggaatcacggggtgcccccagggcacaaaccggtggagacggtgcgcagccgaggagatcagaggaacgcacaatcgcgggatggcgcacatgggccaagggatccctcggaggtacaaacaagtggaaaaccgaccgttaccatggacgggggaagccaccaga

SEQ ID NO: 647066 - DNA, 184 bp, Homo sapiens
  misc_feature (30)..(30): n is a, c, g, or t
  misc_feature (57)..(57): n is a, c, g, or t
atggatggcagcaacctgatgcctccctanaagctgagcagatgctagcaccatgcntcctgtacagcctgcaaaactgtgagccaattaaacctcttctttataaattacccagtctcacgtatttctttatagtacttcaagaatggcctaatacagatggatagtctctcgtgccgaattc

SEQ ID NO: 647067 - DNA, 249 bp, Homo sapiens
  misc_feature (93)..(93): n is a, c, g, or t
  misc_feature (96)..(96): n is a, c, g, or t
  misc_feature (101)..(101): n is a, c, g, or t
  misc_feature (103)..(103): n is a, c, g, or t
  misc_feature (118)..(119): n is a, c, g, or t
  misc_feature (150)..(150): n is a, c, g, or t
cattaggcgcgtatagcgactacggttctgcgctaggacaggtggtaacacatttgtgtgttgagactgggttggtagaagaacagagctcancanatctntngtgtggagggagagnnaaaaagagcagtatgtgagggcaggtgctcngctactgcttccttcttggagcaggtgaccaaggagtaagggtatcactccctgcccatcccaggctccctgctataggagaggggcctacgctaaacc

SEQ ID NO: 647068 - DNA, 505 bp, Homo sapiens
cagggttacatgctacaaggattctcctaacagcactgacttgcattatccaaaatggaaagactctgaatgctcaccaacaggagattgggcagatacgccagagcatacccattcgatgacgcatcatgctggcaccaaaagagaggcagctctctatgtgagctgttacataacaacagtctgagagatactattaacagaaaagaggcaggtgccgggaacacatgtccagcatgatcccaattacaggtttcctaaagggctgtctagcatgtgtatgtgtaggctatgcatgcttgcctatgcacagaaaatttctagaggaaaattaagaggccattaacagtaggatagtagaaatgaagtattcacgtctacaaaagtgatacctgtattttttcatctttagtatcttctgtactattccagtgttttctcttctcttttttgttttatgcactctgtacatttttcttttatggtaaaacaaatcatctttaac

SEQ ID NO: 647069 - DNA, 154 bp, Homo sapiens
tgtactctatatgacatgctgaccccctacccagctcaccatcagacacccatgattaatacctcactcatgttgcactgcttcatgtgcctccacaatggcctttccttatagtatggccctttggtcctggctgtcttgatgtgtacctgat

SEQ ID NO: 647070 - DNA, 204 bp, Homo sapiens
ccagcaccgagtcttttgacctcagagtcctcacctgaactgctggatcttgaagttatttcatcctcagaaactttatgtatggtgaagtacttttaagcctgtggctatattctgtaagttagctttacacaaaatactcgagggacagtgaacttcattcaaatgcagtgtggaactctcaggtttccttgagtcagcctc

SEQ ID NO: 647071 - DNA, 1757 bp, Homo sapiens
gatcacattgcacagcaagtattatctcctgatacagatgctggtgaatgcaggggagtgagattcattgctcatctttggatatgaagtctgttagggaagaaacagtgccactattcccttagatgcaacagtagcatagcctcttcacccaggcgtccaaaagcttggcgtgaagatttcagcaaacatgtcttacaacatgaggaggaggagtctaaatcagtcaggggataaaagtatcgaatcatagacaagcacacacttggctttagattcttacagagggtttcgtactcgtcatcaccgtcgcgcaggtcgaagattcacttttaactattcagtattcatgaaaacaacatggatctacactgttaactgattgagactccactgctgattcactctgttttacttaaacaacttttcagggcatgtctgtagacatcacagggtcaatatgtcatgacacaagtggtgtggcatcgcatctaaggagggaccagaactaataacagcatataccacaattactgaaggcaacacgcatcattgatttatactacatgtcacaagcaaacaaacgcgaaactgacgagcacccagcccgggcgagacttacacactacaagcacatgacaaccggcgcaccatcacatcatacccaagggaaacgagctgcggacaataccacacaacccagcaggcaaacgaaaccgccacagaacacagcaccaagaccaactcagcgtaaaccagcccacacaaggactactgcacataaccactgtaccgacgaacctgcaatacaccaataagccaaccgaaccaggatgcgaggacgtatgcgagcaagcgaaaacgatgataaacccaccgaacatctcacatacaatcctgtacagacaccaaaaaacgacaatgccagacaagcaaaacacagagacaaaagacacgaacaagcacaacagcacaggagacagaaaacagacagcgaagacacgacaagaagagagcagggaacaaaagaacgacgcacgagcaggagagatcagacagaaagacggcaacgacgcgagaacgcggcgaagagcgagcaaaccacgaacgagaagagaagaaagacacgaggaccgacaaagaagagaggcgagggccgagacagagagcgagaaaagaggacgacagcacagggaaacacgaagcagagaataaggcgacagcaagaagacagacaagacagaaggacaagcacagcggaggagacgaggagccaacggtgagacaaggagatagagagtaagaggatgagacaagagacagagagaaagaagcacgagagcgagacgcagcgagaagcaaacacgagagccaggaggggacaggaaccgacagagaccagagacacgggacgaaagaaagggacgatagaagggacgagacagcaagacacagcggcaggagagagggacggaaagagacgaacgaaggcgatacgagacgaacaagagcaaaagaacacacgacgagagaaggcagagggcagcaagaaggagaggacagacaagacgagaacagaagagcggggaggcgtgacgagaagaaggactagaacaacggcgtggcatgaggcaacagaatgagaaggaagaagcgcaggaagacagaggaagacaacgagacgtagatgcggaacaaaggacgacgaagcagcagacgggacgaggacacgagacagggaacgagggggacaagag

SEQ ID NO: 647072 - DNA, 756 bp, Homo sapiens
tgggcatttctcagcctcaaaacaagaatagatttctaataaagaaacaggtcatgataaaaaagtagaggtgtggggccaggtgtcatggctcacacattgtaatcccacacttagggagactgaggtgggtggattccttgaggccaggagttagagaccaacctgggcagcatagtgagaccttatctctacaaaaaaatttaaaaattagctgagtgtcaggccgggcacggtggctcacgcctgtagtcccagcactttgagaggccggggcgggcagatcgcggggtcgggagatcgagactatcctggttagcacggtgaaaccctgtctctactaaaagtataaaaattagctgggcgtggtggcgggtgcctgtagtcccagctactcgggaggctgaggcgggagaattgcttgaacccgggaggcggaagttgcagtgagccgagattgtgccactgcactccagcctgggcacctgacagagcgagactccgtctcaaaaaagaagaagaaaaaaaaatattagatgtagttaaaaaaaaaaattttaccatgagatgggggggaaaattgcctgaagcacaaacgacaacatcacggatgacagaggcaagcgaaaacacaaataagagcccaaaggaagcacaaaaaacacagggggaaacaccgagagacacaaaccaaacagcagggtacacacacacaaacgggagacaaacagagaaagcaactaaacggcagcagga

SEQ ID NO: 647073 - DNA, 217 bp, Homo sapiens
  misc_feature (31)..(31): n is a, c, g, or t
aggaaaaggagtcacggctctcatgcatgtnttatttgtgtttaaataaaaccacaaaaactgaaaaaaaaaaaaaaaaaaaagggggggctccagaattggaccagttccaaaatatagggtggatttttggtgggcggggcccccaaggagcggtacccatttaccttttatttcctaaaattaattggggggcagtgtaaccattacgtggatt

SEQ ID NO: 647074 - DNA, 138 bp, Homo sapiens
aggtgttgtgaagagcgaagacttatcgctcccagacttatatggatcggcgtgacctccccctggcgcggaggtggcccatgtcaagcacctgttctgccagcctgaaggcactgcaatgtgagaatggagataggc

SEQ ID NO: 647075 - DNA, 484 bp, Homo sapiens
catacatatcagctctgtacctggctgtcagtgactattgatcattgctgcgcaatgtctaatctaccactaatcccattcacgctatatcttcatttctagaagattgattttgggtcttttatctttttgagacagatctcatgctgtctcccaggctggagtgcaatgctatgatcatggctcactgctgcctcaaccttcctgggctcaagccttcctcataactcagcctcctaaatagctgagaccacaggtgtgcaccaccacgcccagctaatttttgtacttttctgtacagatggggttgtccagggtggtcttgatctcctgagctcaaacaatcctcacatctcagcctccagaagtgctgggattacaggtatgagccatgacgcccggccctaggtcttttttttatatcttccatttttttctttatttttatcatatttgccctgacattgaacacgtggaacatatt

SEQ ID NO: 647076 - DNA, 881 bp, Homo sapiens
agcggagtagcgtcacgcggaggcggagcgaggactcgtgggacagtcaccacctatttgcgaattcacaggagaatataagacacgagaagcaaagctgtgaatgaatttcactttgatctcagcaatagattggacactctactgatcttgcctctctacaacctctcttccacctgacctctaaatgttgaagtgtgtcaggaattgtcattagaccttcttccttatctacacttcctctccaatatggaattctcttccccaagctgttggcgatgtctagattcatttgcattgtctgggcatttcaggctcagctgtcatctcagtgaccagtttttatctgagcatgaagtcttgagtggctctgcacaagatcctgaaaaagagggaatattcttctgtgtgtgtgggcagagaagatgacattactgaatctgaaacgaatgtactagctgttgtccatgatagagaagtggtcattttctaccacaagggacgcaatatcatgctatggatcttcgctgttaccactcaggaggacctttacatttgggagatactagaggattcgatggacgaccgtagtatagtctgccccctgtgcataaataacgaagttactttggctacaggagaaggtctgtaccagtctataaaccctaaagatccatcagataaagccaggtggtgctcccaaggaactaacgcaagggttcgcacagtgacggtagacaacggacattttttatgtgactctttctaatgaaccttttaagtgtgactcctgaatttatgccactggagacttcacagtaattagaagttcttcctggtaaaaatttttgaaatggaactggtgtgtatgcttgaaaaca

SEQ ID NO: 647077 - DNA, 435 bp, Homo sapiens
ctcgcatccatgcatggctggggatacctcaggacatttacagtcttgtgcagaagccacctcttcatagagtcgtcgtgatgaaagacttgactgcgagcaagggaaatgccagatatgtattaacccatcagatctcataagactcactcattatcacgagaattgtcatgggggatctgcccccattatccaattacctccacctgtccctaccttgacacttggggattatggggattcatcaattcatgcgtgtagatttgagtggggacacatagcctaatcacatcagacagattacgttcattattctaggattatacatctgatatctattagagtcggtctttgaattcatattctctgactcttagtccattgccttttccattgtatcatgttgtatttgatgtaagaggagccggtgccatg

SEQ ID NO: 647078 - DNA, 958 bp, Homo sapiens
  misc_feature (309)..(309): n is a, c, g, or t
aagaactagtagctttaactgtgagggcacagacttgaagtgggagtgatgagattctgtaggggacccatgagttgtgatagaggtctcgaggggaattggcgtgagacgaatgggtctcagagacactagtgcctgtagcatgtggatgaagaaaatctggctggttaagaagggcttcccttaagtatctcgccctcatacatctcatggagactgttctggaaatagcttttgtcttaccaaccctgccctggacaaggagcatccagatcacgacatgtgctcttggtgtacttttagcctggnggcaattggagttatccacatggcataatgttgggtggctatgcatagctattaagactcctcgtgttggcatgatgcactactagtcccccaggggtgccactacctaccttaacaatgaagatcgcagcaatggatccctaatggatggcgacatatctttcttttgaagaagtcccaacttgttaacttgcgtcgctgtttaagtgaaggccagtacaggttaaagtgccacggcttggctattaacttgcttgggatgcgtcaccagtattcctataaggtgtgtacttgactctttcacgggggcttccttttaacttacgtcctacaactaaacgttatagtagactggaaggaccctaatctgctattgttgaagggaattaccattgctgcgagatgtcgttgcacctttgggaccaatgagcaccttggacctgggaccataaagcgggagttaagagggggttagatctccattcctgttcaagatattgactccctggtgcaaatatcacctttaagattactcccagtgggtgctttccttgcttgaatgaaattacgggacgaggcattaagtgggatagggacttgaatagaacctttaaagaataccgtcttagtgtctatgaattggacccaa

SEQ ID NO: 647079 - DNA, 1386 bp, Homo sapiens
gcgtggtcttctactgctcgttgtccggttgtgtgcttggggccaggtgtgcgggtcggtctgggtgtgtgccgtgtcacgtggtgttgttgcgttagcgccctgtggcgggaggcgtcccgcgttctgtcctcgatgttggggccctgccttctcgttcctttttagcgtgtgtcagcatctcgcgcggctcgctgtcccgttgtgtcccgttttggtctatcgttccgtgcagtctttgtcgtggtcctgaggttctattgctggtaaaccgccttaaggctacttccatcccgctggcttatttgaattgtcctgtcgctcgcacgtgctttctaggggccagttggcgtccggagtgccctagtgttgacgcttatgtttggacctttctctggtcggttccgttttgcatacgtgccctatggttcctgtgcgccctctgtcgttctggtcgtgtgtgtgctttggtcggtctacagccttggtaggttcgcttgctaagggcccgtgggaggctgtgggggggttggtgcatgggtgtgaagttgtctcatgctatgttgtaaacggtgtaatgtgggcgaagttgattctgttagttgggtgttagaatggaggtccctgttacggttgttgttagttaaggggcttgtgtttttctgacaggtgttagcggtgttatggatggtcggagctatggtcgagttgcttctagtgaggaactttacgttttaggagcttgttaggttcgaatgtttgaggtagcgttctgagggttttgttgaggaggtatataagcttgttaatgggtagtggggtagggtcttggtcttggttgtgtatagaaggggtatagataggccaagtactggtttagtacagtactccttatgctcgtagctccaggccttagctgtgtccctggcccctctggtccagctgctgcagacacctgcgcgttaagcagcagcacatcctctaggtagctccacagttttgccttataaggaccttcccaagtctccctttccctgtctggcttctcccattaagaagagagagatacttgatagaattgggtggggggaatgagcatgaacggtccttgccatttgggatatgttacattagtagtgagagtagagaataaggagcctttcgttatggaagtatatgggagtaagagagactagggttcttttcagcagagtctagtagtttctctgtaaggcttaaataatcatgaaaagagacgaacctgcccacgccactccttatattgctgtgagattgcccctatcttgtgctcttctgtctgcagtgtgcacgtcaacgtccaatcccgactataaggtgttgcgggcgggggccccgggcggggcg

SEQ ID NO: 647080 - DNA, 419 bp, Homo sapiens
  misc_feature (1)..(1): n is a, c, g, or t
  misc_feature (52)..(52): n is a, c, g, or t
  misc_feature (78)..(78): n is a, c, g, or t
  misc_feature (88)..(88): n is a, c, g, or t
  misc_feature (108)..(108): n is a, c, g, or t
nggccctaaacactcccaccagtcaaccaactgatagagtaaggttttttcncgttacccctgaatccccctcctccnggctccaccntgcaagatcggccagccatnccacagatgtctttttgtatgattagaaaggaaatcagaaaccaggctggtgcctgccggggcgctgcactccgaaactcagacgccagctctgttatctgtacccttcccccaccgtgctattttctttggattagagatgcttttacctggaaactccactttaatttttttttttaagtcaaactccctgagctactttgaagattttcaccagggtgggactgtctaggcagggtggtggttgcgcttttctcggctaccaacagggtacattatcacagctgtcctgtgaaaggcactacatactt

SEQ ID NO: 647081 - DNA, 478 bp, Homo sapiens
  misc_feature (316)..(316): n is a, c, g, or t
tataatgctgagtaaaagcacaccattaaaaaatttgttttttaagacggagtctcactctgttacccaggctggaatgcagtggcgtaatctcagctcactcactgcaacctccacctcccaggttcaagcgactctcctgcctcagcttcctgagtagctgtggccacaggcacacaacaccatgcatggctaattttggtatttttagtacagatggggtttcaacatgttggccaggctggtctcgaactcctgacctcaggtgaactgcctgccttggcctcccaaagtgctggaattacaggcgtgtgtnaccatgctctgccaaaaaaaaaaatttttttttttggaaacggtgtcttgtccttgttgcccaggctgcattgcatgggctcattctcggctcattgcaccctcggcggagaaagctctcttatggtcttggcccttagctacagataaggcacccaggggg

SEQ ID NO: 647082 - DNA, 847 bp, Homo sapiens
  misc_feature (429)..(429): n is a, c, g, or t
  misc_feature (434)..(435): n is a, c, g, or t
  misc_feature (499)..(499): n is a, c, g, or t
  misc_feature (516)..(516): n is a, c, g, or t
  misc_feature (519)..(519): n is a, c, g, or t
  misc_feature (569)..(569): n is a, c, g, or t
  misc_feature (581)..(581): n is a, c, g, or t
  misc_feature (586)..(586): n is a, c, g, or t
  misc_feature (594)..(594): n is a, c, g, or t
  misc_feature (596)..(596): n is a, c, g, or t
  misc_feature (607)..(607): n is a, c, g, or t
  misc_feature (614)..(614): n is a, c, g, or t
  misc_feature (616)..(616): n is a, c, g, or t
  misc_feature (630)..(630): n is a, c, g, or t
  misc_feature (645)..(645): n is a, c, g, or t
  misc_feature (660)..(661): n is a, c, g, or t
  misc_feature (664)..(664): n is a, c, g, or t
  misc_feature (667)..(667): n is a, c, g, or t
  misc_feature (671)..(671): n is a, c, g, or t
  misc_feature (673)..(673): n is a, c, g, or t
  misc_feature (675)..(675): n is a, c, g, or t
  misc_feature (677)..(677): n is a, c, g, or t
  misc_feature (684)..(684): n is a, c, g, or t
agcggggggagctgccagagtaaagcaaagagaaaggaagcaggcccgttggaagtggttgtgacaaccccagcaatgtggagaagcctgtggcttgccctggctctctgtctcctcccatcgggaggaacagagagccaggaccaaagctccttatgtaagcaacccccagcctggagcataagagatcaagatccaatgctaaacttcaatggttcagtgactgtggttgctcttcttcaagccagctgatacctgtgcatactggaggcatctaaattagaagacctgcgagtgaaactgaagaaagaaggatattctaatatttcttatattggtggtaatcatcaaggaatctcttctcgattaaaatacacacatcttaagaataaggtttcagagcatattcctgtttatcaacaagaaganaaccnnacagatgtctggactcttttaaatggaagcaaagatgacttcctcatatatgatagatgtggcngtcttgtatatcatcgnggnttgctttttccttcctaactttcccatatgtagaagaagccattaagatngcttactgtganaaganatgtgganantgctctctcangactctnanagatgaagacttcngtaaacgtgtatctntggctactgtggatnnaanagntganantncntcgcctnattaccatcatgaacatcatcacaatcaaggacattaacaccttggcaggagtgaagtctcagagaatcagcaactagtagcaccaaatgctcgtacttaatcctgctcttccggccttattcacaccataagcacaagggtcagataagagggacccaagaa

SEQ ID NO: 647083 - DNA, 460 bp, Homo sapiens
gagccaaactgataatctcctcagactatgcctatggagccaccgggcacccaggcatcatcccaccacatgccactcttgtttttgatgtggagcttctaaaactggaatgacagaagtggcctcctcccttagctctgcacgtgggtaagagtacttaatggtgaaaggctctaactccctttgttgctcccttgttaggtccagggtttggtaaagacaagggcaagaagatactacatgtggccacttcccccctccccctccccttggtgttaatgtcagtgtaagagttgatcattccaagaacaggatggcatgtgtattgaaggagcttgtgggaatggcagatgttaaaactttttacatgtagcttattgagtttgagttgaagtctctagagtcacaggccaggttcatagtgctaacattttagactttcagaaataacaactctttc

SEQ ID NO: 647084 - DNA, 660 bp, Homo sapiens
atctccgcctgaaacgtgatgcagcagaagctttctatattgcgaacgatgaaataccttactttacttgcagctatgggaagggttaccaatctcaccgagtgccatggggacgatgtaatacagctcaagagacagctgctgccatctgagaatcttcatacaattgaagaatgcaaagacagggtacctgagcctcgggaggagaaactacttcaagacgaccagaataactgctgaaggctacaagtggagactctagacccatctattgcgcaatatgcatgttctcacttagtgctacaaagagaaggagacaatcttagcgtgtcgggcgcaccctcgaggcgtctgtagactagagcatgcttaggcattctgctcgaataggagctcctttgcacaattcgatgtatggctggtagaactcaatgtactggacagaggtatcatagaaagagaacgtattgccgtggcgtacacaactgaaacttctagagctatatcctacttaaggctgatggggaataccgtagagtgcccgaccgatttatctttaaacagattgcccaccccatatgttgaatggaaattttttgccaaataattggataactacgcgtaaatgtggcaaacctgtattttgtaaccaataggcaa

SEQ ID NO: 647085 - DNA, 692 bp, Homo sapiens
  misc_feature (429)..(429): n is a, c, g, or t
  misc_feature (434)..(435): n is a, c, g, or t
  misc_feature (499)..(499): n is a, c, g, or t
  misc_feature (516)..(516): n is a, c, g, or t
  misc_feature (519)..(519): n is a, c, g, or t
agcggggggagctgccagagtaaagcaaagagaaaggaagcaggcccgttggaagtggttgtgacaaccccagcaatgtggagaagcctgtggcttgccctggctctctgtctcctcccatcgggaggaacagagagccaggaccaaagctccttatgtaagcaacccccagcctggagcataagagatcaagatccaatgctaaacttcaatggttcagtgactgtggttgctcttcttcaagccagctgatacctgtgcatactggaggcatctaaattagaagacctgcgagtgaaactgaagaaagaaggatattctaatatttcttatattggtggtaatcatcaaggaatctcttctcgattaaaatacacacatcttaagaataaggtttcagagcatattcctgtttatcaacaagaaganaaccnnacagatgtctggactcttttaaatggaagcaaagatgacttcctcatatatgatagatgtggcngtcttgtatatcatcgnggnttgctttttccttcctaactttcccatatgtagaagaaccatttagagggcttactgtgggaatgtggaaactggctctttacgactctcggatgaggagctttggcgtgtatctggtggtactgtggatgtggggcatcagcaccctgggcagcgggtggctttggagaggg

SEQ ID NO: 647086 - DNA, 732 bp, Homo sapiens
  misc_feature (375)..(375): n is a, c, g, or t
  misc_feature (380)..(381): n is a, c, g, or t
  misc_feature (454)..(454): n is a, c, g, or t
  misc_feature (466)..(466): n is a, c, g, or t
  misc_feature (471)..(471): n is a, c, g, or t
  misc_feature (479)..(479): n is a, c, g, or t
  misc_feature (481)..(481): n is a, c, g, or t
  misc_feature (492)..(492): n is a, c, g, or t
  misc_feature (499)..(499): n is a, c, g, or t
  misc_feature (501)..(501): n is a, c, g, or t
  misc_feature (515)..(515): n is a, c, g, or t
  misc_feature (530)..(530): n is a, c, g, or t
  misc_feature (545)..(546): n is a, c, g, or t
  misc_feature (549)..(549): n is a, c, g, or t
  misc_feature (552)..(552): n is a, c, g, or t
  misc_feature (556)..(556): n is a, c, g, or t
  misc_feature (558)..(558): n is a, c, g, or t
  misc_feature (560)..(560): n is a, c, g, or t
  misc_feature (562)..(562): n is a, c, g, or t
  misc_feature (569)..(569): n is a, c, g, or t
agcggggggagctgccagagtaaagcaaagagaaaggaagcaggcccgttggaagtggttgtgacaaccccagcaatgtggagaagcctgtggcttgccctggctctctgtctcctcccatcgggaggaacagagagccaggaccaaagctccttatgtaagcaacccccagcctggagcataagagatcaagatccaatgctaaacttcaatggttcagtgactgtggttgctcttcttcaagccagctgatacctgtgcatactggaggcatctaaattagaagacctgcgagtaggaatctcttctcgattaaaatacacacatcttaagaataaggtttcagagcatattcctgtttatcaacaagaaganaaccnnacagatgtctggactcttttaaatggaagcaaagatgacttcctcatatatgatagaagaagccattaagatngcttactgtganaaganatgtgganantgctctctcangactctnanagatgaagacttcngtaaacgtgtatctntggctactgtggatnnaanagntganantncntcgcctnattaccatcatgaacatcatcacaatcaaggacattaacaccttggcaggagtgaagtctcagagaatcagcaactagtagcaccaaatgctcgtacttaatcctgctcttccggccttattcacaccataagcacaagggtcagataagagggacccaagaa

SEQ ID NO: 647087 - DNA, 1169 bp, Homo sapiens
  misc_feature (447)..(447): n is a, c, g, or t
gccagagacgcagccgcgctcccaccgacccacaccctaccgtcgccctcgattacgccatcttcatccgtggagccagtctcgcggcctagcggcagaccgcacacgagccactatctgcctacgcctccggtcagacagtggtccaccaaggttcacagagatctctacgttccgtccatacgcggcgaggaatagtatacgagcgagaacccggtggcaccgacgcaggccgggtccgcaggtcatctcagcacgggagtacttagcgttggacataacggtaccgaacacgcgacgaactcataacaggccgcatgagagacgaggcggacgatctggcgacccacgaggcacgcgtagacctagcgaaagccatactatacggcacatacaggtgcaacccacagtgagccgcgggcgggtaagtatatgagtccgaatggncaaggcgtaccagtacatggaccccgggtaagcgcggccataagcatgtgcagccaaagacagtgtgccaacgtgatggtgtttgcttagggccttacaccttggtcactagggccacatagccgagcctagtgataacatatacctatcgaccatttggtacgcagatagcggacagacattccttaacacggaacggcggcaggattatccaggagcaaagacccaaacgcgcgggcgcacctcaaggaccgcgatgcacacacggcttggcgacagacccttggacccaatatgctggacaggtcaccttggcacaattggaaaccgccggcacatattcacaggtccgcaaaacccttgaacccagttaccgaagctactaactgcggtttgcctggctgtatgacgccctggtggcaccaccacagtgcactcaaaagcttaacaggcgcactcctcttggacgtggggcgccactgtaataccccatccggaatgcgacaaaggcccatccaacaagggggggacccccaaaacggggaccacaacgccaacccgtgcagaccccagtgaggagctggcgaacccgcccgtaaccgccaagggagaacggcaggacatgggccggcagcgcaaacaatggcccacacccagcgagcaaacggcctgcgaacctcccaagaccgcacacccacaacaccgaacccaaacaaagaacc

SEQ ID NO: 647088 - DNA, 756 bp, Homo sapiens
  misc_feature (16)..(16): n is a, c, g, or t
  misc_feature (34)..(34): n is a, c, g, or t
  misc_feature (40)..(40): n is a, c, g, or t
  misc_feature (493)..(493): n is a, c, g, or t
  misc_feature (498)..(499): n is a, c, g, or t
  misc_feature (563)..(563): n is a, c, g, or t
  misc_feature (580)..(580): n is a, c, g, or t
  misc_feature (583)..(583): n is a, c, g, or t
cctggactcctttccncatcgacggcaatcgaangggccngcgccattgcggtcattcccgccaattgggccattatggccggtgggggaatttagaagggaagctttcccgttggaagtggttgtgacaaccccagcaatgtggagaagcctgtggcttgccctggctctctgtctcctcccatcgggaggaacagagagccaggaccaaagctccttatgtaagcaacccccagcctggagcataagagatcaagatccaatgctaaacttcaatggttcagtgactgtggttgctcttcttcaagccagctgatacctgtgcatactggaggcatctaaattagaagacctgcgagtgaaactgaagaaagaaggatattctaatatttcttatattggtggtaatcatcaaggaatctcttctcgattaaaatacacacatcttaagaataaggtttcagagcatattcctgtttatcaacaagaaganaaccnnacagatgtctggactcttttaaatggaagcaaagatgacttcctcatatatgatagatgtggcngtcttgtatatcatcgnggnttgctttttccttcctaactttcccatatgtagaagaaccatttagagggcttactgtgggaatgtggaaactggctctttacgactctcggatgaggagctttggcgtgtatctggtggtactgtggatgtggggcatcagcaccctgggcagcgggtggctttggagaggg

SEQ ID NO: 647089 - DNA, 311 bp, Homo sapiens
tagacaaggtgtgtgtcctgagcgtgagtattttggcagatgcagctcaaagtcatcagcagagtctccagcatccctctcatcctcttagcacactgatcaggatgtgatttcccagagagctcaaggcatgctgtcaccacgcaggcagaatgaaactcagccacaaagagaacgtcctgaagtttccttccctgtcatacatcttttcagataaaaagtcatgacaggagtcactgttttaaaattatccagatcacagttgtgatagagtcgctttaccaccctgaatggagtaagtctcgattgca

SEQ ID NO: 647090 - DNA, 483 bp, Homo sapiens
  misc_feature (11)..(11): n is a, c, g, or t
  misc_feature (54)..(54): n is a, c, g, or t
  misc_feature (158)..(158): n is a, c, g, or t
  misc_feature (210)..(210): n is a, c, g, or t
  misc_feature (255)..(255): n is a, c, g, or t
  misc_feature (300)..(300): n is a, c, g, or t
  misc_feature (349)..(349): n is a, c, g, or t
  misc_feature (374)..(374): n is a, c, g, or t
  misc_feature (381)..(381): n is a, c, g, or t
  misc_feature (405)..(405): n is a, c, g, or t
agggccgcagnaagaagactggtcgaaactccctggagctgagaaagcggtgtncaggcggaggaggagactaggaggctgcagcagctgcaggcgttgcaccggcaagcagtcctgccgccaggtggaggagctggctgccgaggtccagaggctcnggaccgaaaaccagcggcttcgtcaggagaaccagatgtggaaccgagaggntgcccgtctgtgatgaggagcgggtacctaggggtgcctcccagncctggtggacccaaggagaaggtcccatttcgtgcacactcaggnccagtctgggtctcaaggagggaggtggcagatgaaaaccaccgtcaanaccctgtgcggccctgagaaacagnctaaatnggttcagaactcccacctcaccgnttgccatagttgggctcttttgtgtcatcttacccttacagagaaattaaatggtcctggtgggaccaaaaaaaaaaa

SEQ ID NO: 647091 - DNA, 191 bp, Homo sapiens
tgagctccaggcaccccgaaggcacttactatgaaacaagttccaattgtgccatcgtagatctatcacagagtggatgacgtgtacatacattaacttattacctcatttagtaatttttcgaaacaaagccctgaggaagaaaatttaaaactagaggaagcattttggtcattctgtaaagctgcgta

SEQ ID NO: 647092 - DNA, 942 bp, Homo sapiens
cggaccgggaagttttcgggccgtatagtcggatccagcgcgttgcgcatgatgaacaggttgtagagtccaggtttacctattgctctctggaggaaactacactagtcataatcccacgctttatggccctaaatgtataatcatagttcccatcagtattcaggccaggagtggagaggccacatataccaagtatgaacgggtctagaaacatatactatggcagccaagaatttggaggttttaaaatggtgctcattctgtcctctgaggtcttccttgatcccgtttataccttcaatccttacttctgccagtctgtattatcctatcaagggtgaaagtgatgatggtggtgcaggagggtgacaataaaatcctagtggacattggagaccattggcagggcatggactcatacacgtcagtgtgacacactgacgtctcaccctgccatgttgacatcagtgtccattggcttgctcttgagcctgtactctacgcaagcatcggattggataagcccaaactctgcttctatggtagggcatgcggacaacctatatcagcatggtcaaagccttcttggagcatagattccaacttaactatccggctcctcacacccattacatttactctgacacacttaacttgtggctccttatctgcaactttaccgacatgactttccccataccctataatcccaattcagcacaactattagataggtcctcctttaactcggttggcccaagactctttcagccccaatcctttgcatcattcccttcaaattattcaggaggagttctcaaagaccaggaaacacggtaagcccagtattcccctcgtgcggtcgcgtgattgccctgtcgatatgactggggcaacttcttcccgagtcgtcttagtcaggcataaactttcatgata

SEQ ID NO: 647093 - DNA, 346 bp, Homo sapiens
gttatttgccttatttaagggaacccctacaaccccagaagtagaatgaatgtggaaatattccttcttctcttgccgagcatggtggctcacacctgtaatccccagcactttgggaggttgaggcagatggatcactgaatgtcaggagttcaagaccagcctggcaccaacatagtgaaatcctgtctctgctgaaaacacaaaaattagccaggtgtgttgcaggcgcctgtgatcccagctacttgagaggctgagacaggagaatcacatgaacctgggaggcgaaggttgcagtgagctgcgattgtgccattgcactctaggctaggtgacggtgcga

SEQ ID NO: 647094 - DNA, 390 bp, Homo sapiens
ggtgcgacatcccagctactcgggaggctgaggcaggagaatcgcttgaatccgggaggtggaggttgcagtgaaccgagatcatgctattgtactccagcctgggcgacaagagcagcctgggcgacaagagcaagactccatctccaaaaatatatatatatacacatagagagaaacgttatagtgaaaaaaggggcccgttacagcggctcatccccataatcccagcatttgggtggctgaggccagcggatcacttgagctcaggagttcaagaccagcctgggcgacatagcaaaaccctgtctctacaaaaaatacaaaaattagccgggcatggtggcacacttgtagtgccagctactggagaggttgaggtaggaggat

SEQ ID NO: 647095 - DNA, 371 bp, Homo sapiens
caatgtgaaaatgcagtatcttctttttctgccaccaaatgtataatataccatatacatacatgtatataaatatatatatactatctgcctttttataagtctaaacttttctacattagcttatatgtaaggcaggctacatttttatgtatgatttctttcattatagtaagatttttagttataatattgccagtctttatgatgaaaatcataaagatatgtatttttaaaagtcaatttgaaagactaacagactaacagtacctcatatagtcaacctcaatcatgtaagtaccccagatataacatttccacacaaagaaataagaatactttaaaaaggagaacatagtaagtatgtccac

SEQ ID NO: 647096 - DNA, 249 bp, Homo sapiens
  misc_feature (236)..(236): n is a, c, g, or t
ctctatatgaatatcaatattgtttaatttcaggacaaaggacatggtttaaaacgtttgttcagtgtatggttaaagaaagttaacctagaactagtggatattactttatatctaaatagagatcattatttcttttcaaaaaggatatgccagtgatgattatagtctttaacagcagtagcttgtgagagtattaaaatgtttcttcttttataattcattctacgttaaanaaaatgaattata

SEQ ID NO: 647097 - DNA, 399 bp, Homo sapiens
gaggaaaaaccccctgggatcgtgcactatagtgggcgacacgaaacccaagttttacatgtcagttgtcctctgggtggggggggaaatttcgggactttgaccaacctccaagagagaatatggcatgttctagtaacaaccttgtgctacccatgtcttctaggcatccccaatggattggacaattgccctaaagtccccaacccactacagacagacagggatgaggacggtgtgggagatgcttgcgacagctgccctgaaatgagcaatcctacccaggtacagggagatggtaaggacaggggagggatgagggtactgatggatgaagccccagccctttggatggaaagtggtcagatcaccctcttcagagttatcaagaggagatgg

SEQ ID NO: 647098 - DNA, 116 bp, Homo sapiens
cctgcagtgagctacctggcccgccagcacttcaagaagagaaagatccaggacctggccattcgctgtgtacaggaagaacatcaagaagaacaaaggggtgaagtgactggccc

SEQ ID NO: 647099 - DNA, 1056 bp, Homo sapiens
  misc_feature (1)..(1): n is a, c, g, or t
  misc_feature (502)..(503): n is a, c, g, or t
  misc_feature (533)..(533): n is a, c, g, or t
  misc_feature (549)..(550): n is a, c, g, or t
  misc_feature (579)..(579): n is a, c, g, or t
  misc_feature (597)..(597): n is a, c, g, or t
  misc_feature (604)..(604): n is a, c, g, or t
  misc_feature (609)..(609): n is a, c, g, or t
  misc_feature (630)..(630): n is a, c, g, or t
nttggccttttacccccccacacaccacggggcgccacactcgggaaaaaaggcccccccccagccacagcgcttttcacagcgttccctttgccctcttgtttccccctcttaaaaagggggcgcccaccccaggtgctttaatttcctctggtggttatgtgcctcttgtttttgttgccacacaaaggttgtgtgggggcccctctttagggcttctctcgcacactatctctgggcgttgtgtggctatgtcggtgatatgtcctggggacaagaagttttcacgagggaaaaccccttggagaaacgacgcttagcgcacttttttacctcttctcacgtgaaccactcttgtaataccactgctatacttgtcacaaagtaattttgagaccactctcaccacgccccaaagccctcgggaactctcttgtgaaaggtcctcctcacctctatctttctttctctctctctcaaactttccttaaagttctcatgnnccttgccactgcttctgtgaacacgtcttngtctcctccccccctnntggtgggaagtgcggggcagtcctggtcnagacactcatgccctggnatgtgcntgccngagaatgttgttgctaacccnccagtttcttgttgatttggagaggtcaaggccaggcccccacttggcttgaagggacattttcagacttttctttctgtcacttggagtgtctatgcctctcatatttccctaataaactcctccaactttttatctgactgctgtgattatggtgggggggggaaaaaaaaaaaaggggaggtctcaaaaaatgggttcccttattgcccagaaatgtaatacatggcgttattattctaacataaaactttcagatgtagctgtttgattcaaagcctaggtggcttaccagcccaagtccccatgtttggactttcagctgactagctcatcttgggaatcatttggtcattcagcacatttaccaagtatttactatgtaggcatgttaaactccaataaaacatacagcattgaatcaga

SEQ ID NO: 647100 - DNA, 394 bp, Homo sapiens
  misc_feature (92)..(92): n is a, c, g, or t
  misc_feature (215)..(215): n is a, c, g, or t
  misc_feature (286)..(286): n is a, c, g, or t
  misc_feature (326)..(326): n is a, c, g, or t
  misc_feature (328)..(328): n is a, c, g, or t
  misc_feature (346)..(346): n is a, c, g, or t
  misc_feature (383)..(383): n is a, c, g, or t
cccttggagaagaaaatgcccctgtgcctgtggcccccgaaaatgggccaagaagaccttggttcatttttcccacaggtctgtcctcctgnaacccagtggctcctctggtgccaacacccttaccacccttctgttccgctgaggtggtggggacccatggtctgtggaactgggaaacaggaacactgactcatgggtggacaggccttcancccaacacagggaggaggggtgacccctgggaagggtgggctgagggccctgtggcaaccggcttcttganacgttcccccgttccacaccttccctaacttcttctgatntntctccaataaaacccccntcattgagggccacgtgtgtactgtgcctgtggcggngaaaaaaaaaa

SEQ ID NO: 647101 - DNA, 392 bp, Homo sapiens
agagttcaacagatagacacccggacatgtgagacgcaagtatgctcacgagcacatatgtgaccgtcaaactcattacttacgttctggtatggacgcgttagcgtaaccacgcaatacctgagtgagttggaacccagcgagtgtggtgtgcctaatgtatgtactatcatggtacttactatgttgggcacaattgtaggtttctaaacgttaacaggaagcctgtgcctagtcttgagccagtaggatttacgcatccgtatgataagatctagattgtacacagataacaggtgaatcacctatgatatgaccgtcatacatactcaggtacaatactttaaccgagtgttctatacagctaagtactgctctcagatattacggac

SEQ ID NO: 647102 - DNA, 103 bp, Homo sapiens
gttttttatggggcccccccccccccccccccccgttttttttggttttgggcccccaaaagttggggttttgccctgggggttacccttttttttaagccca

SEQ ID NO: 647103 - DNA, 349 bp, Homo sapiens
attggcaccaaagcagcagctcgtattgccgcagttcctagcttcaccttccacgatgtttcccttggtcaaaagcgcactaaatcgtctcccaagttccgaagcattccagcaaacaatgccaagccagaccacccagaaccgtacacctgatttccatgacaaatacggtaatcctgtattagctagtggagccactttctgtattgttcacatgcaatatgtggaccaaagtggaatagaatggccctccccctgttggagagtccccaaggatggaggaatagtactacccccctggtgtatatgattgttaacaacctatattgtcgcaattaagcatttcccc

SEQ ID NO: 647104 - DNA, 469 bp, Homo sapiens
acctaatgctcgactacatgtcacagaaaacgaacgatggacacagaagtggatgagaatatttgttgaccttcatgggtttacagcctctgtctctaaacaaagtatggaaacaagtagagcttttattttgcttgtgtttgtgtttcgttttttttttggttttcccccactaaatagaaatgagggtccttagtcggtttcggacaatcggttaattccttaggacagcggtcttgggttggctttccagcaggcgtagtatatgtacgtcggagagcacatctgtatgcgacaactggataacatctttttttctagctatttggcattttttcttttaccatgtttcagtttctggcatgtagatttaaataaaaaacaaacctggtaaagtggtaccatttcacatggaattgcggcccaatcttcaccagcttcagaaatcggaccttggtcgagcatgtag

SEQ ID NO: 647105 - DNA, 104 bp, Homo sapiens
taacaagtaataggagtgcaaaaagtgaagaataatttttttacaaagataaggaaagctgtaaatttcactcgaaggtttaatatgccacactctgtctcagg

SEQ ID NO: 647106 - DNA, 932 bp, Homo sapiens
aaggaatacgtgcctttttcttaaatgctttcatttatgaaaaaaaaaaaaaattgcccccaaagcattatgcgggtcatgaacatgcttcaaaagtagtgggaggtatctacatgtgacacgcggtgataaaaaaaaaaaaaaaaaaaaaaaaaaaaaaaatgtgtttgtgggggccgccccgcgcgccccgcgagggaaaaaagtttttcagaacccccgtcgcgttggggggcgggcgggggcccccagagggtgttaggtggcacgatggtgcctcacgaccggttctccccaagagagaaaaccccggcgccggcgacatggcggcgtggtgtttcccccccaaaataaaaaaagcgcccggggggggacaccggaggggcgggtccgggaccaacacctccaggagtggagggttgccgacgagggcaccatacggggggttctatctcccaagcgagggggtccccaacgggggcgctccgaatatacctaaaatattaccgcgcccgcccggggggagaaacgataaaaatagcgacacaaacgacaacagacacagcaagataaaagacagaaacaaagagcaaacacagagcagtcgaagaagcgagacaacatccgggcacagacaacaagaaacaggaagaagagaagaggaagacgacgacagaaggagaccgcacagagaggggagaggagaggtagcacgggaggggagagcgggcgcacgacagagcacaagcgagaacgagaggagacagagggggcaaagagaggtgagggagatgggggacaggaggagacagggaaggagaagagaagaaggacgggaagacgagaagcacaaagagaaagagaggagagagacagagacgacacgagaagacgaacggcacgacgaggagaagagcagagggcggagaaaa

SEQ ID NO: 647107 - DNA, 748 bp, Homo sapiens
cgggaggccttcgtttccgtgtcacaccgtcgcttcaacccgcgtgatttgccccgtggggggcgacgtgcataaatggcgcgtttgcatgcgtgggcccccgacagaggaggtgcaacaggacgttggatactgcgcctagagaggggtgcgacttcacttgtgccctcgcattggtgaggcgcgtccgtatctagaacggaccgtgaaagacagtcttgttcggggcgaaatctgacggcagtgtgggaagatcacgagtcagaatggagctcctcaccgctggctgggggtccagcacaggcgtgtatctgcagagggtcccagatggaactgctggagtccaacgagatagcctctgggaaggcaggggtggggaagcgacagtgcatgtgagtggatggcatcactgactgtgtttatgcagcctgtacacacggagcgcatggccatggctttggaaaggagaatggataaaatagaagaaggtcggccgggcttggtggcttatgcctgtaaccccagcactttgggaggccgaggtgggcggatcacctgaggtcaggagttcgggaccagcctggcaaacaccccatctctactaagcagaaaacccatctctactaaaattacaaaaattagctgggcatgattgcgcatgcctgtaatcccagctactttggaggctgaggtggggagaattgcttgaacctgggaggtggagatacagcgagggaagtcgtgacaa

SEQ ID NO: 647108 - DNA, 133 bp, Homo sapiens
tgtgtgtctggttcatcttgagtccatgtgacacgaccggtcagatgcccggctccagtacggactcctgattttaggtgctgctgtctctgtccttctacaggaggtgtaccgcttagactactacaagcag

SEQ ID NO: 647109 - DNA, 130 bp, Homo sapiens
gtccattacgggcgttgttcttggattcccgttggttaactttaaggggaaatttttcacaatttcccgggagcccctttgagatgcatgcaatgtgaggggagggaggagtgtccttaagttcccttgc

SEQ ID NO: 647110 - DNA, 399 bp, Homo sapiens
  misc_feature (34)..(34): n is a, c, g, or t
  misc_feature (230)..(230): n is a, c, g, or t
  misc_feature (248)..(248): n is a, c, g, or t
  misc_feature (316)..(316): n is a, c, g, or t
  misc_feature (357)..(357): n is a, c, g, or t
  misc_feature (366)..(366): n is a, c, g, or t
gggatggaatctcgctctgtcgcccaggctggantgcagtggcgcgatctcagctcactgcaacccccgcctcccaggctcaagcaattctcctgcctcagccttctgagtagctgggactacaggtacccaccaccacgcctggcttatttttgttatttttaatagagacaaggtttcacagcattagccaggatggtctcgatctcctgacctcgtgatctgcccgncttggcctcccaaagtgntgggattacaggcgtgacacccacgcctggccttaaaggtattacattcttaatgaaacttaactctnccaaggatcataggtatataataaaaaaataaaggaaatgncagttgtanggctttgtttaagaccagtttagtctttaaatc

SEQ ID NO: 647111 - DNA, 115 bp, Homo sapiens
gataatttacgtgcggccgcgcgctgattggcgtccagcaaggtttgccacggcgcgtcggcagtgagcgcctggcgctgatacagtgcgaaatctttaccggcggcgtagcttt

SEQ ID NO: 647112 - DNA, 92 bp, Homo sapiens
catggatttgctggtgcagtacaactaggcttaatagggactcgaattcgaggctcgaattcgagctcgaattcgaggttagtataagtaaa

SEQ ID NO: 647113 - DNA, 205 bp, Homo sapiens
gcccctgctggtggggaactcaagaagaagtatgcccaggggttcctggcttaaaaaattcccacagcaggatcacaccaccaccactgactcggagatggaggagcctatctgcaagaatccaaagaggagggtgctcccctacaaactacaagtagtgagctctagtggcctgggtatgacttttgccttaataagttacaat

SEQ ID NO: 647114 - DNA, 909 bp, Homo sapiens
atcccagcactttgggaggccgaggtgggtggatcacttgaggtcaggagtttgggaccagcctggccaacatggtaaaagcccgtctctactaaaaatacaaaaattagtggggcttggtggcaggtgcctgtaatcccagctaattgggagacttgaagcaggagaattgcttgaacccgggaggcagaggttgcagtgagccgagatcacgccactgcactcttgacctgggccacagagtgagactcagtctcaaaacaaaaacaaaaacaaaaaaaacaaaaaacccagttccttaaatagataaccatactgaaaaaaaaaggactattataaagagaattaagagaaatattaaacaaatgcaatatacagacatgtttgaatcctgactctagcaaaccaaccataagatattttgagggggaggaaaaaaagaacatagactattagaggatacactaaattatgttatcttgttgaagtggtaaagatattatagttttaatatgtatcttgtagaggcatatactgaaatattttcgaagaaaatgacatgcttacaaatttggttggaaatactccgatcataaacagcaaacaaacagcaaagcggggaacgagcttacacacgaacagtattaaagtacttgtgtttgggccttgaacaggtcctcctccgtcacccagggtgggttcctctcacagaaccaacacaacaaacaaaaaagttgtcgggggccggcgccaagaatctataccttgtgggggggccaggagagtaaacgtcagggtcagagatcgggcagatgggggccccacaaccgggccgcggaaccaggcgggccgatcacgcacgcaccccacggggccacggggggaaaagaataagcattagacaacagg

SEQ ID NO: 647115 - DNA, 862 bp, Homo sapiens
ggccgagagaagcagtagtcaataaaggagagtgccgtattgtcgcagcattggcagctgagctggtggctgccacgaaggatagcgaagcgaactggacaactgaagagtggaaatcaggaaaacggtagatggaaagacacgaaacgcactgaaaagaaacaaagacgttgagataacacagaaagcggtcaccgacgttaccacaggtgcttgcagcatattgctgaagcaagtgcgacttctggtcttgcggcgatgcaaatcttcacaaggcatagatttcttccgagaacagatagaagaaatctagagatggatatgttgatatatcactacttgtgtcttttaacaacaaatgaagaaacttgactactgatgtggacgttaattgccagagcattgacgaagttcagctgttgtagagcttgactttggaacggcaccatgaattccggtaggaacaataacctctgtggggaacagaccaaacggatgaggactgaagcgcacagtgtatgtggagttacttcccaaaaatgttcatcacagctggattcgaaagagtatgttgggaaatgtggcaatgtggtctatatcagtataccagattataagtctactggagatcctagaagggattcgcggtcgctggaatttgacaccaacaagaaacaagcaagctaataagccatgagtttcttaatcaacccaccagaagaaagcgaccaagcacaactggggatattccctagaacagtgaaacataagccattccagcttaagagtgtgggaagagaagaacacgaaacggagatgaaggccgatgacaggggacgacaatatcaaggcaagaaaaaca

SEQ ID NO: 647116 - DNA, 278 bp, Homo sapiens
tggagagggggtctcactcgcgcccaggcgggagtggagggaggggggcgatctcgactcacggcaacctccacctcccaggttcaagcaattcggggcctcagcctcccaagtagcggggatcacaggcgtccacgaccaggccgggctaatgttggtattttaagtaagaggatgggggtttcaccatgctggggcccgggtgggtcttggaactcctggacctgcgtgattcacctaaccttaagcctaaccagaggggctgggagatgacgggc

SEQ ID NO: 647117 - DNA, 286 bp, Homo sapiens
tgaactagacatagacacaaatactcatagacataaacatgggacaaaaacagacacaggcacaggcaattcaacagacaaaaatatggccgggtgcagtggctcacacctgtaatcccagcactttgggaggccaagtggggagatcatctgaggtcaggagttcgagatcagcctggctaacatggtgaaaccccgtctctactaaaaatacaaaattagccaggcgtggtggcacatgcctgtaatcccagctattcaggaagctgaggtgggaggagaggaa

SEQ ID NO: 647118 - DNA, 354 bp, Homo sapiens
  misc_feature (123)..(123): n is a, c, g, or t
  misc_feature (126)..(126): n is a, c, g, or t
gagaaggatttgacagcccccttctccaaggaaggggtgagtacaaagggggccatgggccgctgccgcaaagaccccctgaggggcctgttgttcctgccaagggcaatggaggggtaccgntgntaccgttccgcctcccccaccgtcccgggttccctttgttgacacgggccaaggagccagtggggaagtgggtgtgttgggccaggtaggataagtaccccttttgcctcagagaagcttaatcccaggcagggggttttccctttgtccaacccctgttttattattttactaacagggggagggggtccctcccctaaccttggggcctgatccatccccagacca

SEQ ID NO: 647119 - DNA, 469 bp, Homo sapiens
tttccattttttagccatgggagctcggatgttaaatgcagccgtattcacaacatatatgatggtatcacagggtgcatcgctttgctgcctgcttggataaagacagtgggatatatatatgcaccatggtatactttgtctgctcaaaagggaagttgtgacctttgcaactggaggcgttatatgcctatagcatctagacttgcatcaacctggatttcaccctatttggctatgcatggatccttaaagcttgtccttcaggacttttttactttggctgtgggttgatacataacacctttgagttgaactttagttgacttgatctcgcggttcacttgctcaacgcgagcatattctatattgtaaagaatctccttttttgcaagtgtgcatatatttgcctggaaagttaatgtgtcaactttaaactttttgaaccacgtatgtatactcgctatcc

SEQ ID NO: 647120 - DNA, 519 bp, Homo sapiens
  misc_feature (11)..(11): n is a, c, g, or t
  misc_feature (63)..(63): n is a, c, g, or t
  misc_feature (84)..(84): n is a, c, g, or t
  misc_feature (98)..(98): n is a, c, g, or t
  misc_feature (109)..(109): n is a, c, g, or t
  misc_feature (119)..(119): n is a, c, g, or t
  misc_feature (144)..(144): n is a, c, g, or t
  misc_feature (153)..(153): n is a, c, g, or t
  misc_feature (155)..(155): n is a, c, g, or t
  misc_feature (169)..(171): n is a, c, g, or t
  misc_feature (177)..(179): n is a, c, g, or t
  misc_feature (186)..(188): n is a, c, g, or t
  misc_feature (196)..(197): n is a, c, g, or t
  misc_feature (199)..(199): n is a, c, g, or t
  misc_feature (205)..(205): n is a, c, g, or t
  misc_feature (210)..(210): n is a, c, g, or t
  misc_feature (217)..(217): n is a, c, g, or t
  misc_feature (250)..(250): n is a, c, g, or t
  misc_feature (259)..(259): n is a, c, g, or t
  misc_feature (270)..(270): n is a, c, g, or t
  misc_feature (303)..(303): n is a, c, g, or t
  misc_feature (340)..(340): n is a, c, g, or t
  misc_feature (429)..(430): n is a, c, g, or t
  misc_feature (432)..(432): n is a, c, g, or t
  misc_feature (448)..(448): n is a, c, g, or t
  misc_feature (498)..(498): n is a, c, g, or t
gtccacaaaanattctcctttccttctgaaggttttatgatgcattgttattattaaccagtnttttattactaaatttaaatngtcaattgatacanacagttctganaccgttcttncaccactgattaagagtggggtggnaggtattangnataatatttatttnnntttttnnnttttttnnnttgatttnntnattttnttagnttaagtngcttttttgttcactgctttgatgatacccacngcaactgtntgtttcatatnacgaacagcaaagcgacccaaaggtggatagtntgagaagctctcaacacacatgggcttgctaggaacnatatcaacaatggcagcatcaccagacttcaagaatttagggccatcttccagctttttaccagaacggcgatcaatcttttccttcanntnagcaaacttgcatggnatgtgagttgtgtggcaatctaatataggggcatagttggtgcttatttngtctggatggttcaggataat

SEQ ID NO: 647121 - DNA, 852 bp, Homo sapiens
  misc_feature (194)..(194): n is a, c, g, or t
gccaccagccacgtgccgagcatgtcagcgacgtgaggtgtcccttctcgttgagaatattgtaactttggtttcgctctatgttcttcctttgtgaagagacgtgactggagtgagtaaagatggaaagtgctgtgaacactgatactggcgctcacagctgtccatcctgaccatcgcctcggctcccgaantccacgtccctgccgtgggccgtgtgcatgtcaggacccgtcagtcaggttcgtatacccgtctgtggctccccttgcattcagctaccgtcccaccaccatagttcaccagagttcaccatgacagcggcctccagaatagccatagacatgatcctgagctgttctctaggtgcttggatgcttgacctatcctggaacaccctggaagaaaaaggagcgcagggtgggccctcggccctgatgcaggagggtgcgatagcggacgtggccaggcaggaggggccgggttcaggagctgagcaggggatgcctgtgcgtggtgcctgggtctagggaagctccagccccaggatggggctgccctgcacaccggtgcccgccacatgccaaccctctactccccgaggactggatgatgtgctgccacgtgtgactcgtctcccttgtctgccctgtgtgaccctcagtctttggccagccatgcatgcgcccgaagctcgtgcagtttgtacgtgaaggtgcttctcctccctggcaccattgctcatcactctggcctttggccatgctccctggtcaccccacttcccggtccggcggctgcaggcactccttggagcaggcttggggccttcagccactgtgctcgtcccac

SEQ ID NO: 647122 - DNA, 912 bp, Homo sapiens
ggcggccgctcgggcaggatggcggcggccgggtgggcgcggccacggcgcggggggcccgggcgcagcggagcagcatgtggtggggcgcgcgagggggctgtcggttggcggcgcttgtgcctgcgtgtggtacggcgctgagcgcgggcgggcaacgtgttgtccaaccaggggtggattcctggagcggcttacccgggtcccgggtggacccgtggtcggttgtttgcccaagtttcctggcttctgtgccggctggggctccccgggcccggtttggttgcgccgctgttaggcgttctggttgcccccccgggtgcgccatgacctgttttggggaggccccgggagtacccacaagggtccgcagtatttcccggtacgggtaccgggcccacggtttggtttggccggcgcggaggttttttataacccccgggggcggcttaagggtgtggccaaccggggttcgcggcttttttgcgggggagagtggtaacttcccgggggtcacgtggtatcagggccgcaccttgttcaacgccttctcctggggaaaagcggttcccccactgtgtgaccctttgattgggaccagcaacaccgcgtggtaagtagtggcgccgaaccggggtggctcccaagaggcctttgggtttagagccgaatgtgcggccccttccataggagaaaggacgcgcggattattaacccccaaaaggacgggagaagaaggtcgccgcggccgcaaaatattttggttccaattttccccaaagggcgtattaacattcatgggcagagggcttggcttttactttgaagaaggcacaccttaaattggggtggatctctctgggggggacagacaaaattctccttttaaccccattcaggggatattcggcg

SEQ ID NO: 647123 - DNA, 340 bp, Homo sapiens
  misc_feature (29)..(29): n is a, c, g, or t
  misc_feature (162)..(162): n is a, c, g, or t
  misc_feature (170)..(170): n is a, c, g, or t
  misc_feature (239)..(239): n is a, c, g, or t
  misc_feature (325)..(325): n is a, c, g, or t
tttttttttgagacagagtttcgctcgtnacccaggctggagtacagtggcgcgagcttggcttactgcaacctccgcctcccaggttcaagtgattctcctgcctcagcctactaagtagctgggattacaggcactcaccaccacacctggctaattttnctattttnagtagaaatggggtttcaccatgttggccaggctggtctcaaactcttgacctcaggtgatccaaccgncttggcctcccaaagtgctgggattataggcatgagccactgcacctgggcttctctactgttctcggcctgtttttaaacaaagnctacatttctttttt

SEQ ID NO: 647124 - DNA, 699 bp, Homo sapiens
ggggattcaaagtgtgatgactcggatggggggtcccttggagagatcccacttgttaagtcagaaattaaaaagaatctgttgtattaaacctgatcaaaaataactgtagggccgagtcacaaatctggtactgaaatggcgacctatgctactcaaagtgccctttttggctctagacggggcaggaaagaggaagacagaccttctttgagaggattccttctggatggagattcttttgataattgctcccttgccacactattaccaagattgcatagtgctatgaagctatggttcaggtgaagaaatagctaaattttttagttcatgaagctacgtctctcatggctactatcatacatttgggaaaatcatctcttcctaataagccacttactggtgataatgtggatcgaatttacctgtgcctgaaggttttgtctgcatgttcacctttaatgcctgacattctcaataaagtatgcagacagtccgttcctcacatgttatctgctaaactggaagagagaacttatcccaaagaaataattggtaagaggaatgtgacagtcaggctgagaccccatttgcttcagcaattaccgttaaaatgcaaggactgcccggcaatttacgctgagttactggccccctgggcaacccccgtggaagaggggggcaatccctaaagcc

SEQ ID NO: 647125 - DNA, 346 bp, Homo sapiens
actagtccacggttggctgggttggggctcatgcctgtaattccagagccttgggaggcaaggtgggtggatcacctgaggtcaggagttcaagaccagcctgggcaacatggcgaaaccccgtctccactaaaaatacaaaaaaatcagccgggcatggtggtgaacacctgtagtcccagcttctcggaaggctgaggcaggagcatctcttgagccaaggaggtcgaggctgcagtgagctgagattgcgccactgcactccagcctgggtgacagagtgagatcctgtccccactcccttctgcaaaaaaaatcgtagccaaccgtggactagtgggtaccg

SEQ ID NO: 647126 - DNA, 136 bp, Homo sapiens
  misc_feature (33)..(33): n is a, c, g, or t
  misc_feature (41)..(41): n is a, c, g, or t
gtcaggaaaaaagtagctggtgctttttgcaanaagagaanaagccatttgttttaagagaatacccattactttttaagaaaaaagtttgtacaggttctggtaattttatagtgaacaaaaaatttcttaacgt

SEQ ID NO: 647127 - DNA, 1278 bp, Homo sapiens
gttcatcaaacctttttggggggggtagcaagaagattctacatctgttcccacctctactgtgttgggaaagtaataagtcggttttcccccaccgctattttaggaaaccacactggcgggactcacagagttgttattacacgacgtccccaactactgtggttgtaatggggttttcaacccacatctctgggtgttaattcatcgcagaaatctttctttgcctctcttttgcgcgcgggccgggcggcgcgtttttttcaccacagcagaatatgattgtttgtttgatgatttgttaaacatagtgttcttttcttgcgacgaatcaacactgttaaatcctcagtaataattctttttgacacacatgtttttgtgcttcgttgtccctccttcctatactcccccttctcgcgaagattttttgaaggactcccctcttttctagatgaacccctcggaaatgttatactccttctcccacaaatttgttcagagcgaaagtgtctttttggggggtttcaaaatgttttatgctcccgtttctcctttttaccttttgagtgttcgggatttctggggggggaggccccctttggcgcgtgtcctgctccgcagttggtccccccgcccctccctctccccggtttgaccccgtcttgcgccctttgtgaaagtgatgagttcacagttttcaccccgcacaaatgtctggagacacctctcccgcgtgtttctcgtgtccctcgggggccacccacaggggacctctctgagaggacctctctcttgttgtggcctcttcttttgttttttcacatccctcgtggcttttttctaaatggaactttcacggaaattttgtaatcttcactaaactttctccaagctccacccacacttcctaaattcttaagaaactttataattgaccacgctttcacattgaaaggtgctgggttgtagagcttaacaccccacgtgagaagcccacgccactcactgagcacaatccctgaaatgttttcttatagagaaatgagtgctggtcactcgcacggttcagcactctcctgttttttgaatgcttggctccctctgctgatttcacgtttcctggcttttcctccctcagccccttttcaccccctttgctgtcctgtgtagtgaatttggtgaggaaattcgttgctgcacccttcccccagccccctttatgagtctccagattttattattgccataaaagtgctttatgccggcttttttcca

SEQ ID NO: 647128 - DNA, 307 bp, Homo sapiens
cacgctttctccctctttctcccatgaccccaaagccaagggcaacagatcagaaaagaaggtggtcagagtagacccctgaagtattttataatcctacctcaaaattaaacagtaacctgagagatttaacataatctagtccatggaatcatggtatgtgggtcagggataaatggcacacctgggaatccgcttcctaaaggaaatcaaatgaatgggaggaacttcccgaccaccacttaactggtgtcatatagccaatataactatctctactaaatggtgctgggggtaccggagctcg

SEQ ID NO: 647129 - DNA, 662 bp, Homo sapiens
  misc_feature (200)..(200): n is a, c, g, or t
gtgatgtgattatcataccttcaggccctggagctatggtgtcagcagagatgacaatgtggagcgcgcctgagggagatgtggagcacgatagtgccgacaacgttgagagacatagtttaacgcagatcaagaatggtgaggctcgcgagatattgctcgcataagctgtgagggaacgtgctgcgaatgagtgaganggagatggatactcggtgtaatggcggagaagaattagccacgattgggcacgactgatgtcagagagcagacgtgtgatgagcgagagctggatcggatcatggtgcctcgacgtcgcactgtcctcgtcatagaaaaccggcctgtcagtaccatatgcttagtctgaattcttactacctatcgtggtgagatacctaggcagatcgagaatgaatcaggtgacggaacaacatagtcagggcagcattgtgctggcatcgtgtgaggagcgaggcgctcataggacgatttgatgtggagatcaaagtgtggcctgtggtcatagagcttgatggtccctagatagcgaatgcatgagtgtgaaaacatgaagctgtggctataatgtgcgaaattggttcccatgggtgggaaggatatgacagagcgtcttatgctccctaggttcgtgagatggg

SEQ ID NO: 647130 - DNA, 391 bp, Homo sapiens
  misc_feature (72)..(72): n is a, c, g, or t
  misc_feature (82)..(82): n is a, c, g, or t
  misc_feature (100)..(100): n is a, c, g, or t
  misc_feature (253)..(253): n is a, c, g, or t
  misc_feature (269)..(269): n is a, c, g, or t
actctagagatccctacgtctataaagcgtaaagacagaatcataaagcagaaatttaaagcatagatgggnggagaaattnaagggatgatataaatanggtggtgggtgcagtgagagccaacatcccttctagaatattgagcttataggaagtgggttagagaagatgggagaccagttcacaaggacatttgattctttggtagggagtttagatttgaattagtaatcaggtaaaacaacacacatncacactcacacatgcncacacacatacacacacagaaaaagagacagatttatacacagtactccaagcccttgatctctgcctccttggcaaacaggattatttatatgaagattattctgatggttattttttaaa

SEQ ID NO: 647131 - DNA, 387 bp, Homo sapiens
  misc_feature (14)..(14): n is a, c, g, or t
  misc_feature (69)..(69): n is a, c, g, or t
  misc_feature (128)..(128): n is a, c, g, or t
  misc_feature (162)..(162): n is a, c, g, or t
  misc_feature (211)..(211): n is a, c, g, or t
  misc_feature (225)..(225): n is a, c, g, or t
  misc_feature (232)..(232): n is a, c, g, or t
  misc_feature (263)..(263): n is a, c, g, or t
  misc_feature (268)..(268): n is a, c, g, or t
  misc_feature (326)..(326): n is a, c, g, or t
  misc_feature (355)..(355): n is a, c, g, or t
tttttgtttgaganctctgattactgtctttccattctctcttgttggtgttgcaatttccactttttnagcagagagtttactaacatccatggtcttatttagtactttgatagctaaagcaagtnctgacttcaaggtcatttctccttttttatagtnttgtttcaaaattgaaacagctgcagcgctattatttccaatgcatgtngccttccatccccngtaattnccactagggtcactctgatagagctgaaagnatagnggttatgggagggaatgtagaggaatgaaaaaccaaagggaggttttcctccaaattntgtataagcttgtttgatatcacacagcnctctaaccaactcctcacaacccattccctcc

SEQ ID NO: 647132 - DNA, 373 bp, Homo sapiens
aattcattgccatctgcagaaacacttgacagctttgggattttgcttaaactttgataatctggatcctaagactgttgcctttaaatagcagagcagcctacctggaggctaactatgggcagcgggctggcccctggtgtgagcattataccaactacagtgcctgattggtataaccttatgcgctttcctacgcaatggaattggaggccgggcgcagtggctaacgcctgtaattccaccactatgggaggcctaggcgggcggatcacctgacgtcaagagctcaagaccagcctgacctacatggtgaaaccccatctctactaaaggtacaataatggaccacgtgtgatggtgcatgcctgtg

SEQ ID NO: 647133 - DNA, 362 bp, Homo sapiens
gcgattgcattttccttttgctctggagtttcactccccttctgggtcccaagggcccaatggcctgacttttagaattgcttgcaattggtgttttctcttgaatttgggggctgccatttaaagccaggtttccatgagctgaagaccagccattcaaagccaggtttccatgagctgaagaccagccattcaagaatctgaaaagtagacaagaggactccagttgcctcaggttggttctgctgtgctctggaaagtaactgcagccaccaggtatgaaaaggagcctggtggggagaccactgcacccaaaacaaatcctttcttcttctgagaatgtgactttttctggtgttgta

SEQ ID NO: 647134 - DNA, 492 bp, Homo sapiens
cagtgtgtgaacagtgggaaacgattagtagtcaaaataagtgtatatgaactactagatctcagaatcaaccccatgctgggtctgaggcacacatctccgagttactgtcttctgtgctgtcctctgcaggacttgggctggtagcaatgaatcaacatatgtgtgaatggctgcaatgagctggtcaataattatcattcactgttttgacaaatgtgtgttgagtgcctactataggcctggtgccaaccttagaaacatgaatccagccaaggagaaataatcaaggcaggcctgttctgttagatggagtgatcagggaagtttctctgaatagatgagatttgagcagagacctcagtgaggagtgggagtgagccacagaaatatcccgaaagaggcatctaagcagagggaataatcagagtaaaggccaaggctgtcagggtctgctaagagctgattgagacattgcaacacggtctctca

SEQ ID NO: 647135 - DNA, 188 bp, Homo sapiens
aaagcacagaggagggaacacgaaggctgggagggggcatctatggcccccactaacatctccctatttctgcatcctggatgaccgtcagacaagagatgagtcggggagaccctctcctggagttctagccccctccactgtgctgtccacctcctctgtgctgtccacctcctctgtgctgtcca

SEQ ID NO: 647136 - DNA, 927 bp, Homo sapiens
cgctgcgcgccccatgggccggctccgttgagggaagggaagccctgcccggtggcggctggggtctggctgctgggagtgaggtggtgtggctggttctggacgtgggttgagtgctgtagcagtgactccagtgtgagtgcctgaggaccactctggccctcgccgctgtgccctgtggcgtcgctgcctgagggtgcctatttacatccctgacatgcttgcggtctgacgtcgtctgcgtgcctggtcagtgaccatgtcggcgttctggcccctcggccggcgatagagttgcgtgctaaaatgataaggactgcccagttacatttgcatcgtagataacagaaagagcatctagtataagcatgtccgaaatgttgcgtgggatgtatggcatactaaaaccttattcgtggcctgtcttgaaatccaaatggagctgggtattctgtgtttttatttgctaaatctgtgcatgcctgtaccctgctgtgtcccctggtgcagggacgggatgcatgctgtggctcgtgcatgaccctgccggcgtctggggggcctgcgaaggtggaggggagacgggcatgccggtgcagtgtgcctggtgttccccggagctcggaccggttggactggactccgacgctaccggtccctctgctgaactattccggatgtaaaacactagggatcggagtttatcttggttttttaatctcatactagtgacccgagaagctttgctggcaggtgcgcttgatcttgtgtgaattaggccaatttattgtgacctcttcagtaaacactgtactaacctggttgaaactgcttttcttaggcattttctttaaaagcttggtgggttaagaagcacgggaattacgaggtcagaattccaatacttgggctctaatcacgtatacg

SEQ ID NO: 647137 - DNA, 457 bp, Homo sapiens
ccccgctctttttgacgacagtctcatttctgttgccatataacgccaccgctcctctggaactcctgcacctcagtgtgaccctacactcacctcattcctcccaaagtgtttggattacaggcataagccaccacaccctacctctacatattttttaaaatcagcctttacctatttacagtacctcacatcttatacaaactttatttgtcatagataacacttacctactggaaacaatctcaatatgtctcttatctgggggtatagtataaactaaactgtgatgcacccttacaacggattacaattctgccctatggaacgagccacctatgcacacagcaatctgcgttcatattgaagccgcactgattgaaatgcactgcgccatatgcagcccgatccaaaaggccacgtactgtattactgcacttttctaccttctggaaaa

SEQ ID NO: 647138 - DNA, 265 bp, Homo sapiens
acaggtcggacaaaggggcgttagatgatgatgacagcggacccaggtttcgccagcaaacaggaaaacaaggcttggtggaagggacaaggtggtgtgtcccctgttccctattgcatctcactgggacttcctgctcatcatagtacccagtgagcccacgcgactcctcctagactgggtcacgcacttctagacgacaccttccggaatacgtctgggaacatggtcaaggtggacaggggctcccctagagacgggtggg

SEQ ID NO: 647139 - DNA, 791 bp, Homo sapiens
  misc_feature (143)..(143): n is a, c, g, or t
  misc_feature (610)..(610): n is a, c, g, or t
  misc_feature (661)..(662): n is a, c, g, or t
  misc_feature (690)..(690): n is a, c, g, or t
agcggattattgttccatctcaggggcactgagcggcaactccaagtcccggatccgtgcagctcgttggccagtcactgctccacacagctttgccttctgggccagaggtctcaatagggccttccagcaccgccattttngtcgccctgccttgcccgccaccgaaagattccacgtcctaggtggcctggcgagtgtttgctgccgtccagccgatatgagtcgaagagtccagactcggggaggctactggggccatcagggcgtggagcctgcggggtctgttgcttctaggcctggactgggccagtgggtgcagccatccctgggcctcagctgatacaggttcctggggcacaggccttgcccactctggagctctatgcagcaattttgtcattttttcttgtttttaataaacgacagcaaaaataacacaatcaggctgaagttactagcattatataaccctgcgtttctttttattctttttttttcttttttttgagacggagtctcgctcttttgccaggctggagtgcagtggtgcaatctcggctcactgcaacctctgcctccggaattcaagcgattctcctgcctcagnctcccaagtagctgggactacaagcacaagccaccatgcccagctaatttnngtatctagagagagggtttcaccatgtnggccaggatggtctcaatctcttgacctcgtgatccgctgcttggtctccaaagtgctgggattacaggcaggagccaccatgcctggcataaccctgtgg

SEQ ID NO: 647140 - DNA, 782 bp, Homo sapiens
ttccacactgtggaagctttgttctttcactctttgcaataaatcttgctactgttcactctttgggtccacactgcttttatgagctataacactcaccgcaaaggtctgcagcttcactcctgaagccagcgagaccacaagcccactgggaggaacgaacaactccaggcgcgcaatgaacaactccaggcgcgccgccttaagagctgtaacactcaccgcgaaggtctgcagtttcactcctaagccagcgagaccacgaacccaccagaaggaagaaactccaaacacatctgaacattagaaggaacaaactccagatgcgccaccttaagagctgtaacactcaccgcgagggtccacggcttcattcttgaagtcagtgagagaccaagaacccaccaattccggacacattttggcgaccatgaagggactttcgcctattgccaagcggtgagacaatcgctgagcagtgagaccatcacctattgccgagcggtgagaccattgcctatcgccaagcaaatcgaggccatcaagctacagatggtcttacaaatggaaccccaaatgagttcaactaacaacttctaccgaggacccctggactgaccagctggcacttcccctggcctagagagttcccctctgaaggacactacaactgcaaagccccttcttcgcccctatccagcaggaagtagctagagcagtcatcggccaaattccaacagcagttggggtgtcctgttgattgaggggtgacagcatgctgc

SEQ ID NO: 647141 - DNA, 422 bp, Homo sapiens
  misc_feature (4)..(4): n is a, c, g, or t
  misc_feature (33)..(33): n is a, c, g, or t
  misc_feature (39)..(39): n is a, c, g, or t
  misc_feature (68)..(69): n is a, c, g, or t
gganggacgatggtcaaggtacatgtctcctcncctctnactctgggaatgagatttttcgggggggnncaggcttgaactctccttataggagtgtctccacatgccaaaatcagaggaagtcagaataaaacctcccaaggctgaaaactagagctggcacgtagtacatggtcagtaaatgtttttaggtggctggatgagtgaaggaatgagtgagtgagtgaatccaggatcgatctggaaacacagcagggctcagcactcttggtgctaagtgccagtctcagtcctcttgtggtgtgtaacaccacagagaacaagccaggctcttgtgcttcacccaatgtgtgcacacccatgctcacaaacacaaacacactgcacgcacacgcacaattgcacaaggctgcatatgaggg

SEQ ID NO: 647142 - DNA, 434 bp, Homo sapiens
cttaggttgacccacctcggctcccaaagtgcggggattacagacgtgagccaccgcccccggcctctctaacatttcttttggttctttttatagtttccatttctctgcttacattgcctacctgttcttgcatgctgtctactttatccagagcatctggttctgatgcttgctttgcctcttcaaactatgtttttttgccttttagtatactttgtaattttttcttgatagccaggcatgatgttttgggctaaagaaactactgtaaataggactttagtaatgtggtggcaaggtgtggagggaaaggaagcattctacagtccgataattaggtctcagtcttttagtgagcctatgtctctggactgtgaacttcacaggtgcttctcagtctccccctctccttaggtgggtcagaacatcag

SEQ ID NO: 647143 - DNA, 212 bp, Homo sapiens
aacggcacccctcagctatgatcacgcctccttccagtccatgggcttctcgccacacttctgcagccactcattggtcttatgacaagtgtctacatcctacagaacctctctcttacactgacaaatggggaagacatgagtcccgtctgtagatacatctgtgcccgctatcctagtcaagtcggcacttgccctatctatctagacgc

SEQ ID NO: 647144 - DNA, 149 bp, Homo sapiens
acgagctgaacacgccgcttaccgcgatcctcaatgcgatcaccatgctcgaggagcgtttcaccgccgagaaggaatatattcccatgttgcgccggaacgccgagcggctgcggaaaacggtggagaacctgctcgaaatttcgcgc

SEQ ID NO: 647145 - DNA, 137 bp, Homo sapiens
  misc_feature (15)..(15): n is a, c, g, or t
  misc_feature (70)..(70): n is a, c, g, or t
  misc_feature (83)..(83): n is a, c, g, or t
aaattccttgcttgnttccttcttctccttcaggagcgttttatccctgcgcacggtctcccgcactcgncgctcctcttctnctgccttccgcctgggcgctggccgaaagttcagctcctccggggcctcatcgt

SEQ ID NO: 647146 - DNA, 922 bp, Homo sapiens
gactcctatgtgctggatgtatcggtactactgcgtgctatatccattctctagctgtagaataatgaaaggacattagtagagagtaatgcttcatctagtaagtcctatatgagagttccatttataaagttccacgatccgtatagaaatagagagaattgcattgatcatcgtaatatgcactgataagggaatgggcgaaaggaaaagggctatgaatcgtgtgagagaaagagattacgcatggcgcatatggggggacaagtggatcactttgctggaagaataacattcctagatgttgttggaagcatgtattcatggggcaacattatatgatctttgtattaatgcctacacacatcaccatgccaaccaaactacccaatgcaatgactacatactgacaatactaccttccacaaaaggtggtaggtagcttacattagaagaaggtaaaattggagtcttgcaaatactgttactttacttcaactcgaacatgaaacctgtttatccctaacatcatgggacaggaaagttgaagaaagagagcaaagggtgaatatttcccaatgtgttaaggcgttaactgaaaatttcaatcagtggtaattatagtcggaaatttctcttgctagctacaaggtggaataaaacacgaactgaatttatatctggaccgcgaaaaaacgcacaaacgaaatctcgaaagcaatcgatagggtataataagggaaggataggttgtgaaacctaatgtacaccttggaatagcgagttccccttttcgctttggctcccgatctcactaaaatcgggggcttagtggagggtttatagctaacccttaatatcgaaatcgcgaaattgggtggttatcaataccttggattatagttaaaggggccccaatttg

SEQ ID NO: 647147 - DNA, 361 bp, Homo sapiens
cacgaggcagcgccacctcaatgagcttcctgggcacgggagtccttcctgtcgacggagaacgggggaattctccgcgggtgtgaacgggaacatcctacgaccgccctccgacacgaatcacacccttgaaccgacggtgagcctcgattcggtgtcgtaccggccggctaccctgattccatgactgcccctaccatccgcgtcctcgacctcttcgccggggcgggaggtctcaccgcggggttccacacggcgtcgtcccgcttccgcagtatcgccgcagtcgagatggacccggaggccgccgcctcctaccgggcgaccttccccaagacggaggtctacgcgggcgccatcc

SEQ ID NO: 647148 - DNA, 590 bp, Homo sapiens
  misc_feature (196)..(196): n is a, c, g, or t
aatgttggagccgtctgcaaagtgtccccggcaagaagaggctgcctaccacaaggactttagcttacttttgtaaagattgaagaaagaaaaaagaagacagaacaacagaagaactcaaagatacacaaagtaacttctgaaaccgaaggccctcaggaacgcttgttctggaagccgttgaggagatgacagncagttttggctccaatagttgtcgttaatcatttgctttcacagaccttaaatttcacgagtaggtctccctccaaggttgccacggcctttgacagtcctgtggcgatcggaggccaggaacccaacttggggaaaacctcccccgacaagggccaaggcaatggctaactaccaaaggaaaaaggggcctccagggcaaggggtcctgtattgtgccaagctaaaagctcttgagctggaacctcgtagcgtgcttttccccaaaaaaaattccccagagggttttcccaacggaaaaaagggtccccaaaaccctcccaaaaaaagaagggcttaaaagtttgggtttttaaaaaccaaaaagtttaaaacccccccccaaggggggccca

SEQ ID NO: 647149 - DNA, 1256 bp, Homo sapiens
  misc_feature (312)..(312): n is a, c, g, or t
cccctgcaggcggactcgcccgctcccaggcggaccgcgcccgggacatggtacccggccgcaagtctgagccgtcgcgccagcgctgcgccgccggtcgtgtgccgcctagcggatcggagctgcgtcgcggaacctggtgctgccccgccccgctccaccccgtgtaggggttggctcctgtatggcatgccgggactgacagctcttcccctagggaattctccttgtatgcctgtcttgatgacatacattggctctatgcagagtcctcgctggtaaagctcactggcctagtgattgagctctggntccatagagctgcgttccaattgtgttggtagaggctaagttccaatttccttccacagtgtggagatgaagccgaagggatatcgagtacgaggtcttaataattttaagttatgtcccacaatactcgcaagaagcaaaggagagggacgactcagttgtcgctcacattggtttagagagtccagtagaatgcaaatggacctctgtaagctccgttatgtgtccacactcttaggctcccccgggagatttcaggacacccagggtctatcacatgaccaggtccttgtacagcgtactctaataattctgggggcctcatacagatcgacctaattctgcgtataatgatgacgtagtccccattttgtgggatgcgcatacggagcgtgaggttgaggcgactcctggactcccttccctgcgcgattgcattaaggacgcgaatttctacctcaaatggaaatccctttgcgcaaatcctcacaaaagggaaactagttccccacgcaatgcgccttgcgagcgcttgccctgcctcgtctgtgggtggtttgaagttcccgttgggtgggaaaccgggggggcacagcccgagtttggctggagatagctacagacttcatcatggggagaaggaacttgcccaaatctaaaagctaaggcgtcagtttgattacggttgggtccctactcacaatgatttgtgaacagcaaatttgcaccccccaaagatatgtggctatggggtttcatttagagggggtgtttggacatgtgtttgtggggcgttcgcaaaagaataaaccgaaccgatttggccggttctgcgtgtacttaaaactcattggtaaattcctttgggcaccaaaatttaccgaaacccccctaagaaggtaagggaataagacaagccgcgaagaaaacgtcgtactacctcg

SEQ ID NO: 647150 - DNA, 408 bp, Homo sapiens
  misc_feature (1)..(1): n is a, c, g, or t
  misc_feature (121)..(121): n is a, c, g, or t
  misc_feature (142)..(142): n is a, c, g, or t
  misc_feature (149)..(150): n is a, c, g, or t
  misc_feature (152)..(152): n is a, c, g, or t
  misc_feature (179)..(180): n is a, c, g, or t
  misc_feature (183)..(184): n is a, c, g, or t
  misc_feature (186)..(186): n is a, c, g, or t
  misc_feature (190)..(191): n is a, c, g, or t
  misc_feature (195)..(195): n is a, c, g, or t
  misc_feature (205)..(205): n is a, c, g, or t
  misc_feature (219)..(219): n is a, c, g, or t
  misc_feature (327)..(327): n is a, c, g, or t
  misc_feature (333)..(333): n is a, c, g, or t
  misc_feature (335)..(335): n is a, c, g, or t
  misc_feature (352)..(352): n is a, c, g, or t
  misc_feature (372)..(372): n is a, c, g, or t
  misc_feature (376)..(376): n is a, c, g, or t
  misc_feature (397)..(397): n is a, c, g, or t
ncagtaatcaagtacactctaatgacaatgactttgtgatttgatatgtcttcactggataaacttctacttggacaactgctgaaaggaacgtagatatggggcagctgaggtcatttcnaatgaggttcccaactatgtnaaggggnngngtgttttcacacacgaaggacagctgnntcnntnctgnnaggntacagtgcanaaaattcctttctnatcactatgacatttactcaacgttagattttaatagcccacttgacctcctgggttcacagctggagatactttagaactctttccccatcctccaccataggtgcnaacgtnangcttgtgtgagcacctncaaggtatgcccttgaagtnaaanagaaaagggaagaaagggggntttttcttttc

SEQ ID NO: 647151 - DNA, 173 bp, Homo sapiens
gccacatttgcaggaggatggccttagggttccaacccttaacccaaccccacctcttctgtatgtttgaattctttccgtagctgttgatgctggttggacaggtttgagtcaaattgtactttgctccattgttaattgtgaaactgtttcaataaaatattcttttctga

SEQ ID NO: 647152 - DNA, 248 bp, Homo sapiens
  misc_feature (124)..(124): n is a, c, g, or t
  misc_feature (148)..(148): n is a, c, g, or t
  misc_feature (230)..(230): n is a, c, g, or t
ccatttggctctcaaaagcaatctggtgataatttaaatgatactttacgaaaggccaaagaggtgctacagtgtcatgagtcattgcaaaatccacttcttagcacttctaaaagtaccaggnactatgcaaaagcaagtagaaatntagaagaatctgaaaaagggtctttgaaaattgagtttcaagtgcacgcactagaagatgaaagtgatggagagacatctgncacgggaaagcatgggac

SEQ ID NO: 647153 - DNA, 142 bp, Homo sapiens
acaggagcatgctggcctggagacagaggatggcgatggggctacagcagaccctaagggacctggcacaggccgtcttgtcagactctgagagcgggtccagctgagcggctctgagcgcaccgaggatgcttccaacggc

SEQ ID NO: 647154 - DNA, 440 bp, Homo sapiens
  misc_feature (189)..(189): n is a, c, g, or t
  misc_feature (229)..(229): n is a, c, g, or t
  misc_feature (375)..(375): n is a, c, g, or t
tcaggtgtgcagtcctttgatgaggaggaaggcgaggcaacaactagtttcctcccccaatgccctgccttccactcccacctgagggccatggctgtgacccataccctccctccccccagctagtacagctgaaactgggcagacaacattggggaacccaggagcttccagtcctctcctggaaanggaggaccaggatgggattttatccaggcttacactctanaaacccacaggcctgggaactgagacctgggcaactagatggccgtgagcttggtgtggctgtggagaaggacctgggctgtgggcttctgggtctgtgccgacaaagcctccagtgtgtgcaccctgaggacgggggcagcgcantttgctcaagactggatctcagttcttcacgccccgatttcgtcttccaggagccgtagctctgc

SEQ ID NO: 647155 - DNA, 130 bp, Homo sapiens
tggagaagttctcagagcagagcagtgtagtgtagtgatggagtgcatatagtggggccagactgcctgggttcaaatctagttctacagcataccaactatataacccaagttagtcactccacctctc

SEQ ID NO: 647156 - DNA, 134 bp, Homo sapiens
tcgtctattcatcggcaccctattcatcggcactctattcatcggcacccgtattgaattcaagtattatattaagtatgcatggacctctagagctaatggtgccgataaagcgaggtgccgatgaatagcga

SEQ ID NO: 647157 - DNA, 236 bp, Homo sapiens
  misc_feature (104)..(104): n is a, c, g, or t
tctccgtgtgtcggctctgtttcacttttgtgttcccgtgtctgtctgtcttgcatccctagccctgcagtctttttctctgtccctttatctttcttgttttntgtcttgtgtcctaggtctggtttcttgccactggtctctcctgtcccgtgtgatcttgggtctcttgtgtggtctcctgctggcagtggggacggggagtagtgaggaaacatgaactacaaagtgcttgg

SEQ ID NO: 647158 - DNA, 491 bp, Homo sapiens
attcgcggccgcgtcgacggattcttactctgtcacccaggccagaatgtggtgacacaatctcggctcactgcaacctccacctcctgggttcaagcagttctcctgcttcagtctcccaagttgctggaattacgggtgcatgccaccacgcctggctaatttttgtattttcagtagaaatggggtttcaccatgctggccaggctggtctcaaactgacctccagtgatctgcctgcctcagcctcccaagtagctgggactacaggtgtgtgccaccacgcttggctaattgcacacctggctaaccttttaaaaaaaaattgtagagacagggtttcaccatgttggccaggctggtctcgaactcctgaccttaagtgatccgcctgccttggcctcccaaagtgctgggattacaaacatgagccactgtgctgacctgcatgtttttttagtagcgacaaggtttctctgggttggtcaggc

SEQ ID NO: 647159 - DNA, 334 bp, Homo sapiens
  misc_feature (141)..(141): n is a, c, g, or t
catacccttcagggtaggctccacgccggatcctttcaaacccagctcctgtgccaatgctattataccctctgccagccgccggcctatcatagggacctgtccgctgcatagccatgagctttcgtggggtgacatagngggttcgaacttcagctcggctactcttgaagatctcaatgtacctgtgccctattctttccttgagtttctttaaggccgtctcagctatctcctgtgaagcaaactgcacaaagtcttcccctgcgcttcgcccctgaaagaccactggcagtgtcatcccatttggcacaatttccaaccctgaaaagaa

SEQ ID NO: 647160 - DNA, 821 bp, Homo sapiens
  misc_feature (34)..(34): n is a, c, g, or t
  misc_feature (64)..(64): n is a, c, g, or t
  misc_feature (95)..(95): n is a, c, g, or t
  misc_feature (107)..(107): n is a, c, g, or t
  misc_feature (196)..(196): n is a, c, g, or t
  misc_feature (198)..(198): n is a, c, g, or t
  misc_feature (200)..(200): n is a, c, g, or t
  misc_feature (212)..(212): n is a, c, g, or t
  misc_feature (355)..(355): n is a, c, g, or t
  misc_feature (390)..(390): n is a, c, g, or t
  misc_feature (421)..(421): n is a, c, g, or t
  misc_feature (457)..(457): n is a, c, g, or t
  misc_feature (552)..(552): n is a, c, g, or t
  misc_feature (554)..(555): n is a, c, g, or t
  misc_feature (582)..(582): n is a, c, g, or t
  misc_feature (587)..(587): n is a, c, g, or t
  misc_feature (598)..(599): n is a, c, g, or t
  misc_feature (619)..(620): n is a, c, g, or t
  misc_feature (663)..(663): n is a, c, g, or t
  misc_feature (700)..(700): n is a, c, g, or t
  misc_feature (749)..(749): n is a, c, g, or t
  misc_feature (799)..(799): n is a, c, g, or t
gccttctccactgagtcccggtgatcccataccnggacccgaacgaatcatcacagtggaaagnttgtccagagactggatcccgaccaaccganggaacgctggtnagggagaaccgggtatagacgaatccacggatgcgccaactggctggtgggaatcaccatcttcaggagaaggccctccggctgtgccnantngtcgtcccgatnctcgacgaggttcaggaggttatggtgcttgtgggctcacacgacgaacggggcccggggtgacagggatccgtcggttctcataatgactctaccggaccggagaccgagcttcgtcgggacacacccgaggtcgtgggcanaaatgtctctggaaggacgatgattgggtaggaancggatgagtcccatgttctctgtcagcaatntatgaaaattgcatcaccgtctacggaaaacgtggnctggggaaagaccgaggacaggtgacgatgtccggccgagacgttccggggaactcgaaatggtcgaggaagtgggacactggcaaacccgggancnntgcacggacgcgacccccggcgccccntctangacatcccgannactcgggagcaactggggcnngatggaggaggacaattcacttctgacctacgctttggtggangacgtcgacgaggtcgagtgcccttgacctcgttccngagaccgatgcgtcggttgtgggcaaacctgtcgtggttgtcggcctanccttgggcgacgtggtggagggactgtccccgggacctgtccgggtcaancgggtggagtaagttgacgagg

SEQ ID NO: 647161 - DNA, 504 bp, Homo sapiens
agccaacatgcaaagaaacaagtgagggatcatcaaaaaaactctccctgcaaggtggccccaagcggtcagatttctgtttctgaacaccctctaattttaccacactcccttaagccctccccacacctctgaaattaatttcacttccttactgtggactgaatttggtgaagacagaaagttgcacagaaagtctgttgggggaaccttcaacagtctgacgttcagaaatgatgatcacaatggaaccgcactggtgccagctgccaatatctgccaccttctgcaggatggggccagtatcatagccctccgcccagatgcctcaagacaagctgagagcctctgctggggacttcttagatgctgctctcctctaccatgcctactcccacaccaaattgccctgaatttctctggagatcataagtggcccacctgtcattttcatcccaagacattggactaaaacataaattataccaaaagagtgttaaccca

SEQ ID NO: 647162 - DNA, 731 bp, Homo sapiens
  misc_feature (716)..(716): n is a, c, g, or t
cgagctcggtacccaatcagtttacacaaatcatattgatgaaatcgtaattcatggttgagtttcagaacaaaagatattcattgcacattaaccatttagaggtcatttaaataacaaaatattgtattgtaaaagaactgtacaattttaaaacaataaagatttgaacctgtaaatgtgtgtgccttttaaagaaggatacatttttaatatatttgagtgattgctgggaagtgtgaaaatattgttatgtatcatatcaaagagaaacatgtttattacaaaaatgttctttaactatatactatgtaacagggtaaacagtgttatgtagaatagaattgtgtaaactagatctttagagaagttgccattgagcaaagttatttaaatgagttagttgagttggatgagaattgtttgaggtttgttgctagagaacaataataaaataattctttttcagaaaatatttaatttcttcataaaaataagttaaatatttttttaaatatgtatatctaatagtacaaaatggaataaacatcatagtgtatagaaaactgaatttgacaagttaatgaataaatgaacaaatgatttcacatgtttctatttaatctttccatgacatctttatgcaaagactgttaaagcaataactttatatagagggtgattttgttaagcagatctggttaggtgtaaatatnccattccaggtaggt

SEQ ID NO: 647163 - DNA, 1822 bp, Homo sapiens
  misc_feature (1807)..(1807): n is a, c, g, or t
accagcattatgtctgctccagaaatattcataatgtgtctgaagaaaacacgggataatgctgttagacgaccattccattgaaagaaggaagaaaataacgggttaaatcaaagcctgatgtctcagagcatgtcttcagtatcttcaaggcattttgaaaagatagctattagagattttcagagtctctacctgcccctggatctcaaaccaggtgagggtgcttcaggtgcatctagaagaccctgggtacttggaaaagtaatggaaaaagaatactgtcaagccaaaaaggcacaaaacagatttaaagttcctttggggacaaagttttacagagtgaaagccgtatcatggaataagaaagtataacttatggacaaaattaatacattctatgacatttttttctgatttgtcctgcagtgctcattcatcactccaaaaacagcaggccatctttttatgcaaaagtcagcgtgacaatatacttcactggtgtacatcgtttactttttaactggcttcattttaggaataataaattcatcagaatccttggctgaattaaaatggtttttgttttttggtttttttttttacccagacaactctagaaatgcggaccaaactacttcattttctcaaagggcataccttgtgcattgtggcttatgatgagccatattaattgcctgttaaatatacactagcttgaacttagatgttaaatgttattattaccagcatttgtccttttgtgaaatcagtatcagaatacttgcactctttaacacattctttataaaatgtataaattattcagaactatttaaaataaagaggagtgttattgcatgctgataatcattttgagtttgcctcagtagatactaaagcaaattgtttcagtttttttaaatgccctttgatgtttcaaaaaaaaaaaggaactgtaatttgattgactgattttaagatcagccataagtaatcagcaatcttcaaaagcactttcagtggattggtcatctgggttctaaagggaagagtctgtgctactaaccatttcaaatgcagactcaaaccttcccaacatctttatgactctagaataatcatattgatgaaatcgtaattcatggttgagtttcagaacaaaagatattcattgcacattaaccatttagaggtcatttaaataacaaaatattgtattgtaaaagaactgtacaattttaaaacaataaagatttgaacctgtaaatgtgtgtgccttttaaagaaggatacatttttaatatatttgagtgattgctgggaagtgtgaaaatattgttatgtatcatatcaaagagaaacatgtttattacaaaaatgttctttaactatatactatgtaacagggtaaacagtgttatgtagaatagaattgtgtaaactagatctttagagaagttgccattgagcaaagttatttaaatgagttagttgagttggatgagaattgtttgaggtttgttgctagagaacaataataaaataattctttttcagaaaatatttaatttcttcataaaaataagttaaatatttttttaaatatgtatatctaatagtacaaaatggaataaacatcatagtgtatagaaaactgaatttgacaagttaatgaataaatgaacaaatgatttcacatgtttctatttaatctttccatgacatctttatgcaaagactgttaaagcaataactttatatagagggtgattttgttaagcagatctggttaggtgtaaatatnccattccaggtaggt

SEQ ID NO: 647164 - DNA, 425 bp, Homo sapiens
gttaatgctggaatgagttaagactttagggggctattgggaaggcatgattgtgttttgaaatgtgaggacatgagatttgggaggggccaggggtggaatgatatggtttggctgtgtccccccacccaaatctcatgttgaattgtgatcctgagtcttggaggtagagcctggtgggaggtgattggatcatgggggcagatttcccccttgctgttctcatgacagtgagttctcatgagatctggttaagtgtgtagcacttccccctttgcttgctctctccctgtgccatgtgaagaaggtgcttgctttcccttcgcccttctgccatgactgtaagtttcttgaggcctcgcagccatgcttcctgtacagcctgcagaactgtgagttaattaaacctcttttcttcataaatt

SEQ ID NO: 647165 - DNA, 1594 bp, Homo sapiens
  misc_feature (1579)..(1579): n is a, c, g, or t
gtgtgtgtgtgtgagagagagagaagtggtttaatcactctagtgattccatttttctttccctcttaggcacaaaacagatttaaagttcctttggggacaaagttttacagagtgaaagccgtatcatggaataagaaagtataacttatggacaaaattaatacattctatgacatttttttctgatttgtcctgcagtgctcattcatcactccaaaaacagcaggccatctttttatgcaaaagtcagcgtgacaatatacttcactggtgtacatcgtttactttttaactggcttcattttaggaataataaattcatcagaatccttggctgaattaaaatggtttttgttttttggtttttttttttacccagacaactctagaaatgcggaccaaactacttcattttctcaaagggcataccttgtgcattgtggcttatgatgagccatattaattgcctgttaaatatacactagcttgaacttagatgttaaatgttattattaccagcatttgtccttttgtgaaatcagtatcagaatacttgcactctttaacacattctttataaaatgtataaattattcagaactatttaaaataaagaggagtgttattgcatgctgataatcattttgagtttgcctcagtagatactaaagcaaattgtttcagtttttttaaatgccctttgatgtttcaaaaaaaaaaaggaactgtaatttgattgactgattttaagatcagccataagtaatcagcaatcttcaaaagcactttcagtggattggtcatctgggttctaaagggaagagtctgtgctactaaccatttcaaatgcagactcaaaccttcccaacatctttatgactctagaataatcatattgatgaaatcgtaattcatggttgagtttcagaacaaaagatattcattgcacattaaccatttagaggtcatttaaataacaaaatattgtattgtaaaagaactgtacaattttaaaacaataaagatttgaacctgtaaatgtgtgtgccttttaaagaaggatacatttttaatatatttgagtgattgctgggaagtgtgaaaatattgttatgtatcatatcaaagagaaacatgtttattacaaaaatgttctttaactatatactatgtaacagggtaaacagtgttatgtagaatagaattgtgtaaactagatctttagagaagttgccattgagcaaagttatttaaatgagttagttgagttggatgagaattgtttgaggtttgttgctagagaacaataataaaataattctttttcagaaaatatttaatttcttcataaaaataagttaaatatttttttaaatatgtatatctaatagtacaaaatggaataaacatcatagtgtatagaaaactgaatttgacaagttaatgaataaatgaacaaatgatttcacatgtttctatttaatctttccatgacatctttatgcaaagactgttaaagcaataactttatatagagggtgattttgttaagcagatctggttaggtgtaaatatnccattccaggtaggt

SEQ ID NO: 647166 - DNA, 1268 bp, Homo sapiens
accagcattatgtctgctccagaaatattcataatgtgtctgaagaaaacacgggataatgctgttagacgaccattccattgaaagaaggaagaaaataacgggttaaatcaaagcctgatgtctcagagcatgtcttcagtatcttcaaggcattttgaaaagatagctattagagattttcagagtctctacctgcccctggatctcaaaccaggtgagggtgcttcaggtgcatctagaagaccctgggtacttggaaaagtaatggaaaaagaatactgtcaagccaaaaaggcacaaaacagatttaaagttcctttggggacaaagttttacagagtgaaagccgtatcatggaataagaaagtataacttatggacaaaattaatacattctatgacatttttttctgatttgtcctgcagtgctcattcatcactccaaaaacagcaggccatctttttatgcaaaagtcagcgtgacaatatacttcactggtgtacatcgtttactttttaactggcttcattttaggaataataaattcatcagaatccttggctgaattaaaatggtttttgttttttggtttttttttttacccagacaactctagaaatgcggaccaaactacttcattttctcaaagggcataccttgtgcattgtggcttatgatgagccatattaattgcctgttaaatatacactagcttgaacttagatgttaaatgttattattaccagcatttgtccttttgtgaaatcagtatcagaatacttgcactctttaacacattctttataaaatgtataaattattcagaactatttaaaataaagaggagtgttattgcatgctgataatcattttgagtttgcctcagtagatactaaagcaaattgtttcagtttttttaaatgccctttgatgtttcaaaaaaaaaaaggaactgtaatttgattgactgattttaagatcagccataagtaatcagcaatcttcaaaagcactttcagtggattggtcatctgggttctaaagggaagagtctgtgctactaaccatttcaaatgcagactcaaaccttcccaacatctttatgactctagaataatcatattgatgaaatcgtaattcatggttgagtttcagaacaaaagatattcattgcacattaaccatttagaggtcatttaaataacaaaatattgtattgtaaaagaactgtacaattttaaaacaataaagatttgaacctgta

SEQ ID NO: 647167 - DNA, 117 bp, Homo sapiens
gatccccggaccgttggtgcgggaccatctcggggatctgggtgctcggcactagccgttgcgggcgcgtatgcgctgcaggtgagatccggggcgcacgtagtggtccgggggtac

SEQ ID NO: 647168 - DNA, 254 bp, Homo sapiens
aacatgtattctcgctaaataccagttactaaaggatgtgtagaaaccagaggtaaaggtctcgcgatatcttaagacatccggcgtagtacgcttcagtgagccaccagcgctagagacagtaggacgaacgctcgcgagactctgatgccgtatgccgaaggacgacctaggacgggggacggagacggggactctcgacgaaaaggaaacgacggtccgggggttggagtacccggagactgcgaacttcc

SEQ ID NO: 647169 - DNA, 445 bp, Homo sapiens
agctcgaattcctgaacgctgcctgctgaggaataatgctctaaaatttaaaaaaatggagcttccatagatttttgctaacttgatgttacttccacagaagactctagagatcatttttaaagagtttcaaatattatacttacagaaaggaggagcaataaaggctctgtaggctttctaagaattcattccagataacccagtctctacctatagagcctacatttacagatgaggagaatgctgcagctgtaatatatctagactccgatggagcatttgacagtccaccattctatacttgggagcatgacggagaggtgacttatagtacgggatagttattgaacaatggaactcaatcttgatttagttactcattggcagcctggcaggaagtctcttatgggctgctgttttttgaccctgttacactcatcag

SEQ ID NO: 647170 - DNA, 810 bp, Homo sapiens
agcgggaatggcggcgccttagaggattcagagcgactgggcgacaaggccctcaggaaggatgaaggggagggcctggctgagtctgtcatcccccaggaaaccatctttgtatggcagcctgacttgtcaaggaattggctagatggcatcccagaggttacagcttccagaatgatttactgtgaatgaaataaacaagaaaagcattcatattacatgtccaacaggaaactgcatcttctaagttttgacaccatatactactttttccacgaatttcatacaaaggagtataacatgcctggacatttccagcagaggaggtctatggtgtgtcttctagtacatgacgggagcatgaaaatctggcgaggcttccaatggagaactcaggagagtattgcaaggacatgtgttgatgtgaatcgttgcaggtttttcccatcaggccttgtggtcctgatgtggtgggaatggagtgcccagctgaccgatatggtcaggctgaaggatgctagctgcgtggtgaccttcatataaggtcaacaaaggaggtatccgtggatacagccatcgttgatcgggggaggaatgtggtgtctgcttctcgagatggtgacaagaacgaatttgggattgtgggcgctcagcactgcttgggagtccttgcagatctgtggttctcctatcagatggatctggcggtgggtgctgttgacaactccataaaccttggtcccctgacagatgccatggaacggcaggttgcaacagaggccaaaactgctgcttggcccgggaaatata

SEQ ID NO: 647171 - DNA, 157 bp, Homo sapiens
ccgggatggggttgggggacaggggaaaaaaaagctccaacctagtagcctgtagtcccaagggaagtgtggcactcttcccaattccctagccgggggaagcttcccttcaagttgacctgaagggcctattattgaggaaaactgtagcttgggg

SEQ ID NO: 647172 - DNA, 441 bp, Homo sapiens
gggggtttggttttatttatcaaataaaaaaaaaaaattaaaaaaaaaaaaaaaaaaaaaaaaaaaaaaaaaaaaaaaaaaaaaaaaaaaaaaaaaaaaaaaaaaaaaaaaaaaaaaaaaaaaaaaaaaaaaaaaaaaaaaaaaaaaaaaaaaaaaaaaaaaaaaaaaaaaaaaaaaaaaaaaaagaattcgttaccctcctcttcacccattctctttttacccggcgcccttatttttggggcgccctactatcctctcctttgccaacagccccctaacggggggtggaaaacaaaaccgtggcccctgttaaacaaccttgcctggggaaaaacccgggtggcccccccgaaaaactgtggggaaatccccctttgcccccagcggttaacctatcagaaggcccccccacggcctctcttcaacttttgcgcttcc

SEQ ID NO: 647173 - DNA, 889 bp, Homo sapiens
ggttttcctgcgctggagccgcagtgggcgtaggtagccatggcgtcccatacggaatgtggatggtcttgatagccccagttccatgatgactggcagcggcgcgtggtctcgtggttcatctcaatgccgtgtccttgtagtatccgtatacgtaaggcccggcaagccaatgtcgcgccgggattcgcctccgtcgtcgccgtcgtcgcggtcccatccggcccatcttgcgctggccctatggttcggtctcacacggaaggttcgcgccgggcgcggcgggttcaaggcgcttggggtgagctcagggttggtgccggaattcactacatgaacggtgggcccgcggaacggtctgcgtcattatctggtgagattccttaggatggcggcaattcctgtccagggtgagtccccgttgtgtgcgcaatcattgcacgcgtctcgaaggagtaccgggtcctaacatcgagtccgtcgttccccgaggaaggcccctcgggtctccctcgaataaggggatgacacgttccttgattgaagaacttgaaagcattgtgcaggcattcgtgatccgggaccaggctcatgcccgtcccgagaacggttctataggacatggttgaaagcttcgagtcattcaccttgaaggaaggagtaatgattttcaaatgcctttcggtagctctccgtatgggcccgtgtcccacgcttcggctctttcggcattacgggcaagaagaaggcaaaggaagccttgagagccggattgttgaacaaggaacaaataatgcgctcctggggacttggacatcctgacaacatagaacatccccggacccttccgggtggccgagcaccagggctctcgcttggggctcttgct

SEQ ID NO: 647174 - DNA, 600 bp, Homo sapiens
tcttctcccctgacactgtggacacagagtgtagctaaagaacagagccttccctcagggatgggttcatgtctccggaaggcggtactctgagaggacattatagcgcgtacttgcttagtaagtgatctgaagcgaggactaaaaatccaagcagcagaatttaatatagatgggcataatgagcgtccctccccagccccaaatgttgacgatccagttatgactggagagaagatttacgtatccttggatcaatcagagattcagttgtggaaattcttttcgaacaagataatgaagagcgctcagtggccactttaatattgggtacccttatacagtgtccgatagacaccaggaagcaactagcagagaatatggtacgtcataggtggcactttctatgtagccaggatttctccacagattgcttgcgtaaataaggcatctggtagaatgaccaagtatataatagagcactgggcactaagacatatcgaatccatactccatctgcaaaagcgaatggtgtggcctgcctgggaggggctactattggagccttacacgatatacttgggagccgtactgttccaa

SEQ ID NO: 647175 - DNA, 223 bp, Homo sapiens
  misc_feature (33)..(33): n is a, c, g, or t
  misc_feature (37)..(37): n is a, c, g, or t
ctatcttacttctctatcttaatctctctatcnttantctctctatccttaatctctctatccttatctctctatccttaatctctaaacacatagccagcaatggctgcggccacctccaccaacatgataagagatagaaagatggcaaacgtgatcataagacaatagttctccttgcaccgccatggctgccgggcctgggcttcccaaggctggctgg

SEQ ID NO: 647176 - DNA, 290 bp, Homo sapiens
  misc_feature (91)..(91): n is a, c, g, or t
  misc_feature (149)..(149): n is a, c, g, or t
tacaaacagagagactgtctgtgtaactcttcaaaatctgtatggtaggtactgagaccttcacagatgtcatctttttttctgtgtacantggaacttgtgtgacattagcattgtatcagcttgtactgtctcatactctgttttgnagaatatttggaattgttgtgtgtctgtgaaatacctcccaaatattagtacgtgtgtctactggtatttgcacctgttataacgcaattattctgtgtcttaacagtataaatagtgtagtttgatgcagaatggcgtct

SEQ ID NO: 647177 - DNA, 441 bp, Homo sapiens
  misc_feature (2)..(2): n is a, c, g, or t
  misc_feature (8)..(8): n is a, c, g, or t
  misc_feature (13)..(13): n is a, c, g, or t
  misc_feature (84)..(84): n is a, c, g, or t
  misc_feature (103)..(103): n is a, c, g, or t
  misc_feature (106)..(106): n is a, c, g, or t
  misc_feature (121)..(121): n is a, c, g, or t
  misc_feature (142)..(142): n is a, c, g, or t
  misc_feature (148)..(148): n is a, c, g, or t
  misc_feature (151)..(151): n is a, c, g, or t
  misc_feature (219)..(221): n is a, c, g, or t
  misc_feature (283)..(284): n is a, c, g, or t
  misc_feature (310)..(311): n is a, c, g, or t
  misc_feature (314)..(314): n is a, c, g, or t
  misc_feature (319)..(319): n is a, c, g, or t
  misc_feature (336)..(336): n is a, c, g, or t
  misc_feature (356)..(356): n is a, c, g, or t
  misc_feature (359)..(359): n is a, c, g, or t
  misc_feature (363)..(364): n is a, c, g, or t
  misc_feature (369)..(369): n is a, c, g, or t
  misc_feature (374)..(374): n is a, c, g, or t
  misc_feature (409)..(409): n is a, c, g, or t
  misc_feature (419)..(419): n is a, c, g, or t
  misc_feature (428)..(428): n is a, c, g, or t
  misc_feature (436)..(437): n is a, c, g, or t
gncgaggncatgnacgaaatggagttcaccgaggccgagagaacatgaacgacctggtgtccgagtaccagcagtaccaggacnccacggccgaggaagaggncgngatgtacgaagacgncgaggaggagtcggaggcccnggcccnggngtgaagctgctcgcagctggagtgagaggcaggtgccgccggggccgaagccagcagtgtctaaaccnnnggagccatctcgctgccgacaccctgctttccccgcgcccgagggctcccttgccgcccgcnngcagtatttatggcctcgtcctcccnnccnagccngcgtgtgagctgctccngtctctgtcttattgcagcnccnggcnngacgntttanggttttgttttttacgggtttgtgtttatattttnggggatacgnaataaatcnattgctgnnggat

SEQ ID NO: 647178 - DNA, 1210 bp, Homo sapiens
aatgctttggcccaacagcagaagcggctcagttagagtccagcaaaaggtttgccaaagagtttatggacagacatggaatcccaaccgcacaatggaaggctttcaccaaacctgaagaagcctgcagacttcattttgagtgcagacttccctgcttatggtatgtgaaggccagtggtcttgcagctggaaaaggggtgattgtcgcaaagagcaaacgaagaggcctgcacaggctgtacaagagcatcatgcacggagcaaagccttatggggcagctggcagacaccaattgtccattgacagaacttcttgacggcacacagcagagtgtcgttgtctgtgtttcacctcgatggcaagactgtggcccccatgccccacgaacaggaccataacgcgattactggcagggcagatggtggccctaaccacagaggggaaatggcgagccctaattgtcacagccacctacacggatttctacatgcatctactcaactacacacatcacaagcatacatgatcctatcagcacggacacagtgcgcatcggcactgccagccacaggcggggtacatcgcaataatcacagcgataattacttcatactgcctgcgaaatacactgcttgacacccaaagcacacactggaccccgaacaacgcttcatagcacggttcacaccttcggcccgtgcataggcttgaaatccagcaacctgcccgaaggttaataccatcccacaagcttcttaaacaaggtggactcctctgctgaactgttcgatatccagcatgcgagccctagtacaactcggcacctcgaatcagtgccaaaatcatcgatggccgagctagggcattcgaaccaagcgacacaccggcactaaacatcggtcgtaactaggccccacccgcaagaagagcgatataaacaccatgtgcgagcaaactaaatccccaaagggcgcattaagccagcactctaaccacaggcacgcacccgtgcggcggcctcacaacccgctacagagacgtgtcaacaatgctcccactgcacccggaaccaacgaccgcacacacatggacggaacagataacacacagaaaaggagcgacaacaatacaatggagcgacgacagcaaactacgcgacaacactcgagtacaaccggagatggacaagcaaccacaaagaacacc

SEQ ID NO: 647179 - DNA, 208 bp, Homo sapiens
cagcccccccttttgccccccccccccccccaacccttttttttttttgccctccgggggccccccctaagggggggggggttccttccccccctgggtttcggggggcaaagggagcccccccgggggggggggcccctttttcccccgcctggggggggggggggaggggggggtgggcccataaacggccccttcccaatgtcca

SEQ ID NO: 647180 - DNA, 388 bp, Homo sapiens
cggtgtatgtgtgctacttcaaagtaactaggaaatataatcttcgcaacacagggtaccttgttatgtcagaattgggggtgttaggttgccatttgtatcagttgttgattcatttcattacttcctacagatcaaacgtcagcgttggagttgcccacagtgaagtgaatccgaattcccttgtcatgaacagccggggtatgtggctgacatatgtcttgggagttggcttgtcttcatattgtcttactcagcattcccttcttcagttttcctgttgcttggactttcacatatattatacattatctggggatgtacgtctttttgcatgcagtgtaaggaacatctttcgaaactcctgaccagggttagtgtaggctac

SEQ ID NO: 647181 - DNA, 962 bp, Homo sapiens
aggacaggacgaggatgaggaggagaaggagaagtgtggacgccgggaaggcgagcgagctgacgcatccatcgaccgtggaggactgacctggatgatgtcgtccggatgtccaggagatgcctgtggtgatggcagtgggggtgctaagagtccccaaggctcagggataagaaggcgccgtcttggccaatggtgcggtgcggggagataccgaatgtaaggaacgaaggggttcagaggacgaggcccttcgaatggacagcagatgaatgaggtggcacttcgagggcccaaaggtaggtggtacatatcgactgcttcagacggtcatcggcattgagctcccagagatagcaggcctgaagaccaaggccatatggcgccgaatgcaagggaagtgaggggctcgaaaaggaggttggttcagcatagaggacttatgaggcgtacaagttaatgattgacgcgaatgaagtagacggaagggaacgcaacgactcgtctggaagtgatggccaccaaagggctgggaggagagacggaataacggaacggcgttctcccaaccaccaggtgggtagaatagtaaacgcgcctagcagtatcatgagcttggcgaggtcagatggcagttgctgggaactagcgtacaagaatggaagaaggaccgtatgatttggagcaaggcgaagggccgtgcccttcaggactcccttcgttccagtgaggccgagtgggaaagcaaatgagcgtcgcatcccatatgaagaaagtcgtctggtggcggcacgcatccagagaaagggtgaaggctgtctagggggacaaatcacgttcgtcctggcaagcctaaccgtgcccgaggcgacatgtaggggagtgacgacaagacatcccatctgttccatgcgcttgtcggggtcgggctgaccagttcacataccttcggtgtcgcatgg

SEQ ID NO: 647182 - DNA, 229 bp, Homo sapiens
ggtcacgaaaccctcagccacccgagattgagcaataacagggtttgatgacccccgcatcggcgtaaccggagtggacgtaccgctggtgtcctgttgtctcgccagaggcatcgcagggtagctatgtacggaagagataaccgctgaaagcatctaagcgggaaacttgcctgaagatgaggattccctggagacttgatctccctgaagggtcgttcgagaccag

SEQ ID NO: 647183 - DNA, 252 bp, Homo sapiens
ctaatttttcttttattgtgtttttggtgtcatatctaaggcataattgccaaacccaaggtcacaaagagttacacctatcttgtcttctaagaggtttatagttttaactcttacatttaggttcatgattcattttgagttcctttttgtgtatggtgtgaggtagggggccaactacatttttctcctgtgggtatgcaggtgtcccagcaccatttgttgacataaataggatcttaaaggacaact

SEQ ID NO: 647184 - DNA, 797 bp, Homo sapiens
gttattccttctctgcatcgaaggatcaggaagttggtgctctctgcgtggctaagttttagcacctactaggacgggggtggggtggggagaacaggtgtccttctaaaagtacagcacaagctacagcctgagtccagccataacccaggagtaacatcagctccttgtgtatttgcagagatatggctagctaggactagagcttgctaagtttagcatgactgtggaattactacactatgattgtctgaatgttatcgtctagacttgtgatctccataaaagacagggtgagaatgacgcacgtttagactcaccgggcccgtcgcactgaaataagcaaggaactcgtgaataagaagatggaatacgtgagggaagacagtaatttgggagaaaagtccagacaattgaagattctggcagactctaaggactatccgccttactcttatggataaggaagtattgcgtctctgggagctaagagagtccagaggggtacacatctttctggaatgactgcatatcatcaggcctgcgagggggcatcctgatagagctggccatgcggggtcgaatctatcttggaaggccccgatcatgcgttaagaagcgactactagacagacaaggtacctgtaaagtcagacagtccaacaggtgactgttttactggatgaaactctgaaagcgcatctaaagcaagtggaaccacagaaaatgtccaaacatggatgagagctactcacctggtgagactggagccctgcaattacagtaccaggtgagaa

SEQ ID NO: 647185 - DNA, 243 bp, Homo sapiens
attatgtttaacatgtgattcatataaagttagtgagatattttacattctttttctcattctcagtcctcaaaatatagtgtgtgtatttcccccccaaaacacatctcaattcggactaaaaactttccaataaagctcagcaggccccgcggggtggctcacgcctgtaattccagtgctctgggaggctgaggcaggtggatcgcttgaggagttcgagaccagcctgggcaacatgag

SEQ ID NO: 647186 - DNA, 146 bp, Homo sapiens
gactctagcacggatcccccatgacgtatcccacagccctgctggcttctttgatgatgtgcaatcgcgaagagaattctcatcgcgattgcacccatcaaagaagccacgcagggctgtgggatcacgtcactgtgctccgcgat

SEQ ID NO: 647187 - DNA, 402 bp, Homo sapiens
  misc_feature (262)..(262): n is a, c, g, or t
  misc_feature (360)..(360): n is a, c, g, or t
  misc_feature (371)..(371): n is a, c, g, or t
  misc_feature (396)..(396): n is a, c, g, or t
tacaattgtctttctcttacatttgcggttttggtgagagaataattccaggtatgatattcagggaaccagaaagcagaaagctgaagggaccagagattagggcagccaggagtagacagagaacccctatcagccagacactctcccaatctgagcaagggacaaaaggaagcttggaggtggctccagcccagaagctacagagggccagctgctctggccatgaggtgatgccatgcttcctgcctatccccaactntgcacctgggccaccaatgagtcctatgtgtccctcccccaatagcatcccgacacatttttttttttttttttttgagatgggagttttcaattccntttgcccgggnttgggagttgcagtgggcaaagttnttcagt

SEQ ID NO: 647188 - DNA, 125 bp, Homo sapiens
  misc_feature (28)..(28): n is a, c, g, or t
  misc_feature (58)..(58): n is a, c, g, or t
  misc_feature (105)..(105): n is a, c, g, or t
ggggtagcacaggcctttcggggagggngagaatacccagggttgcagagccttgagnccgtgttatcagatgtacgagagcttagcgcgactccattcaaactnctacaaaacacaagtaccct

SEQ ID NO: 647189 - DNA, 228 bp, Homo sapiens
  misc_feature (104)..(104): n is a, c, g, or t
cagcttggcggtgcccgcagtagcgaccacttcgaagcccaagttgatcagatcacgggccacgcctgcaaccagaggcttgtcatcgtcgcgcacgctgatgnacgcagtaccgccggtcggcagcacttcgctggcacccatctgggccttggcaaaggcttcgccgaaggtgtcgcccacgcccatcacttcgccggtggacttcatctctgggccgagggtcgg

SEQ ID NO: 647190 - DNA, 184 bp, Homo sapiens
tgcagtgagtctgacgatcgcgcactgcactccagtgtggcaacagagcgagactccgtctcaaaaaaaaaaagagaaaagaataatgaatgcatggataacttggacggagaatatatatctttacaacttacaggtttcacattcatgaagatgacatatttcaccacaaagtcaggttctg

SEQ ID NO: 647191 - DNA, 517 bp, Homo sapiens
  misc_feature (349)..(349): n is a, c, g, or t
tcagatactcaaaaaaaaaagaaaaagaacaaacaaaaaatcaaggacccaaggactcatttcctctctatctgcctaaaataatttcttaataactcctacaacattcccccctgtggagatgccacactaactgctgttagggagtttggggcgacgactccttctggctacttcttgttgcaaaagggcgtcgaatggggaagagcagctagggctcctccgggggtcaatctaagggtcctcagaagaatgatgtgtctatgtgtggttctgtttacagcaccattgggagttggatggcttctagatgagaagaaacaatttgagttatagtatggtgtatacnaggtccaaatatcattacaagacacataagcaagagagggcttaataaaggggttaaccaatttcataaagaagactggaatttattaaagaggcattgtagccactcggggatcaataatttcgattggatttttaagtacttgtagattttcttttaacttgaggt

SEQ ID NO: 647192 - DNA, 415 bp, Homo sapiens
  misc_feature (1)..(1): n is a, c, g, or t
ngcgctcagcagtagcaatgatcttgatcttcgttgcgctgggtgccaggacagtgatctcctcatgcatccagtcgccaatcccagggtacatgctggtacagccagtcagcactgtgtaggcgtacaggtctttgcgtatgtccacgtcacgcttcatgatgtagttcaaggtagtttagcgtatgccacagcactccatgcccacaaaggaagcctgtaatagtgcctcagggcagcggaaccgctcattgccaatggtaatgacctgtccgtcagccagttcgtagctcttatccaggcaggagctgcgaacacccgtggccatctagggctcgaagtccaggacgatgtagcacagcttctccttaatgtcacgcacaatttagcgctcgaccgtggtgttaaacctgcc

SEQ ID NO: 647193 - DNA, 547 bp, Homo sapiens
  misc_feature (7)..(7): n is a, c, g, or t
  misc_feature (63)..(63): n is a, c, g, or t
  misc_feature (77)..(77): n is a, c, g, or t
  misc_feature (104)..(104): n is a, c, g, or t
  misc_feature (108)..(108): n is a, c, g, or t
  misc_feature (115)..(115): n is a, c, g, or t
  misc_feature (128)..(128): n is a, c, g, or t
  misc_feature (142)..(142): n is a, c, g, or t
  misc_feature (149)..(149): n is a, c, g, or t
  misc_feature (161)..(162): n is a, c, g, or t
  misc_feature (256)..(256): n is a, c, g, or t
  misc_feature (276)..(276): n is a, c, g, or t
  misc_feature (302)..(302): n is a, c, g, or t
  misc_feature (539)..(539): n is a, c, g, or t
ccggatnttctgcaagctccaggccctctgtgtgcggtttgggcctaagccaggatgtacggnggcagggggtccantgagggcaagttcttcatgttcaagcngtanctgtagnacagatgatcctnaatgtaggtttggnggttttncctcctgaaggnnccctgggcgcagcggtggggccagcccacccctggagaaaagaagggcaccgggggtgttcgggttttagttagggggatgggtgaatgcatcngggagatacgcgaggtggtntgagacccaaaagctgtggtactgtnagcggcgtcgacgtccaaggcacacatgcagaggaggcaaagggggctggagttgccaaagcagggacatcccgggggccttcaaagttacttacttgttctgtacacagtgctgacagtggaggggaactgggtctgcagcctgaggatgaaggcctccatcagccggtggatgctggccttttcaggggccttggtgtcgacggctggtgtgaagacagaaggaacggagaacangcggttgt

SEQ ID NO: 647194 - DNA, 777 bp, Homo sapiens
  misc_feature (170)..(170): n is a, c, g, or t
  misc_feature (173)..(173): n is a, c, g, or t
  misc_feature (210)..(210): n is a, c, g, or t
  misc_feature (214)..(214): n is a, c, g, or t
  misc_feature (221)..(221): n is a, c, g, or t
  misc_feature (468)..(468): n is a, c, g, or t
  misc_feature (543)..(543): n is a, c, g, or t
  misc_feature (568)..(568): n is a, c, g, or t
  misc_feature (571)..(572): n is a, c, g, or t
  misc_feature (592)..(592): n is a, c, g, or t
  misc_feature (666)..(666): n is a, c, g, or t
  misc_feature (711)..(712): n is a, c, g, or t
  misc_feature (749)..(749): n is a, c, g, or t
agcggagtcgcgagaggggctgagaaagtggtgacaccgccggggtgcggagggagtccctgaaacttctcccaacagccccagggccaatcttccctcagcccactcccctcttcgccagctcccaggtccccactcctgtaccgggggtggggtggggagccaggccngtntcccgctgggaccacacaggggccagggagcggggcngggncccccgnggcgggggggccgaccgacacgccacgccggctgggcgcccgccccacgcgggcaaggcacggacggcggaggcggaggcgggggtacgacggggagcactgggtctggggagtttcctctcaacaatcgggcgcgagaaactccccgcagcccgcgcaggaaagacccagacagtgttttcctcccggggcgccgtgctcccccgccccgcgctagccgcgctcgccgccaccagcgcgcctccanctcttaccatctcctctttctgccaccactacggggccccggtgttccccggaccagcactcatggcccatcttnactggttcctagatatgacactgtntgnngtctattgaaccagccgcancaatctgggggcaccaccctacccttggacacggggcaaaaggcgcaggtagagacccttcaatgaaagctccngtgccccgggacccctgcccagcaagaaggagcacagggtatatnnctgggtcacttttcgcagcagccgcccctcatgctantcaagggctgggatgggaaagaaaaacc

SEQ ID NO: 647195 - DNA, 812 bp, Homo sapiens
  misc_feature (667)..(667): n is a, c, g, or t
ggccttggtctctcgctgcagtcgcagtgtccaggtctcgtcttcactgctctatgtcccctgctcctagaggtccacctgtctgtggtcccgtgtacctgactaggtattggagagatccacgaggctagagacgccaggacctccctggtagagcctagcaagatggtgaccatctggatcatttacggcgatgtggccgatagaattactcttctggaggcagtgtgcatatgcctggtacatcttgccactagcagacatttgtatgaggaatgctgatgttcacgataactacgagagagacctggtcttgcctgggtcattgctgtgctctacatgccatgactctgtatcacgttgtctcggagcaacggaacaagaagccctggaatattgaacgagagtatgctgatgcgttagtccaaactccccaggttggagtgcatgtggcgtagatcttgggttacttgctaacctctgtcccctcgggattcaagtgattctactggtcctcagacctgcccgagtagctcgggattactaggcgagtgccatcatgcgctggctaatttgagtcattttttgagcagagtgagggtttcaccagtagttggcgcaggctggtctcgaacggctggagctcgatgtgatccgcctcctcagnctcccaaagtgctgggattacaggcatgagccacagtgcccggcaaagtatttttatatttcagatcatatctactgaatgattgggtgacagaaaatttgcgattgcttttacctatgggtttcaggtaaccaatggtataata

SEQ ID NO: 647196 - DNA, 698 bp, Homo sapiens
agcggagaagagaacggacggcgatggcgacggtcgcgagcaaatccagctgctgctgcggcggcgtgtggcggcggcagcggcggtgactgacggatagatttgcctacaggacgaggagctgccaggcctggacagtcagtggcgccagatagaacaacggcgagagatgggcgaagaacgtaccactgcgaggccaggcgaatagctggttccttgtggagaagcactgagtataagcagtgggaggcatacgtgcagggaaggggaccaggactccagcgacctttccctggcgtgcgatcaagcaatgccactactctttcaagatgagataaactgggcgctctcaagggagggactggtggaaggcgaggattatgtgcagctccctagcagctgcatttggcattaccgtggtcgaagctgcgtactggtctagaagcatgagccaaggcaaccattgaactgcaatggtcaatagaggcttaccataatccaagaaggtccgaacgtgtaccccagtagaactgtctgcttgtaccggctacagatcgattacgtggcgaaatctcacacatgtatcagttcagccatagccgattctattggcgctagtattgcgcacagatcgggagcgggtgtctggtggagccccaggaagagactcggggttgggggccgagaatctcaggaag

SEQ ID NO: 647197 - DNA, 204 bp, Homo sapiens
  misc_feature (184)..(184): n is a, c, g, or t
cctagttttagaagtttcaatagcacattatagaaaatagaaaagaagaataattaagctgtaattccaccacctcagtatagaatcagatctgtaaccttgcttctagtcttttttccattttccgtgatatgtatcagatatatttattttacatgagattgagaattacatcacgatactnttatccattagtacttcgtg

SEQ ID NO: 647198 - DNA, 535 bp, Homo sapiens
catccgatgtcgccacctgcaggtagctgctggaggccgaggagagccggctgtagtctggcatgcagcacatcagtattcgtacgaagaccaccaacggctatgcaggtggtctgagctcgccctatgggggcctcacaagccgcggcctcagctacagcgtgggctccagctttggctctggccggggctccagctccttcagccgcaccagctcctccagggccgtgggtgtcaagaagatcaagacacgtgatgggaagatggtgtttcagtcctccggcgtcctggccgagtgtacagctggggctgcccctcccagccttcccctcttgcgttgccccagagcttgggaaggaggccgctctccatggtagctttgggaacagtagccccccctgagggtcagcctttgcccccagcccacttggggagtttgctccctggggcccccccttgcccctgcctccggtttcagctctattggcctgggttttttttttggtccaaggtagaacctcagctagctctgcca

SEQ ID NO: 647199 - DNA, 133 bp, Homo sapiens
atatccaatggggcatacattgatgcgtcattcagcaagtcatccaaacagtcacccaaacacccatacatcatccatccatccatccatccatccaattacccatccattcatctacccaaccaaccaccca

SEQ ID NO: 647200 - DNA, 381 bp, Homo sapiens
  misc_feature (34)..(34): n is a, c, g, or t
  misc_feature (42)..(42): n is a, c, g, or t
  misc_feature (46)..(47): n is a, c, g, or t
  misc_feature (55)..(55): n is a, c, g, or t
  misc_feature (60)..(60): n is a, c, g, or t
  misc_feature (65)..(65): n is a, c, g, or t
  misc_feature (83)..(83): n is a, c, g, or t
  misc_feature (92)..(92): n is a, c, g, or t
  misc_feature (104)..(104): n is a, c, g, or t
taacgagactgtgctgaagcccagcatggtgganagaggcancccnnggtgactnacgtntgcanagtgagctctcgggggtnagcgcccanactggggattancagtcctgggcctcgagccctgtggctgactccatccctgcctctggcagcctggatttgcacctttgtataaacggagccgcctggcatggcgtttgcacttggctacttccctccatctgctggtgagctctggcttgtgctctgtgtggcgagtgggtccctgcttggttgggactcagccccgcttcaggaccccgtggccactgaggacccaggaacctgcctctgctcgagtatccggcctctgtcgtgagtgccttgcgtggccagggcc

SEQ ID NO: 647201 - DNA, 1467 bp, Homo sapiens
  misc_feature (400)..(400): n is a, c, g, or t
tgtgtgaagtctttctttgtgtgtgtggtggggggaccggggaaaaaaatatttcgtgggaaaaaaaaaagcggttttattttattgttggctttggtggtggtggagggtattattttataattattttccgcgtgaaatatattttgtggttatattttttatgtgtgtgagagagagagaatgtgtggctctcaaaagtgtgtcttttcttactatatattcaaggggagcgagatatattgtgtgtggagaaaatattgtgtttcacaatatattgtgtggatataaaatatatatattttccacacatagaggaactcataaattttcagagaggtatgtgtggtgggagaaaatatataaatataagtgttctcatatacaccacaacaaaagnacaaaacaaagagagggggggcgcgcccctcataaagatatatctctcccgcggggggcgcccaaatatttaggcggcttcacccgcgcgcatattttatgtgtgacacaagagggggcgccccccaaagagaagggcagacgcactttatacaaacccaaagcggggcacggagggcgcggaggatataaaaacaacgggcgctgggagcagcggggaacaaccgtgcgacaaaaagagggggaacacccttggcagaaaaggagaacccaccatcacacccgggagggaggaggggcgcaccaacaacaagcgggcacaacaaaacaccccaacacaagaagagacactaaacaggcgactataggagggacaaaacaataacaaacccgctacaacggcgacgatacacacggtggggttcaaacacaaaaacagaaacaaacacacaaccgaggtgcgagaaaacacaatatgtagagcacaccagagaggaaaatataaataatctgaggcgacaatctttcttatcccaccgggggcaagtagttatagtactctctacaccacacacagaacacccaccagccaaacacaaaaagagcacaacaagaaacacaagcacagaaaagaaaacagagaaacgacagatagaagacggagcaacaggagcaggaacagcgacacgagaagcaagggccacagcgggcgagaaggaggagacgcgaagaaacaaaaagatgcgcagacagaggaacgacgcacgaagaggcgggagacgcacacacagaacaaagaagaacaacaaagacatgcagacggaagacaccagcgacagcgatcgaagagatgacagaggacaagagcacgaagaagaggggcacgcagtgaggtaggcacagaaccgaagctgcaaagcagaccatcacagagagccagcgaaagacgagatcagacgagagaagcagagtgagaacgggcagcggatagcgagatgacgaacaaagcacaggaagtcggacaggaagagagggcgcagcgaacgagagctatgaagtgactacgaa

SEQ ID NO: 647202 - DNA, 171 bp, Homo sapiens
gatcttaccggtaatatgtaacctggctcactgtatatgtgcacagactccaagcacagctcctgtctttcgggcttgagtttagagacaaaggttcgccatgcttacaggctgaatgttttccctactgaacaaactagccagcctttatttcaagccgaatcactttgt

SEQ ID NO: 647203 - DNA, 1357 bp, Homo sapiens
gtcgtgcttgttctgggtgctctctgtcttccctttgttcctgcttcgtgtctcttcatcttgctgtggctactgttgggtctcgtcgcctgtgtccccatgtgttgttaccggtctctctcactgtgtgtcctgctcgtgcgcggctctgcgctgctgtaactcttcgttccgtgtccttcatcttgtccggacgtcctatattgtttggtgggtcgttggtgtcctgtctaatgtttttctcccgatcctgtggtcacggcgttccacactctagatgtggtggtgtcgttcatcggtatttcctccctctggggttttcgtcgttcgtgtttctccttggttcgcctgctcctgctctgttgtggatgtgttctatgtagtgtcggtgctctgtggtgtgctgtccagtccctgtcgttgcgcgggatgatgtctgcctcttgtcgattgtgccacgctctggtcgtttcaatgcccatgtgttgcgactacgagtgcctgttccgttgctgcggcggaggtgccctctctgcagatttcatgagttaccgtcatctttggggtctgctggagggtgatcctctagggactctgttctctgagaccccatgtgcttgttttcagccgacactgtcgtgtctccagttattcgcatctgactcgtccttcttaccgggctgttccactaagctttctgcttctgctttacgtggcttctcctctctccctggcaccctgctgcgctgcctcactgtcttacagacaggtccctccttaccctcacacctgtcctatgggctatatgggtctctctgtctgatccccaggaacttttcagaggatagcagctcatacgtaacatacaataagcacacaagtattttgggatataatcctataatgcgtgacttaatctcgatgccttaggattcacaagtgtaggaagctaaggcctagaaggttaaggatgtccccagggtcacacagtgagcggggctcagagcttgagtgtcttgtgtgctttgtgtacacttgtgcttctccctagggtgctttagaccctgtttgcttttcttctgcatgaggctgatctccagtttgtcatcaacctcgtttatcttataattgtacggatagagttgaacgttagtcttgaaagattttctaaagctagtctttcaaatctgcttcctcagaggcctaggattttgccaaaagtaccctatggaaccttgtaggaaatgcagtgggggtgtggcgatagagcaggcggcagggagacagggctgcagggcctcccaccttcacaacagacaggctctgctgtatcatggttgtacatacagggattctg

SEQ ID NO: 647204 - DNA, 305 bp, Homo sapiens
tgaactctctactgtcacaggatatatttcgtgggtcaagtcgtccagacacgccttgtctttactgaggactcctttccacccccggccaggacttatcaactaaagagagaaattactttttcttgtactccggcctacgccaccgagtgcggacactagggttgtgaaaccctccggctccgtccacctaacgaattcgagtcctcaagttctggtcagacccgttgtaccactttggggcggagatgtttttttatgttttttaatcagtccgcaccaccacaagcgaacattagggtcga

SEQ ID NO: 647205 - DNA, 110 bp, Homo sapiens
aggatccgcctacctcagcctgctgccctaggtcctgcctccaggactcttgcctttctgacacttccctaaagaaagcgagcctttccagagcctcatcccctccctgc

SEQ ID NO: 647206 - DNA, 985 bp, Homo sapiens
  misc_feature (847)..(847): n is a, c, g, or t
gagtgtctcttacgttttaaccagatgataatggacctgcccgtgaagaggcggtcatgacacagtgaagacgagaagaccctatggagctttaattttattaagtgcagaacgagtacctaatcaaaaccacaggtcctaaactaccaaacctgcattataaattaacggttggggcgacctcggagcagaactccaacactccgagcagtacatgctaatacttcaccagtcgaaagcgaactactatactcaatgtgatccaatagcttgaccaacggagcaagttaccctagggataacagcgcaatccttattcatagaagtcctaatatcatacaatagggttcacgagcctcgcatgttggatcaggagcatcccgatggctgcagccgcctattaaaggttcgttcgttcaacgattaaagtcctacgtgatctgagttcagaccggagtaatccaggtcggtatctatctacttcaaattcctccctgtacgaaaggacaggagaaatcaggcctacttcaacgaggtgcgccattcccccgtaaatgatatcatctcaacttagcattataccgcacacccatgccaagaacagggttggtaaagatggcagagcccggtaatcgcataaaacttaaaactttacagtgcagaggttcaattcctctttcttaagaagatacccatggactccgatgactcttttcaccaaagtggtccctggccaaggctggcctcatgtggtaactgggggcgcgggaaaaatactgcacacgacgaggcccgggttagaacacccaccattacggacaagagcggcccctagaggacagagaanaaaagacagggccgggggtaaaaaaactgagccgaaaactacggatttcgagggaccatcgtggggggaaatggcaccccaaaataggcggaaaaacacgctaagctcaacactcgcgatcccgtctaaacacaaagc

SEQ ID NO: 647207 - DNA, 194 bp, Homo sapiens
tgtctgtgtgagacagaagagtgtgattagctgtagcagatcggtaagatcaatatcgaggaggcatggtctgcactagaaaatttgtgtgtcagttgcttctagtccctcttacgctggtcatcactagaatatatattgtccgtatactaacacacatgccacatgcctgatctgtatctttatttcgcctt

SEQ ID NO: 647208 - DNA, 176 bp, Homo sapiens
cgggtgatgatgtgtagggcagggatatatgagaaatttctttttgtcacttttgtgtgaactacaatgatttaaaaaaataattatttaaaataattttttaactacactctgaagatgaaatcaagagtaataggaggggtctctggactcaaaaattgaattttttttttctt

SEQ ID NO: 647209 - DNA, 372 bp, Homo sapiens
gtgtcgcagatgagggtggcatcagagcttcgattgccaagcttagtcgtactttaggggaagcttgggtggggagctggtttatctgctgagctcggtacagataggtggtgatctggcaaatgtaggtcccctcgtcctgtatagtgaggccgggcagggtgagggaggcatccctggccatgcccagctgtgcaggctccagggtagcgccctttcgcacagcctgcccctgccctgcggtccagctgtacaccaactgacccctgcccttgtgctgcagtcgccactccacactgatgaggtccaagcccggtgccatggagaagccacagtccaaggaggctgaggaccccagcaggaagctcaggg

SEQ ID NO: 647210 - DNA, 190 bp, Homo sapiens
  misc_feature (32)..(32): n is a, c, g, or t
  misc_feature (39)..(39): n is a, c, g, or t
  misc_feature (63)..(63): n is a, c, g, or t
  misc_feature (174)..(174): n is a, c, g, or t
  misc_feature (176)..(176): n is a, c, g, or t
  misc_feature (180)..(180): n is a, c, g, or t
ttgcaaccgtcccccctatctaacttaagaanattttgncccaggcatggtaggtggcacgtncctgtggtccatgctgcttgggaggctgaggcagggggattgctcgagcccgggaggttggggctgcggtgagctatgatcacacccactgtacgtcagtctgcttgacanantganaccttgtttc

SEQ ID NO: 647211 - DNA, 759 bp, Homo sapiens
tggcatcattactgccgtcatgggcgtcatcaccgttcctcttcctcatcgaacacccagaagatgtggactgcgccccatcctcagcaccacggtgagccagctgagaaccaggacaaccctgaggaccctgggcaacagtccctgcctctatcagcggagagcggccttgagactggtggccaaactgctccaaggggaccatgccgcactgcagcctgcgtgccatcagcctctctttggaggcgctccgcgatcccaggccgtgggtcgagcttctcatctgcgttctgctgctttgccacgctggtcagttacacctttcctctactggctgccccctctaacatcgccaactgtggcttcacattttagctgccaacggaggcctggggaccctggtctacacttcttccgactgctcggctgcgcatccatacggcggcctccgtgcccgggcctcgccctctgtcctacacgcccctggccaggggccaccaacttcgcctgtgctcactgctcactccttggggctggcccccccattaatagtcaccctgtcccctcataccactttggccccttgccgcccgctttgcccaaggatccacatcgcggactgcctggagcaaatctagaggacggcccatgcaccaaagcgccgagttaccacgcccaccaccaacaacttgcttgccaacctgacgcgtaacccctcgagaacccacaacaagaaaccacgaaaaagcgcaaaccgca

SEQ ID NO: 647212 - DNA, 295 bp, Homo sapiens
cgatctagaggtccccggtggagacgggggtctcacacggaataaacagcatggactttatcctgggtacaaacgcagagtggatgaatggggagggaacagaatcgaggttcaaatcaaaggtaggaggctagaggcttatctatcttttgctatcacccggcaatagccagtattttatgtagcccactcctcaaaacctcttcaagaaaatctatttcgacttgtctgagtaaaagggtgcgtgaacagaggcaagactcaggtctaaaagcaaaaccagataaaagccttg

SEQ ID NO: 647213 - DNA, 309 bp, Homo sapiens
  misc_feature (309)..(309): n is a, c, g, or t
gtggccatgcatcttcagtcagaatttataatataaatgtatgcacccatttttttggagtgcatataatttggacctaaaaatccttatgattagatgaaacaccaaaattatagggaaaataacacagcaggggatagctcagcctgaacagtgttatggtccagctactacatcagatgcggtttttgtgctccctagtgttctggggatatggttgtggcatttggggctgggggtaaagactgagatactggtctgatggggaccttatttttaaggaggcacttctattttttacaaggtatn

SEQ ID NO: 647214 - DNA, 644 bp, Homo sapiens
  misc_feature (72)..(72): n is a, c, g, or t
attctgtttctcacacatttgctaaaattcctcgtgtaatttttctttagtatccttccactgtagaacagnttagagagacttttaaaaatgttgttgtctcttaaactctgtttctgtgcacactatccctcatgagcttaataatttctatgcttatacacgcctataagagaatatagcttgtctcttacacccacactgttcggagaagaacaccgtgagaaactgtgtttctagctgttgtgggccacttgctttctttctaattaattgcttagagttcttatattgcaccccactaatttcttcttctgtttgaacactgtttatgaaccacacacactttctttggtgtgaaaatagacacaaatatgtttccacgacataattggaataatgtttaagctggtcaatctatttaaaatgtctgggtggtggaaccccacgttgtccactgacacacccataaatatcacccgtgcaatttcagaaaaacttttggcaagttaatgctactattaatctgatcaatagtcactttcctttttacccaatttttaaattaagcctgtgacaaagtcattgtggctaaaaagatatgagttttttgggggctccctaaaaaagttttttttgctata

SEQ ID NO: 647215 - DNA, 102 bp, Homo sapiens
  misc_feature (79)..(79): n is a, c, g, or t
ggtatggatgaaatgccgcccttccttactgttaggaggccttgcaacaattggatttcttcacaaatacatgtaaacngactgcttgcttgaaattgtact

SEQ ID NO: 647216 - DNA, 155 bp, Homo sapiens
taggtagaaggatggattctcaggtggcttggttcgaggtctcaaaggtgtctcagctctagtggagtcttctcacagtctcgatctgtcttcagctccaaagtgctggttacaggcgtgaacactgcaccaggcctgaattaagtttttttggc

SEQ ID NO: 647217 - DNA, 654 bp, Homo sapiens
cctgaaacaatgctgttgccttatttgacgaagaagcttcgactcacaggaactaagtatggctgtggaggaggacgctgtggtgcttgctcagcgatgatatcacgatacaccctcatctccaacatgatcaggcattacccagccaatgcctgtctgatgccgatctgttctctgtatggagctgccgtcaccatagtagaaggcataggatgcacccacaccagaattcgtcctgttcaggagacgattgcctagggacatggcacccagcgtggcttatgcacacctgggatggtgatgtccatgtacacactggtctcgagccagccagagcccactctggatcaaactgctgatgccacttagcgcgaacctgtgaccttgcactggatgcagccccatcattgatgcatgcaagcatttttgcaagacatcagactgctgtcaattagctgaacgaagccctactagatctatacgctccggagaatacgagtacgtgccatcgtatccagcgcatgatcggatactaccttctgaactaaggataatagcttataaacaatatgggtggacacctgtgtcagcgtctcagacaatgaggcccggatccccgttaccctggactgctgaagttttcagcctcacagc

SEQ ID NO: 647218 - DNA, 348 bp, Homo sapiens
acctccataatgtgtgcccagtgatgcaggatttttctcagcccccctgctggacttgcggaaggggcaccccctctacttgggtgaccccactcaaccaaccccttgtgggagggaccacatgagtgagcgagtgtgggtcctggccagatgctccaggcaccaacacaggagcaagctctatgtgaggccacagcctgaccaggcgtgtcatctcaaggggaacacggcagtgcccaggtgagggtgcctgtgaccccgaagcccaagagggggcattacagtgctcctctagttttgccatccatggacgggggtgtggtagctcagttagccccttgtctcatt

SEQ ID NO: 647219 - DNA, 142 bp, Homo sapiens
aaaccctctcctcacttgtttgtaaaatgtcccgagttttcccagggctgtgtttgtttgctgctattgtttgggggggatgtggggggatttgttttatctttagcttttgttttcactgagactcagggctacgcattat

SEQ ID NO: 647220 - DNA, 226 bp, Homo sapiens
tgtgtgaattgttttcggtctggcaccccatgaaacatcttgtccacagtatacactctcatgttcaccaaggcaaggaatctctaaggtctggcgctagcgatcaattacctcatgtagggcaaggtgggtccgcaaccgaggtttaaataaaaaaataaaattgatggcagtctcttaccagaagcaggaaaagacgtcatggcaacccgggagacctatactg

SEQ ID NO: 647221 - DNA, 156 bp, Homo sapiens
taaacacaaataataacaacacccatagaaggcgtaccacctgcatcaagtggtgacatctcagagtcctgcattagctatcactccagtagcactcatgtcctcacctatgtgacccacctcagcaggtcattgtgctaaggcagaaccttgctg

SEQ ID NO: 647222 - DNA, 81 bp, Homo sapiens
gcggccgcctactactactactactactgctcgaattcaagcttctaacgatgttcggggacatgtggatcctcgttttcc

SEQ ID NO: 647223 - DNA, 801 bp, Homo sapiens
gcccagttttaacctctagtatccatgaccaaactatccctgacacatgaggacaggggcctcttctggctgtcaggagcaaagcctgaagacttggagctgcaggactggaagaacagtggagccccgtgggtctcaccctttaaggatgctgaggcctagagatgggaagtgacttgctcaaggtcacacaattggatagtgacatagctagagccgcagagttcctgattccaggtacaccgtgtgcttctcgtgggagaccaagagagtggggccacctggctaggagctccgcagcagatgcttccatcagttgtgttagctactcacagacactcaccgagtaggtctggggtcccagataggacaggcgtcagggtcgtgtgccagccactgtaggtgcatgctcaagaccttcatagcgctctcttgtcattctttgttgccccttttctgtcaccagccaaccacatagccttgggaccagcctctctgggggaccagaagtagtgagagaaggaacggggatacggcagctttgacaggtgctgctttcaattcctctgcaactcctccaccttaatatccccaatataaacaaagattctgccaactggtggcaaacctacagacaccatccacggcctcggcaggccactgcccaagataaccctgaccatggcgaggtgggagagagtggccggcgcaagccagtgagcggaagggtgaagacgggcaaacggaggataccaagggcccagggtacacacggataccctcaacaaggacagaggtgac

SEQ ID NO: 647224 - DNA, 789 bp, Homo sapiens
  misc_feature (30)..(30): n is a, c, g, or t
  misc_feature (64)..(64): n is a, c, g, or t
  misc_feature (70)..(70): n is a, c, g, or t
  misc_feature (118)..(118): n is a, c, g, or t
  misc_feature (129)..(129): n is a, c, g, or t
  misc_feature (132)..(132): n is a, c, g, or t
  misc_feature (136)..(138): n is a, c, g, or t
  misc_feature (142)..(142): n is a, c, g, or t
  misc_feature (146)..(146): n is a, c, g, or t
  misc_feature (148)..(148): n is a, c, g, or t
  misc_feature (152)..(152): n is a, c, g, or t
  misc_feature (161)..(161): n is a, c, g, or t
  misc_feature (230)..(230): n is a, c, g, or t
  misc_feature (235)..(235): n is a, c, g, or t
  misc_feature (238)..(238): n is a, c, g, or t
  misc_feature (242)..(242): n is a, c, g, or t
  misc_feature (247)..(247): n is a, c, g, or t
  misc_feature (252)..(252): n is a, c, g, or t
  misc_feature (294)..(294): n is a, c, g, or t
  misc_feature (399)..(399): n is a, c, g, or t
  misc_feature (415)..(415): n is a, c, g, or t
  misc_feature (475)..(475): n is a, c, g, or t
  misc_feature (483)..(483): n is a, c, g, or t
  misc_feature (492)..(494): n is a, c, g, or t
  misc_feature (497)..(497): n is a, c, g, or t
  misc_feature (539)..(539): n is a, c, g, or t
  misc_feature (576)..(576): n is a, c, g, or t
  misc_feature (603)..(603): n is a, c, g, or t
  misc_feature (609)..(610): n is a, c, g, or t
  misc_feature (615)..(615): n is a, c, g, or t
  misc_feature (625)..(625): n is a, c, g, or t
  misc_feature (632)..(632): n is a, c, g, or t
  misc_feature (637)..(637): n is a, c, g, or t
  misc_feature (662)..(662): n is a, c, g, or t
  misc_feature (678)..(678): n is a, c, g, or t
  misc_feature (687)..(687): n is a, c, g, or t
  misc_feature (697)..(697): n is a, c, g, or t
  misc_feature (715)..(715): n is a, c, g, or t
ggaccccgggagtgagagcagcccaaggancccagggtgcagggaactccagagcggcccaccncccacngccccctcagcacacacacagtccccaggcggcctagggcccaaggcnggggcggcttnggncccnnngccnggcncngccngccccactnctaagccaaagaaaggagaggcaggtgctcctgtaccccagccccactcagcactgacagtccccagcncctantantaanctggnaggcncttcctaagaccctttcctcagggctgccctgggagctcatncctggccaacacgccctggcagcaccagcagctcttcccacctccagctgccaaacagcagcctgccgggcagggagcagccccaggccagagaggcctcccggnccagctcagggatgcncctgccagcacaggggccagggactcctggaacaggcacatagtgagcccgggcagcccngcccagcncaggccccnnnccntccccattgaggttggggtaggtgggggcggtgagggctccncgttgtcagcgctcaggaatgtgctccggcagagtgntgaagccataatccccaaccatttccnttgtgnngcccnggtactcagntggcccnctccncagccaggcctggccctgcccttcnccgtggatgttttcanaagtggccntcgagaggtntggatggttttatagcanctttgctgtgattccgtttggttctgtaaatatttgttctatagataagatccaaattaattttttccccctta

SEQ ID NO: 647225 - DNA, 331 bp, Homo sapiens
  misc_feature (291)..(291): n is a, c, g, or t
gagcagcatccctgacagcatcactccctatgatttcatccctgaccaatcaacactcctgggtcgctggttccccccacccaccaagttatccgttaaaaactctgcttcccaaatgcgtgggaagactgatttgagtaataataaaactccagtctcctgcacagccagctctgtgtgaataactctttctccattgcaatttccctgtcttgatgaatcggctctgtctaggcagctggcaaggtgaaccccttgggcagttgcaaatttgggggctcttccaggatngcccttgtggctacctgcccctggttcagtggcccctctt

SEQ ID NO: 647226 - DNA, 115 bp, Homo sapiens
tttatgaaacctgtcatcaaacccttcatcaaaccctgtgaacctgcggaaagctaatataagaaggcccccaaatggctgtagtggtctacttgtatacggagggtttcgatga

SEQ ID NO: 647227 - DNA, 144 bp, Homo sapiens
agtttgggggtgggggggggtaaaggaggggatggtttatttttaaagtttagttttttttttgccttaaacgtcctgttgtggggtttttaaaaaacttcctactgtattaataaaaaaataaaaaattttaaacctgcttta

SEQ ID NO: 647228 - DNA, 922 bp, Homo sapiens
gtactaggacaaagtccccttgtgttatctctcgttcggaacggtcagtatcatcattccagacagacatagagagaatgtcaacgtgaattccagtgtgaccccaaagaggttccctgaaccagtatatgaggatgtccgtggttcgggtgcctggtatctaacgatggatgtgtatcttctgctggaaactgtgtatcttagtggagcttatccagatgagtgagaacagcgcgaggaatcccatcaggcaacggatccatctggctaatgtagccagtcgtcagatagaagcagccaacagagaatttgtgcaagacggcaacacttgtgactgagttactgtccgagcacaaagagaagatgaccgagagactcttgtcagccaatgcagggacacactctggtgttaccaacgaactggctgtctgcagatactattcgcctctggcaaccctgatgcttgctacaaacctataggaaagccttacactggtaaattgtccatgctatctagaggtttggatgtcatcttaagaaagacacttaaagagcgatcagatttactgattgcattgtatgcttgtaagtcacgaaaggggtttgcgcccaatattcgctacctattatgcagatttgtatctttcgcttgtcagacttagctgattctgtcattcgtcagggatgagtaatacctgctaggttgattgcaccttatttaaagcccattgctaaacgatttcggttccggcaattttggaatcgaaatcgggcgggccgggagtggctctagccgacttaggggggagaacccctcctcggtgaaggggcctggcggacatgctggacagagtctccaccagcggagcacacaactaacggacaaacggcacgcctaaaaatatatccactaacatacagg

SEQ ID NO: 647229 - DNA, 124 bp, Homo sapiens
aacgaggtcctctagcttcctcacaggcattcactatcactcccagctaataaaataattgtagacgggtctcgttatgttgcccaggctggtctcgaactcctgggtttaagtgattcccccg

SEQ ID NO: 647230 - DNA, 196 bp, Homo sapiens
  misc_feature (125)..(125): n is a, c, g, or t
tccgtggaccctaccccgccggctgagaagcgtcacgtggggcgcctacggaaggcgctactgaataagtaccgaccgctcttcaaacgataccgcgccatgttcgccctgcgcaacgcgggagncgaggaggtgagcctggcgctggccgagggtctgcactgtgggagcgcctcttccgccacgggtcggtacg

SEQ ID NO: 647231 - DNA, 100 bp, Homo sapiens
gaccatcttggcctcggaggcaaggatatccaatagctttacaatttgttgaaggagcccacagaaaaggttacccttttccccatccatcgatgatagg

SEQ ID NO: 647232 - DNA, 181 bp, Homo sapiens
ggtgtctagaggatcccgacaacatagaatgtgtggaagggtggtagggcatacatatatgtcactccagtgtttataggacgggtactatctactatataggacttttcgctatcgaagcgaagggttctcaaatcatgaaaattattaatattactgctgtaagcagggtaccggagct

SEQ ID NO: 647233 - DNA, 1014 bp, Homo sapiens
gaaataattatactagcatttaaccatctcgaacttctaggaatactagtatatcgcgtcacacctcatatcctccctactatgcctagaaggaataatactatcgctgtgcattagtagctgactctcataaccctcaacagccactccgctcttagccaagtatgtgcctattgccatactagtcttgccgcctggaagcagggtgggcctagccctatagtctcagatctccaacacatatggcctagacttacgtacataacctaaacctactccaatgctaaaactaatcgtcccaacaattatattactaccgactgacgatgactttgccaacaaaacacgtaattgtgaatcaacaaaaccacccacagcctaattatcagcatcatccctctactattttaaaccaaatcaacaacaaactatgtagctgtaccccgaaactttgtcctccgaactccctaaagaagcccgctcctgagtaaataaactacctggagtcctaacgccttcgacaatcgatgggcgaagacaaggccaacgttaataccaggtgaagcactataatgaaaacaaactctaacttctgctataatagatctcacctacggaattctacctcaatttataacccgttcagaggccgaagacaaagttaattcatatgaattatgtggttcgaaagcacagctgatgcccgacttggctatcaccaccgagaggcacacggcacggaaggcggaagtggagccgtaggagtaatgtacaggcacaatagggcgatgcccaccatggcgggatggacgacagaaccaggcacacaagtgacaaccgactacgggccgaaagtgggacgggagagcagaggaagtacggagcagggaggagacgcggaccaggacgagccgagagcccagggcaggcgcgaaaacaggagacgatcccacaccagagaggagcagaggacacgggagaggggggggaagaggggcaccagcaaccaccagg

SEQ ID NO: 647234 - DNA, 103 bp, Homo sapiens
ccatctgattcgcgctaagacactttatcctttcaaattcctaccttccccctccctttagcgcacacatccagtttaatagatactatccctcgtgtctcat

SEQ ID NO: 647235 - DNA, 109 bp, Homo sapiens
cttacctgggggggactgctgagattgtatgggtatggagacatgtcatatagtgtgctagggttagtggtcccggagggttagggctcccggaggttagggctcccgg

SEQ ID NO: 647236 - DNA, 254 bp, Homo sapiens
agagaaggatgtacctcatttttggggataatgtaatgtggttcggagcagggcgcgatagggtctagaatcagactgtgctaggtggtacatgcaggcgggctacttaggggctggatcaacttaggcaaataggtgctgtaaaagtagtggctataatctttattaacttcatattttatattttaatatgaaattttatatgtgcaaagagtcttggggcattggtcttcttcggttcccgcggggtaccg

SEQ ID NO: 647237 - DNA, 416 bp, Homo sapiens
atcaataatcatgctggtgcctcatgaagaccagccttggtgccctgatgaaagtcgtcgatggcccgcgagcccataaagaggatccgcatgtgcgtgtgtgtgtcgatgcctccgggcagaaagagctagccggcggcgtcgaggactcctagctccgcaggagcgcctccgaaagtcagcaggtcgtgccagagtgaccgtaccacgccgtcctcaaccagcacgtcgaccacctccgaaaagtcatcgttgaccacgcgacctccacggatcaggagacgcgagggcgccgccatagcgaggggcgcgcggggtcctactcggaccggactgcgcacagggtctgggttgggcggcccggacgggcttggggtgccctcctgcaaggtccccaccgacagcccgcgagctct

SEQ ID NO: 647238 - DNA, 352 bp, Homo sapiens
tgtgagtgagagtggcaatgtaatggagagaagctgactgtaacatgaaatcgtatgttgtcacctggctgagtgaagaaaggaataggggaaaatgtaacaaattgtgaggctctatgactcaggtttaacatttagagagtcacaaggagaacagaaaagaatggtgggctataaggtactaggtacagggtgtgtttaccatgacatttcacttaaaagtaacacgaggacagctttttggtggaaaagaaggacctgaactggtgaccttcatcgctgttcttttaagaagacaagtgccgcatttcttgaggcctagagctgcagaaggacattccccatcaacacg

SEQ ID NO: 647239 - DNA, 247 bp, Homo sapiens
ggatcccctaaatctccgccttacccacccaacctcaccaagaagatgaacaagattgtgtatgccgtgatcaagtacaaggacagcagtggacgtcagctcagcgaggtcttcatccagactgccctcgacgaaaggagctgcccgagctactacgagtctcatccgaaagacccgatggacttcaagtaagataacaggagcgactttcgcaacacacaacgtaccgacagcactcaagcgacct

SEQ ID NO: 647240 - DNA, 468 bp, Homo sapiens
  misc_feature (28)..(28): n is a, c, g, or t
  misc_feature (30)..(30): n is a, c, g, or t
  misc_feature (75)..(75): n is a, c, g, or t
acagcagaccacggtgggcggcaacagntntcttcccagatgctggcgttaccgctagaccaaggagccctctgntggcccgtccgggcataacagaaagctcgcactcttgtcttctggtcactcctcactgtcccctcagctcctatctctgtatggcctggtgcctaggttatgattgtagagcgaggattattataatattggaataaagaataattactacaaactaatgattaatgattcatatataatcatatctaagatctatatctagtataactattcttaatatattttattatactggaacagctcgtgccctcggtctcttgcctcggcacctgggtggcttgctgcccacatccaccaagtgcactttgggaggctgaggctggaggactgctggaggccaggagttcaataccagcctgggcaacatagggagaccccccccccaccatctcc

SEQ ID NO: 647241 - DNA, 218 bp, Homo sapiens
  misc_feature (4)..(4): n is a, c, g, or t
ttgntgtgctctagcggatcccttcagacagcggacccacccactgcttgtttagtactcttggctttgacatactgacaggtgctttatgagaccccaatcaagacccccatgtcacaggtacttagtagagacaccagaccttttcaaacaagggacaacaaggaaaatcggctggcccattgtctctcctctgtgctaagtgagatgaagggggg

SEQ ID NO: 647242 - DNA, 415 bp, Homo sapiens
ggaggcaggcctcgctggatatgcgaaggaaggttgaagtgcaatgttgtgatctcggcggcactgctaccttctgcctcccagggttcactgcgattctcctgctttgtcctcctgagttactcgcgattgctgtgctcagtggctctccctgcgaaggaagagtgttctcgcgattcatcgttcaaggacggagggctgtcccatactgaactagcacttcctgtatatccctgaggcgagagatgccaaccggacccgaggcatcgactggcactctggttccatccctggtctcctgggaatcagctggatagcagcccctgccgccagagcagttctgggcttcacggctcgattttatggaaagctgagtcacgggagagactccttgttccgtccaggaagcttccga

SEQ ID NO: 647243 - DNA, 149 bp, Homo sapiens
ctgggtttcctcctgttgggccggctggtctcaaacttctgacctcaggtgatccgccgccttgtgcctagcaaagtgtgctgggcttaccggagtgagccaccacgcctgggctttaaaccatttaaaaaccagttaaaattcacggt

SEQ ID NO: 647244 - DNA, 357 bp, Homo sapiens
gtgctggtcgtactctacaggtatcccctccaagtctttgctattgtgattagctgccacaatacccatgtgctgcgtctgtgatttatagcagactatgatttatactcctttgggtatatacccactaatgggatggctgggtcatatggtatttctaggtctagatcccttgaggaatcgccacaccgacttccacaatgtttgaacttactttacatttccaccaacagtgtaccagtattcctatttctccacatcctctcctgtctcctgcttgtttcctgactttttgctgatcgccattctaactcgtgtgtgttggtatctcattgtggccatgggcgtgagggtacc

SEQ ID NO: 647245 - DNA, 934 bp, Homo sapiens
gaattcagatgtttatgcccaaagaaaagcaggatttcgttcagcacttctcccagatcgttggggtgctgactgcggatgagatggggcacccagagctaggagatgctattgccggctcaaggacggtcctggagtacaattgccattggagggaagtataaccggtggtttgacggtggtagtagcattccgggagctggtgtgcgccaaggaaacaggatgctgatagtctccagacgggacctggactgtgggctggtgtgtggaactgcgtgcacagcattcttcctggtggcagatgacatcatggattcattcccttacccgccgaggaccaggattctgctgattatcagaaagcccggggcgtggcgttttggatagccatcaatgatgcttaacctcctggaaagcaatgtatctaaacgcgtgcttgaaaccctctacttgcccggggagcacgccctattagcgtgaaccttggatcagagctcttcctgcagaggttcctatcagacttgcagattgaaacaaaccgtggaagctcctcagaaacccccaaagcaatgtggatcttgttccagattcactggaaacgagcgtacaaaaatctaattggtcgatctacaagaacagcttttctaactacttctaaccttgcctattagctggcgcgcaatgtacattgcagggtgatagtgggcgagcacggtgcgcaacgccagtgccaagcagatcctggatggaagaaggggaattacttcgcagatacagaagggataacttgacccagctttggagaccccatgatgaccggcacaattgtgactgcaacttcaggagacataaatgcagtgactgtggctcaaaggttgtacagagccctccaaacacacgaactgaagacaactcgaacaaggtctaaatgcct

SEQ ID NO: 647246 - DNA, 663 bp, Homo sapiens
ggcaaagccatttatcacttggaaagcgtttgtggccaaagttcatggcactgttataatgaagttcatgtgatggatggatggaaggcatgatgtactagacgttctgtcagtctagttcttgcaaatgattgtcgtcagtcatcagtattgtaccataccagcgttatattaacaatgagctggtgtggtacaattaactgaacttcaatcatgtcgtatttgcgtttatttggtaataacttctctgtgaactattaatcatcctctgagttaaataattgctcctatactattgaagtatgtagtttagtacataacttagagactttagagtctaacgaaaatgcatcttaattgactttaagcattggttattcaagtattcattgtggatcctcctattctcttccgtactaatactctcacctgctaaaggagatatacacataagaaagcaaagattatatctaccattttatccagatgaccatttactgccacaggtaacatgatagtagacacaccattatatttaactactagatactctcaatgaataactggtataacagacaggacaatgtaaagataacattctgaacaaaataaaacactagagatggacaaaaatcggcagcatacacaataacaagacagaaa

SEQ ID NO: 647247 - DNA, 227 bp, Homo sapiens
gtcttgactaaaaaaacctttggcgctgcgactagatgcgttagtgtatacaagtgaaatgctatacaagttgaatgctggccgagcgcagtggttcacgcctgctatcccagcactttgtggatgctggggcatgttggatcacctgaggtcaggagtttgagaccagtcctggcctaacgtggcgaaaccccatcgctacaccaactagaccttagcaagccatg

SEQ ID NO: 647248 - DNA, 399 bp, Homo sapiens
tagaatgaaagttaaaatgcatctgctttctatacgctttattaaaggtattgtacttttattcccagaagaatcttgtttgtgtggtttgatggaccccttatgtaaatattttaatctgtaacacctataaaacatatcctctattcatttgcagatcttttcgttgtaggatctaggtcacttttttcattaaaggtcagttgatcagatgtactggccaacatttccaattttagttcctttaaaatggagcacgaacttagacacttgtgaaacaacatgagtacgcctatctagatcttataattattttttattttttagattattttttccaattgaattcaagagcagtttttaaagacagcctgggtaacgagcgagactccatctccc

SEQ ID NO: 647249 - DNA, 292 bp, Homo sapiens
cggcacgaggctaaaataagagttgaaaaaaaagaattatttgctttgctgtttagaatggtttggcatacttttttttagagggccagagagtaaatattttaggtttgtggacctatgctctgtgtcttagctactccactctgccactgtagccctaaagtaaacacaatctgaaacaaacaggcatgggtgtggtccaataaaactttatttacaaaaacaagcatctggtctgagggcctgtttgccaacccttggtttaaatatttgttgacctaaaaaaaaaaaa

SEQ ID NO: 647250 - DNA, 651 bp, Homo sapiens
  misc_feature (542)..(542): n is a, c, g, or t
cttttttacacctcttgcctggacatccaggcatttccgtacatctactgaaatctaggcagaggttccaaaccttcatttttgtcttctgcacacccacaggacgaacaccatgtggaagctgccaaggcttggggcttacaccttccgaagcaacagcttgagctataccttggccccttttagctacagctggagtggctgggacgcagggcaccaagtccctaggctgtacacagcagggagcccagtgccttgtccaagaaaccgtttttccctcctagacctctgggcctgtgatgggaggggctgccgccaagatctctgtcatgccctgaagacattttccccattgtcctggctcctccttacttctgcaaatttctgcagctggcttgaatttctccccagaaaatgggtttttcttttctacagcatcatcaggcttgcaaattttcaaacctttttgctctgtttccttttaaacataatttctaatttcagatcatcacactcaagtttaaagttccacagatctttanggcaggggcttcttctagtctctttgcttaagcattacaggagtgacctttgctttagtctcgataagtactcatttcatctgacttgacttaattgtcttattgcttt

SEQ ID NO: 647251 - DNA, 281 bp, Homo sapiens
gttggtgatctagaggatcccggccgccactgggtggcggggagtcgagatcacaccaccgcactccagccggggtgacagagtgagacttcatctcaaaaaaataaaaaataaaaaagtttagagcaggaatgaaaggaagcaaagtacactgggacagagggtcaagtggggcaacataaagagatccaagtgcccggttcagccctggggctgggggatttaatacattgggcattgggttccgggggcttgggtgttttttctttccctttaacttt

SEQ ID NO: 647252 - DNA, 1573 bp, Homo sapiens
  misc_feature (354)..(354): n is a, c, g, or t
taatcacaacaataagcgcctgtactgtgggggatctgcaatttgaggaggccccagctcctcattgtaccggggtctattgggacagtgaccttgctcgtggaaacagattagattttccttttacagcctgagggacattgatgtggataggaaccccggtgtggcatctcagttgggccctcatataatcacccctgacaagcgttctcattgtctcacccaggtctcctacattgtgttcagagacgacagtgtgtggagactcctccgctggccagatggattgttacacactgtggctccttataaagagaccgagaacacctgtgacagctttctcccttctcacanctgtccgcctcctgtggagaccttgtgcgcaaagtgacaagggtgagcgagaccacaatttacaacactctcaggggggccagtgttcgccaaagataaacgccgggttataacaccacaagtctacgaaggccacatatcttacagacgcccccacagggactctttgaatgtgtgacatatatggtgagcgccaatatttacccgcggagtcacactagtgaggtttgaaaagatgcggcctcttagcgaagaggataacataaaagtagtgagacgactcatgtgggtttacagagggacagtgtgtgtgcgcccgtgatcgatgagagagatactcacgagaaaacaattacacccctgcgggggcgacaatctctacgaattactactcaagtagtggcaaaagggcggagatcatcactccccccacaggagcagtgcttcaacaatcaaagggagcgaccaccaacggtcgcagtgtctgtgggccccgccgggcgaacacttctgcggtatacctccgaggttaccccttctgacagaagagaagatccttccccagaggggagaaggcatccgtggcgcgtggcggttgggtgttggccccacaactcactgtatagcgaacgagttagggcggccacaaaacatattttccaagaagggagggacaaccccccaccctgtaatatatgtatagaaagaaccttcagaaataatccttccagcaacacacaactgttgtctccaagggggagggactataattaacgcggaagagcagaacaaaatagaggcgaatgtagcagctcccacaagttgggaagcgattctctacatcagaggataatatagacaaaagacacgccttagattagacaagagggcggacacataagggagaacaacaatgtgagagggagaacaaaccaaccacagaaggagaaatctaccagcaacgcgaccactgcagtggaagaaccgaaagaaaagctaggatagaccaaaaaacaaggacgacaatccactacaaaccacaacaagtagatcaacccaagggcaggagaaattcacaaagcagcgacaacagtcagacaaccgcacgaaagaagtgaggcaacaagccacacccgcaatgtacgagcacagagatgagcgaataaaacacacaacaaataagaggaacacacagggacgggccccccgtagaacaccg

SEQ ID NO: 647253 - DNA, 114 bp, Homo sapiens
  misc_feature (25)..(25): n is a, c, g, or t
  misc_feature (80)..(80): n is a, c, g, or t
atatgctttgatgcatagttttganctaatgtaacatgatttttcttttttaaaacagcctgaaaatgtactagtgtttnaaaataaagatttccattttctccaaaaaaaaaa

SEQ ID NO: 647254 - DNA, 473 bp, Homo sapiens
taagtcacaggatacattaaccatgtcacttcccatcatggaaccactcatggatatgctagatggaacgcccggattcgctatcataacctatgccaccaccacctcctagaggtgaaaatttctggcctcctgaaccatagggatctcccatgttcattgctcctccgacacccattacgcatgtctcttacccgtggatccatgtagcccatacggatgtaacttatcctctctttggcgcctcatttgttattccatctcacgtagacgaatcatcatctcttcctctctactacgtcgtacctcctcttgcctcaattgcattatctttacgtatctgcattactatgatagtgaagttcttccatgcgtcttaatacttcccgtcgtctcatcaggaatcttggcgcacaagattggccagatgttcatgataggcatcttccatttcacttacacatttggcgcga

SEQ ID NO: 647255 - DNA, 646 bp, Homo sapiens
  misc_feature (448)..(448): n is a, c, g, or t
ggaatggtggcaaccaacctaaggtggcctcaggatgcttggatattaattgtcatctgtgaaaggggctcgttgtgtcgagattctgtgatgcattcatagtattccactcatcacttttgttgatgtcccttgtgcttttcgtagcctggcactagcacaagagaatacgggggctatcatccggcatggtgcacaagcttctcatacgcgatttgcttgaggcaactgtaccgcaatagtcacagttcatcaccaggaaggcctatggtaggtgcctagtgatgtcatgagctctagatgcacccttgtgtggtgataccaacgtatgcctggtccaccgcatgagtatgcatgtcatgggatgctaaagggcgctgtggagatcatctttcaaagggcatgagaatgtggaagctgttgcaggcatgagtagcatcgagaagtntgccaaccctttgccctgctagcagttgcgaggcgtttgtgggatgcactatcatccaaccttcttccacacgtgcccgatatctgctgtgaccgggatgtcttggtccagcatagaaggtacgacgtccttggtagaaaacatgtcgaatattccatttgttaaacaaactcaaaggaataggaacaccaagaactg

SEQ ID NO: 647256 - DNA, 745 bp, Homo sapiens
tttttattttttaaaaagtcatggaggccatggggttggcttgaaacccagcttgggggggtctcgatccctcccttttttggtctaaattttatgtttacgggtccttcaaatgtgtggtagggtggggggcatctccattactagctcacctccaggtttatatggagggttctctctacttatctaggaactttctcagacatatcgacaagcagaaagagcttctcctcaaaactccagtgcaacaattcattaaatatatcacgtgcgtgtacagaagaaagtgaatgagcctacagagtgatagagatgttctcagtgtggtgtatgcatcggggtagcccgagataacgtcggggcatcccggcataggccgaacaaacgtgttgtcggcgacagacagttagatttacgccgatgaatatgatccgtgaaagggatttgggcgtaggtaagggccaagggtgtacgcctgagaactcgggggacacactcaagtgaatgaagccgaggaaaaccgtgtacatattagccagggtcaaccccaccggtgtcttcggacatgtgacgtcgacgggcgagccctatgggccgggaccccttgagagctgttggcaacatggtcccaaaaacagcagatattatcgtgccctgaaccctggacaaaaaagggattcggtcacaggggcccagcttaccaaatttcccgggataagttcccgggtggacataccccgcaaaa

SEQ ID NO: 647257 - DNA, 638 bp, Homo sapiens
  misc_feature (562)..(562): n is a, c, g, or t
caatataaaaagcgggctgagcgcagtggctcacgtctgtaatcccggcactttgggaggccaaggcgggcggatcaggagtttgagaccagcctggtcaacatggtgaaaccctgtctctactaaaaatacaaaaattagctgggtggcgggcacctgtaatcccagctacaagaggctgagagaggagaatcctttgaacccaggagttggaagttgcagtgagccaagatcgcatcactgcactccagcctgggcgacaaactgggctctatctaaacaaacaaacaaacaaaaaaccccacaaaaacttctgaggggaatggaaagagagctcaacaggtttgctggacagctctgagggtgtccagaatggagcccctgaatctgttatgccatctgctgttaatggttgtgtggttttctccttggtgttgagtatcctgaggagaggaacagagaaggtgataggtagaaggatctggggttgggatttggttgagtgagtgtttaagagagtgtgagggagttgagatcattggttagtgggcagttgatgtangatggaggagaaaggagatgtagacagaagaggcctgtcagagaagaagaaaatagaggtgctagcaaattggagc

SEQ ID NO: 647258 - DNA, 132 bp, Homo sapiens
catggaaagtatgaatggaaagactttggtgcaccgaatcctcatgactgcctcagagccaatcttccgagtaaggtatctctgtatgttccttctgtaatgtctgtacttggacatgggtcatgttcggtg

SEQ ID NO: 647259 - DNA, 105 bp, Homo sapiens
tctgacgagaggagtgagtcagctgagtcaagaagcagctgtcattgttcagtgcactccccagagttcagtggcagttctgaaagtgaggagaggaatgtggct

SEQ ID NO: 647260 - DNA, 1178 bp, Homo sapiens
  misc_feature (529)..(529): n is a, c, g, or t
  misc_feature (531)..(531): n is a, c, g, or t
  misc_feature (613)..(613): n is a, c, g, or t
  misc_feature (634)..(634): n is a, c, g, or t
  misc_feature (656)..(656): n is a, c, g, or t
  misc_feature (726)..(726): n is a, c, g, or t
  misc_feature (732)..(732): n is a, c, g, or t
  misc_feature (738)..(738): n is a, c, g, or t
  misc_feature (748)..(749): n is a, c, g, or t
  misc_feature (756)..(756): n is a, c, g, or t
  misc_feature (767)..(767): n is a, c, g, or t
  misc_feature (769)..(769): n is a, c, g, or t
ctgggcgctacgtcgtcacctctgtgtcctggatgcagccataaggttggacaacgcgtacgggctgtgagactttccagccacgcctcctgcagaagaacaacaaggactcgtttctgcacagctgctgtggcggacccgggctcccagcactcctgaggccatagaacagatcaagcaaattaaaaaggatctgaagaaatactctaagatctttgatagcagaaggatcgctttagagctcagctccataagtcctcagaggagtgcaatttggtgcgcatgtatgaagcgcgcatccatgcatggaagatttccggagagtaccggaatagatggtccctacggtagtctctatagttggatgccagaacaacacgagcgcctggagttgcgaggaggggtggacactgacaagctgcgacagcaacggtggacgtactggtgcacagaggagaccggattgatgcttcttcgtcgactgtagagatagcctcattcccctcgtgtgcactcacggagtgaccgngngcactgtggggacggactccgcctgctgttcccgcgctgagctacaggactcccgagtgtgagccgcggttcctctgttgcngcgcagccgtgtgtgctgtgnagccgaggccgtcctgcaggangccgcgtgactcccggctcctccctgtgctctctggctctggactgtgactgcgcctggattctgccatngcgacncatttntgtgcctttnnagccccntggtgtctgcngngggggatttaaggcacccgcattccacttctttcgtgttggagttgttctgttggaaccgtcggcggtggcgtccgaagacttagcgacgccgactggcgtgcaagcttcgtcctgtcgcccagtgatgttgtccacggtgcctgtacgacagcctgagcatgcatttccgttgaaggacttgcatcctcgcattgcgggctagtgctggacgtgtcccggagagccatgcgggagggcgccgacatgccgttgtaccaccgcatcgtgcaggttgtaggccggtttgctccgcaggttgaacatgtgaaataacaacgcaaaacttgtcatgaaaaaaaaacccaataaaagactcggggggcataatgagaggcgcggggaacaaagggtcttggacctggcatagg

SEQ ID NO: 647261 - DNA, 702 bp, Homo sapiens
  misc_feature (250)..(250): n is a, c, g, or t
  misc_feature (256)..(256): n is a, c, g, or t
  misc_feature (262)..(262): n is a, c, g, or t
  misc_feature (272)..(273): n is a, c, g, or t
  misc_feature (280)..(280): n is a, c, g, or t
  misc_feature (291)..(291): n is a, c, g, or t
  misc_feature (293)..(293): n is a, c, g, or t
aactcacagcggctggacttcatgtatacagagatctatctccaagccctcaaagcgggagatgaagtccttcagattaggagaaggcgtccaagcacttggactcaaatatacggtggaggtcatggacatcatagacgagaaaatctacaaaagtgatcttgtatcctgcaaaccatggccgcgtgactcccggctcctccctgtgctctctggctctggactgtgactgcgcctggattctgccatngcgacncatttntgtgcctttnnagccccntggtgtctgcngngggggatttaaggcacccgcattccacttctttcgtgttggagttgttctgttggaaccgtcggcggtggcgtccgaagacttagcgacgccgactggcgtgcaagcttcgtcctgtcgcccagtgatgttgtccacggtgcctgtacgacagcctgagcatgcatttccgttgaaggacttgcatcctcgcattgcgggctagtgctggacgtgtcccggagagccatgcgggagggcgccgacatgccgttgtaccaccgcatcgtgcaggttgtaggccggtttgctccgcaggttgaacatgtgaaataacaacgcaaaacttgtcatgaaaaaaaaacccaataaaagactcggggggcataatgagaggcgcggggaacaaagggtcttggacctggcatagg

SEQ ID NO: 647262 - DNA, 261 bp, Homo sapiens
gtactggagaatgctagaacttatttactgcatttatgtagtactgagcggaaaaagtgaaagacgttcataaatgcttattgaagattagtgtagaagaaaatagattttaaatgaatccccaaaccataatgacagattcggaattaggtaaaaccaaggtttctaaaagcaaattttgaggggttgccaacaaagtttgtctcttacattcaaccaaatgtgtttgcatttgaaaattcagatgagtggattggtcat

SEQ ID NO: 647263 - DNA, 175 bp, Homo sapiens
gactcaggccctcagaggagcctcgtggtgtcggcatctacaggtcctatatatataaaaaaaatttaatctttattttatttatatatattctctcagggtgtgtaattttgtggctggatttaattttatctttgtgcttggagatctttggccctcatatgccggggccctt

SEQ ID NO: 647264 - DNA, 529 bp, Homo sapiens
ttttcacaaagctaaccttttttaaaagcatgtaaaaattggacatttggacatatacccattacaattttacatccaaagatcaaatagttaacagttcatttagggctttttggattggttgattttccaaattctggcactcccttggctttgacctaacctgacattattttgtcacattattttctaaatcaagtaaacgttcatttgttttagtaagcacaatttatttgggtgacaccagagaggtttttgaagggtctggtgtaccctgaggcagggaaataggtctgttggcacaggtaaaaaggaaggggcttgataaacattacaaccccggggaacagccttccagaggggcacaagcactcccaccgagatgggccagggcccacccgttaaagagtcaaaacccaaagtttcttggtgtcccacaaagcaagtcacacttgcctttcaaaggaaagggaggctgtttcagggcttaaatgaaaacgggggcacttttgaacactggggggtttgg

SEQ ID NO: 647265 - DNA, 256 bp, Homo sapiens
tgtacacgggactcctcatcccctttctccaccaaaggcttcacctcagcgagtctacatcctgcatctcccgagacatgtccctgctgtcacctgcctgcaaggaaacaagggccaacaaggtcacacacttcctgctgcagaggtttcctaaccggaagcaaatccaaggaccaagtggcaagaccggccaggccttgcgctctgcccatgaagtttcacctaccctcgtgatgcacgtggggtacctgagctc

SEQ ID NO: 647266 - DNA, 801 bp, Homo sapiens
  misc_feature (40)..(40): n is a, c, g, or t
  misc_feature (94)..(94): n is a, c, g, or t
  misc_feature (147)..(147): n is a, c, g, or t
  misc_feature (242)..(242): n is a, c, g, or t
  misc_feature (270)..(270): n is a, c, g, or t
  misc_feature (284)..(284): n is a, c, g, or t
  misc_feature (293)..(293): n is a, c, g, or t
  misc_feature (297)..(297): n is a, c, g, or t
  misc_feature (302)..(302): n is a, c, g, or t
  misc_feature (306)..(306): n is a, c, g, or t
  misc_feature (394)..(394): n is a, c, g, or t
  misc_feature (420)..(420): n is a, c, g, or t
  misc_feature (424)..(424): n is a, c, g, or t
  misc_feature (438)..(438): n is a, c, g, or t
  misc_feature (451)..(451): n is a, c, g, or t
  misc_feature (458)..(458): n is a, c, g, or t
  misc_feature (473)..(473): n is a, c, g, or t
  misc_feature (488)..(488): n is a, c, g, or t
  misc_feature (542)..(542): n is a, c, g, or t
  misc_feature (555)..(555): n is a, c, g, or t
  misc_feature (561)..(561): n is a, c, g, or t
  misc_feature (579)..(579): n is a, c, g, or t
  misc_feature (597)..(597): n is a, c, g, or t
  misc_feature (619)..(619): n is a, c, g, or t
  misc_feature (625)..(625): n is a, c, g, or t
  misc_feature (676)..(676): n is a, c, g, or t
  misc_feature (682)..(682): n is a, c, g, or t
  misc_feature (729)..(729): n is a, c, g, or t
  misc_feature (740)..(740): n is a, c, g, or t
  misc_feature (789)..(789): n is a, c, g, or t
taattcccatgggcaatggatctgggagcgaacaaaagangggagaggaggatcaaaatgcccccaggacccagggttgtaaggtaagggagtnagggaggaaaatgaaagtgacatgcttttatagatacatcagcggctgtaaanacagggctgagggggaaataattgctatggagggggtcttcgtccatcattgagtgggggggggtgacagccactttttaggcataaagaaaagnatttaaaagggttaggagaaatgggaanaagataagaaagantaataaaanacgnaaaanaaantgagcaaaaggattgataaaaaaaaaaataaaaaaaaaagaaaaaaaaaaagaaaaaaaaaaaaaaaaaaaaaaaagagtgaaatatnagagcattgggccaggaagatagaanaaanggatgtagttgttnattttggggcggnggaatgngagataaattaaganatacacaagatattnagaaactaatgataattgagcttcacgaaggcatagaagacaacaaagtggaantgagttcaggaangccaanttgttcagctttacctcntgctcaaagaatcggtcntccagcgtcttgtctccagggntgctanctgcaccctcgaagagcaagcttgtactccgggtagtaatcggccacgttnttgacntgttcataagtcgtcagcccgagccaactgcgccaggccctcagggnagagccgcccncagtgtggaaagagcttggcacggtcctctttggacagctctgtgccgnaagaattgatgg

SEQ ID NO: 647267 - DNA, 392 bp, Homo sapiens
  misc_feature (75)..(75): n is a, c, g, or t
  misc_feature (88)..(88): n is a, c, g, or t
  misc_feature (135)..(135): n is a, c, g, or t
  misc_feature (154)..(154): n is a, c, g, or t
  misc_feature (167)..(167): n is a, c, g, or t
  misc_feature (189)..(189): n is a, c, g, or t
  misc_feature (318)..(318): n is a, c, g, or t
  misc_feature (338)..(338): n is a, c, g, or t
  misc_feature (366)..(366): n is a, c, g, or t
gcgctgatgacactcagcgtgccacctcgaaggtgtgcgtaacgagctgcagcgcagtacgtggccagggccgcnaccgggcgaaggncgacgccgaagtggtgccgcagcgcgcaaccgtgtggcgctgaagancaagaacaacgaagcacgncgcgccacagcanacaacacgtggcaacaactgtngagaaaaccctggggcagctgttcgagctgaagaccaccaactggctgtcgttcttcaagaacgatgaccagtaccgcccgtgaaaaactctccgggtgaccctgggagcgcctgcgttcctactaccnggaccgcggctacatcaacntggacatcgcctccacccaggtgtcacngcgccaatggggtaccgaggctcgga

SEQ ID NO: 647268 - DNA, 829 bp, Homo sapiens
  misc_feature (829)..(829): n is a, c, g, or t
tgtgcccctgcagtgccctggggctcttgtcctgctggtgccctgctgctgctctgcccctgagccagtgagaactgatgctcgagtgagtgattgccatgtgtgccctgtccctgctgctgtgcccctgtgtgttgatgtgcactgccctgctgctgccctgcctgtgctgccgatgtgtgaatgtgatgctgtgtgctgcctgcgtagcttgtcctccctgcctgtgctgctgctgcatcttatctttgatgaccctttggccactgtgtgccatgcccctcctgtgacctgactgtgtgttctccctgatgttgacttgcttgtgctgtgcaactctatagtagaatgattgttgtggctgctgtgtgcctcctgttgtttgtcccatctgcaatgctgtgatggctccatggttgttcccatcgcttgatattgctgctccttcgattgtagacttctgccatgcccttggttagccatgcgctagccaaattcgcgttcgactctcgtccccaaatatgggcaacacataaccagcaggtataccctcaacccgcttgcgtttcatgcccatgagccttttccttttgtggcatccactctttgcgccgtgttcattcagagtcctggttcactatttggcctccatttggggtttcgcatttttccttgcccatggccctttcacctttgccgcggcgcctggaccagggtccttccaaaacatctcgtggcatagccccatcggtgaacgtcgagatgctagatgcgtttggcagcccagatgccacagaacaaccctttgactggccggcgcgcgatagcn

SEQ ID NO: 647269 - DNA, 468 bp, Homo sapiens
ttgattattccgcggatttttactgagcgcccactgtttgctaagcgctatttttattctgagaatgagtagccatgcataaatgctgcaatagccatacaagtctgactaaaattaggcacataatagacatttaaatatttcttattgcccaattgtccatattctcagcgttcagggttcaacaaacttgggtgtgatcaactcacaatagctatgagtcctccccgatggcacattcttagtccagccttggtgaaggtggcatggtcccctgcccacactgctttttgtttttcaatgagaaataaaaaccaaaattaaaaactaaaaaagaatcccactcaacctggaaaaaatggttgtctcattttgcggccttaaaaattgattaaatatgaaattacttaactatagtggaaattagaatgaaacagggctgatttttccagtttaatacactgttta

SEQ ID NO: 647270 - DNA, 161 bp, Homo sapiens
cggtaccccagctatatgccgtgggatttgtccataggattctttcccgagattgtctagagcccatttcgtgtacctctcccctcagacgtgtgaggcacagacccttagtcatggcaagagttactgcataattccctgtctgctcaaatagctgtcaa

SEQ ID NO: 647271 - DNA, 413 bp, Homo sapiens
tgtcgtaggatatgaaatcatccaagaatcatgatggaagtacgggtgaagaaagtaactagtaagctagtggcaaaatgttttcaaaaagccaaaaagaagccaggcatggtggcatgtgtctgtagtcccagctactcgggaggctgaggcaggaggatccttggaccccagggttctgaagatgcagtgagctgtgatggctccaccgcatactccagctccaacctgggcaagataacaagaccccatctctaaaagaaaaaaagaaagaagaatcgaaagaggaagacgagtggggatatgatgatgatttccctgtgtgcagttgaagtaatggtgggtggtgtcgggatggttaacccttcagcattggtttggatctctcagaatgacatcccgggtcctcagag

SEQ ID NO: 647272 - DNA, 891 bp, Homo sapiens
  misc_feature (3)..(3): n is a, c, g, or t
  misc_feature (397)..(397): n is a, c, g, or t
  misc_feature (417)..(417): n is a, c, g, or t
  misc_feature (467)..(467): n is a, c, g, or t
  misc_feature (809)..(809): n is a, c, g, or t
  misc_feature (868)..(868): n is a, c, g, or t
gcnggaaagggcctctggtagctgcatttctgtttgagacacccgcctcctgatgcccacagtagctgccccagtttactgtcccagacagtctgcctacacatacacactgcgttcatttttttgacataagccattctgtccggggtgaggacaagcctcacttttaagatgcatttccctttcagggtttattgtccgtttgcttctcctttcgagaactgctgttcaagtcattagcccatttactgacgagatttgactgtttttgtttgtttgtttgttttgccttcaatatttagtaccaacacaagaatgttaagcatattaactcttttttcaagatagggtctcattatgtagctgtccgtcctggagaatggccttgaactcaganatctgccacctatgcctccnaagtgccgagactaaaggcatgtgccactatgcctggcttaatttcttcntcttcttttcttcttcttttcttcgctttcttttcttcttcttcttcttcctcatcctcctcctcttctcttttttttgagacagggtttctctgtgtatcctggaactccgtagaccagactggccttgaactcagaaatctgcctgcctctctaattccttaccaagcaattttctgattatatgtttgcccccattttacagatggaaaacaatatatctagatgtggagatcttgctcaagatctaacctaagctctttaggtgtagatccacgagctcttagggtcttaatcagcttagaacattcttttaaccacatggaggcttgttatacaaancagcattgcagtgtataatgtaatttgtcttcaccctggtcagaatggcgaaagtcaanaaaatggatgcaggtgaggttgt

SEQ ID NO: 647273 - DNA, 276 bp, Homo sapiens
  misc_feature (13)..(13): n is a, c, g, or t
gagagagagaganagagagagagagagagagagagagagagagagagagagagagagagagagagagagagagcgagacgtagaacaacgcatgcggaatcagttggagctagcagccaggggtcctttacgacagacctttacccacaaccctctcctacaacctggaaaggataaccctcccaatatctcgccgtccctccaggagaacgggggtgtgcagtgggagccggcactgtgcctcctctgtgctgtccacctcctctgtgctgtcca

SEQ ID NO: 647274 - DNA, 1322 bp, Homo sapiens
  misc_feature (1233)..(1233): n is a, c, g, or t
gctcaggcttcgggcccccggggccgagccgccgtcctgcgaacgcgcggcgcccgggccgctgcccccttccggccccggggtggtcccgtgctcctcccccgaggttccttccctgagcactgcggcggcgggtacagagcaccggcctacgtcgcggcagccgtgcagccggtagtggctgggctggtggtgccagtccgtgcggacccaaacatgatgtgacatgtttacctgcaagaaaacctgggcatcgatcgtatattggacatggccagacgtatttcactggctgtgcgccttcgttatcagacacacgcagaagcaagagatccaaagttcccaagctcgagcacctgcaatcgatgaagtatcaggaaagacaaggattgtccggggacttggggatacaagtggtgatgccaaaatgggagcatgcgatgacgtgatagcctctgtgatcgcaaggacacgcaggagaatacagctggacaccacaatacccggtagacgtgtgccaatgcccgagagcgtgagagtgcccattcatgaaagcaaagaagatatccgacctgatagtcgagaagggtcgtaacgtaagggctagtgctccggccgtatggtttaccactttggataaagttgacacttgtcggcttgacagtctactactcaagttcgcaaagggcgacggataattcagaacaggcaaaggttgcacttttccaataggttcatggacattaaatatttaccgcacgcgagtacacggtcgcaccactgacagcgacacaaacgcttggccaaacgcctcaagggcatttcccctaggatatatgacagcgcacattggtgccgccgtgaagcgtcttgaaacacatttgtccaccgggcgcaaaattctatccagtatacccccagggaacgaagctagccatggcaccaccgaactttcggtagcactacagaacccatctctccgacgtgctcccaacttgtacgagccattggccacagataacacccggaaccgtgttgccacagaacacgcgctatataccaagcctgcgaggcgtttaacacccaggctcaactttccaggttcatccacaagagttactttccccacaacggacacgagggacattaggggcggacactatgacactccgcgatccctttgccatacacgcaaaagcgatcatgggcgccacaatttcgcaccgttgtttnaccacacctctttggtagcacaagcggtttatacccaccaggttaacgctttcgtttacattaggcccagaggatagtggggcacacag

SEQ ID NO: 647275 - DNA, 302 bp, Homo sapiens
ccgatcacagctcactgcagcctccgcctgccaggttcaagcaattctcctgcttcagcctcccaagtagctgggattacaggacattgccaccatgcccggctaatttttatatttttagtagagatgaggttttgccatattggccaggctggtctcgaattcccggcctcaagcgatccacccacctcagcttcccaaagtcccgagattatttaggtgtgagccacggcacccggcccagacattgtttgaagccacccatttcatggttctttgctgcagtgatcgtggggttgtaa

SEQ ID NO: 647276 - DNA, 150 bp, Homo sapiens
gccaggaagagtcccctgcattgggtgatgacattctgtctatactgaaggcgggcagtgcacagcggccttcctctctgggaatgccaggtcacacagtccacttcagcacactggtctcctggtgggtccccagacagcgcacagtgc

SEQ ID NO: 647277 - DNA, 122 bp, Homo sapiens
gggccgactgcctcctcccaactcatcccggatctcgacggtgagccccgtggcaaggtagagcattgtggcaggccaaggccccgaacacgacttacccagtgcgaattcaccctccagat

SEQ ID NO: 647278 - DNA, 272 bp, Homo sapiens
  misc_feature (30)..(30): n is a, c, g, or t
tgaaagttgggttcccccttgggccccccntgtttttttgtggatttatcttcatcaaaccaccccaataagattttttagaggccaaaaaaagaaatgggctggaataaacttttgaaaccctaatgtagtatgctccgtatagtgattggagctgttcctctggattccccctttgttgagttgtaaatgtgaaagaaaaagttttatgtgaatatatatcaagccagcctttgttttttgcctccttaaataaaaaggaattaaaatta

SEQ ID NO: 647279 - DNA, 444 bp, Homo sapiens
cgatttctgagaagctccgaaggaacacagacccacccacagcttggtgtatactagtgagacactaggattcttttggacttctgacctccagaatggtactgacaataagttgcatgtgtttgaagccatgaagttcgtagtgatttttttacgagcagcaaaatcggacaatgacacgttcaccaggaccatcagaaaaccccacatggagtctaagccatctgctctctctttgtactcctccttctcaactagacacctgcactgtcccctcatcttctcaggccagcatcttaggatatcaacctttcatcagtctttttctcttagatatccaataaatacatgctcagatggcacatgtgcagcaaaacgagtgacttgtgacgatgacatattctatagttaggccgccatgactggagcccaggtgaaaatgac

SEQ ID NO: 647280 - DNA, 442 bp, Homo sapiens
ccagtgtgactcaggcagagcattgagaattcgcagggcagaaattcttcctgctcaggctttcataataaaactactgtcttcattaaagctgaactttctgagtttctgagcttatatgcccggcatctgaatgagagctctctatgtaactgtatgacttgagatctagtttgcaagctcctgggaaacaatacatgtgtatctagtaggtgtatgctcagaaagcagatgtctgagatgtaagaagcttttctattcctgtggcattcgagttctgacttagagctgaagttaagatcactgaaccatcacgtcaagttgaagtcactcataggtctatgtcctttatgcagggaacattttttagttctcagaagcatttccactcttgtcctcttgtttgtttgtttgttttatgctgggactttcttttcccttg

SEQ ID NO: 647281 - DNA, 133 bp, Homo sapiens
actcatctgtaagttagaacaaacgtaaagggatgcgggtgatcaggcagacgtagctcctggcagcctcttgtaatttcacggggctgtttgagactagaggtaaatcaagcaggcatcagccactttaatt

SEQ ID NO: 647282 - DNA, 445 bp, Homo sapiens
  misc_feature (440)..(440): n is a, c, g, or t
gaattccagcttggttccctagccaggcgtgttgccatgtcaacatagcccagggaagatagtagagcatcacttgataaacaatgctcatcccagacctttgggagtgactaacgagctgattatatgtactcggtaccctcagtgacaccttccaacccccaaatatcactttccttcccgcacacatacatgaactcttttgtttattttatatacgatgcacatcgccagctattttttcattctaacctatactggggacccattcacttcctcttcctccagcattatcggtcacttatttactccctcaccattagagaattgttgtgggctgtttgtttgtacaattatcctgcctcagcctcccaagtagctgggattacaggcatgcaccaccatgcccggctacttttgtatttttagtagagattggngtttc

SEQ ID NO: 647283 - DNA, 601 bp, Homo sapiens
gcttcctgaccttgggtctacggtctgaccgttttttgtggtagtactccggtgccatacatgattcgttcctgacgccgttgcgtgactgctgtgggacttggacatgggctctggaccctggtcgcgctcctcgatggtagctctgaagacgacttatgcatcctattctgttagccggccggaggggaagcttgggatcatggaattggccgtcgggcttaccttcctgcttcgttgatccttcctccatgccagccggtgtcgtggatcctgttcatcgaccttggtagtacctacagggagagcccaagcagtgcaatggcggctccgctatctgatacccttcacaactgtgatctagactcagccccaccgggcccatcctggttcatgttactggcattttggttgtgcctggctcgtctcccgtgagatcgatgtcatatcaattccagtcaccatcgtatctgcaatcatgacctcttgatgatttccatggtgaccatcctatgggggtcgactgacgcctgacttgggtggggtacccccttgtaacaatataaatctatttcaagctttactaggaaaaaagaagaag

SEQ ID NO: 647284 - DNA, 355 bp, Homo sapiens
gtgagctggagtatcttaaataagttactcagaatccatgaacaaaggaattcttactagagcaacaatctcataagtcactgatgggaagggcagaaaaccatcaggttacagatgaatcaggttcgggtaacatgactacttagtaggaaattcatttcccataaagattacaaatcacaagtctcagggccaagtgtgctggctcactatctgtaatctcagcacttgtggtttccaaggagcgcaggatcgcttgagcccgggagttctagacgagcctggggaacatagtgcgaccccgtctctacaaaacattaaaaattagccggctcgttggcatgcgcctctagtt

SEQ ID NO: 647285 - DNA, 174 bp, Homo sapiens
gaatgacacagtttcacaaaagaagcctacaagaagtacatcaaagattacctgcaaatcaatcaaagggaaacttgaagaacagataccagaaagagttaaaccttttatgacaggggactgcagatacaaatcaagacacatccttggctaatttcaataaactaccagatt

SEQ ID NO: 647286 - DNA, 887 bp, Homo sapiens
  misc_feature (474)..(474): n is a, c, g, or t
taaaaaaagaaataaattttttgggtcaaaaacgaagggggagaaaaaggggggggggggcctttgggcatacatgaccgggaatcttgtgaaaaaaagggtagtaagaaatatctgggggggtcccgtgggcgcgtccccctgtgcgggtcccctctttatgacgattagccccctcattccacacttgttggtagcacaacgcttctcacccacttcactaaatagaagataacacaacatatagtgcccacactcacaggactacacccgcccacgcgggcgcgcggacaacgctgcctcgtgaacaaacgtgctattgacagcccccatcttttctattcacgacactcttcaacccgcgcagacaccccagtcatctctcgtcggcggtgcttccctccgactgagccggaatcattatccacgacacacaacaagaggcacccccgcggtgtttgcggccgcgcgcgnaaccccacattcattacccgtgggggtcggcacaccaccttccacaacgaagcatggcggtgtcccctgcatctccccaggtgctgcgcacctacaatcacaccaccgtgatcaatgaccccctcttgtacagtcggcccacaacgacactcccacgacacttcctcgcgggctcaccccggacgccgcgccaccaacaacatacttcatccacgcggcgcgcccgaaaaacccttcgggccgaaacccggcacacaacccccagccactacaccagctcgacagaccagcgtccccgcgctccgaaaccaacaagcggacggactacacaagcacccccacagcaaacagcaccgacgcctcaacacgcgactccgcaaagacccctaaacgaaagaaccatattcaccgct

SEQ ID NO: 647287 - DNA, 468 bp, Homo sapiens
  misc_feature (16)..(16): n is a, c, g, or t
  misc_feature (43)..(43): n is a, c, g, or t
  misc_feature (143)..(143): n is a, c, g, or t
  misc_feature (197)..(197): n is a, c, g, or t
  misc_feature (213)..(213): n is a, c, g, or t
  misc_feature (227)..(227): n is a, c, g, or t
  misc_feature (245)..(245): n is a, c, g, or t
  misc_feature (248)..(248): n is a, c, g, or t
  misc_feature (258)..(258): n is a, c, g, or t
  misc_feature (299)..(299): n is a, c, g, or t
  misc_feature (301)..(301): n is a, c, g, or t
  misc_feature (465)..(465): n is a, c, g, or t
ttcttgttcatctggntactggaaacgccgtctggattggtgncgggccatggcgggttaccaggccccccccatactttcgttctagcatctccacctgcttgtcctgcaggtccggaggagactcatagctctcggagagntgcggtgagcgcttgatggcctcctcctcagcttgcgcaggatggaggtcgagntctgcagcttgggccntcgtgcgctgctgnttcccggcggccccgagntancaccataggnctccacgacgtgtgctcgtagtgatccgggctcaggctggnanaggcaccaaggggccctgggggtaggctgaggggctgtccagggatgtgccagtctcactggctgtgcctcgccctcggactgtagcggtcagtggagaggctgcttccggtgtccagggagctcctgcgcaccgagctttctccttcagacttggtcgggcgnggc

SEQ ID NO: 647288 - DNA, 392 bp, Homo sapiens
tatttggacgtgggaggaggacactactgtgagccctattaattcatggagatgacactcctggtcattatcttctcatgcccatgggaggtgagaggtcagctgacactccttcccattccaggtgggtcaccaggcccaaatcaagaagtagctaccaaactccaagaggcagagtccctgtcccagcacagaagatcatcctggggcagagagagcccatgggatagtggaggggatactagtaagatgagccccagagacagaggatggaggtgaagtgaaggaagcacagagacaccagtgctgggcccagctggacacagtgagctgcagggacctcgtctcctctatcgtctcttgttcagggtggtggtagagatgatcttgct

SEQ ID NO: 647289 - DNA, 161 bp, Homo sapiens
attgacagcgtacttcctactagcggtggctggactccacccgacggggtgtgtgattcctgggggggtctttaattctggctccttccttcctcggaacatctctattctgctggacccctctgtcttgccagggctcgcccattccagctggatgtcgt

SEQ ID NO: 647290 - DNA, 127 bp, Homo sapiens
atacccgtaaatcatcaggagatttaacatactatcttcttttttttttttctttctgagacgggatctcactgcatcacccacactggagtgcggtggtgcgatcatgactcacggcagtctcgac

SEQ ID NO: 647291 - DNA, 134 bp, Homo sapiens
gcggccgcctactactactactactgcttgaattcaagcttctaacgatacggggacatgtcaagaaacattagtcttaggaattcttcaaaaaatggcatcccaatgaaaataaatttgatgactacaaaaaa

SEQ ID NO: 647292 - DNA, 401 bp, Homo sapiens
  misc_feature (6)..(6): n is a, c, g, or t
  misc_feature (76)..(76): n is a, c, g, or t
  misc_feature (95)..(95): n is a, c, g, or t
  misc_feature (190)..(190): n is a, c, g, or t
  misc_feature (280)..(280): n is a, c, g, or t
taatgnttccctatctcccatgagttcagtttttttagcctcccacatatgaagtaagaacatgcagtgtttaaanttcctgtccccggccttantttgccttaacataatgtcctccagtacccaaaccgtgttgccacgaatggcaggatttcattatttgtatggccgaatagtattccattgttantgttgttttcaagacggagtcttgctctgttaccaagaggtgtagtggtacaatcttggctcactgcagcctcaacctcctaggctcaancgatcctgccacctcatcctcctcaggagtctgaggcaggagaatggcgtgaaccggggaggtggagcttgcagtgagccgagattgcgccactgcattccagcctgggcgacagagctag

SEQ ID NO: 647293 - DNA, 427 bp, Homo sapiens
atgcgctgatggacaacccgacgcatctatctagaaaaagtacgtgcatgagctgattccacgctgtgatgacctgcatcgtgagcagacagttgtgccgtgcaaccagatgtggacaatcactgggcactccgagactgcgctgcccgcctggtggcccacatctgcaaccctctgagcacaagcattaaacaccatccatgtcccggatcaccaagaccttcatgcaagagctgggtgtacgagatgacgccctggacgactcgctttggctccatcgcaggtcttggctgagctgggactcgattgttctcaagactctgattctgccccggctgccgctggagggggagcggatccgctgtgtgctggacggccctgtgctgtcctgcatgtcccggattgccgcagaccatgtgcaggtcct

SEQ ID NO: 647294 - DNA, 472 bp, Homo sapiens
gaggatccgaacaggtacacaatgcatgcgtctatcatgtgaagacgtgcattagacacaaatacaaaaaccatgaaacaagccatcattcttcaacaatttgagccagcgataaaatgcctaagtaacaagcatggatgacttgcataaggatgggctctttacatttaagcaccataaatagaaaaacaaaagcacaaatggatgagtgtgttcagttatatgcactgacatgaacctgtggcactaggaatcagagcatttcgtcatatagcattaacatgtattataaaagtgcgtagtggtcaaaggaatagaaccaccagcattcaaaagcagcttggtcagctaggcgataaaagactctacagcatatccctctgtagtccatcattgaaaacactggcaggaagtgtgaaatgacaaaaaaaaaaaggaagaaaaagggagtatataacccccttttaatttt

SEQ ID NO: 647295 - DNA, 174 bp, Homo sapiens
gactcacggggcttctggagccacaggcagaactaaacgacagctcacacgtatccacaggcggaacggcaaggtggggctgtctgacatggccatcgcggacgtcaccctcctgagtggattccacgccctgcttactaacctggagaagctaacctccctctctaaccgtta

SEQ ID NO: 647296 - DNA, 161 bp, Homo sapiens
gacggctcagatctatagatccccagtgaaagaagagaggagttgtaaggactgggcctggggcattctagcttcatgaggagcataagagaagaatgcaggggaggaagtggagacagggattgtggacaaatcagttgagctttgcgtcaaaaagggca

SEQ ID NO: 647297 - DNA, 239 bp, Homo sapiens
cagactttatgactgagtaaatcacgatgtaaccccaatcataaatcgcggagcatctgtatatctaatctaggtccaggggggaatatcagaaaacactatgaggcaatagtcaaagataatcaccgagaattttccaaaacacttcaaatacacattgatgtgtacagaaagcccactgagtatttgacgtgattgtaccccgctaagtgcttgttccccgctaagtgattgttccc

SEQ ID NO: 647298 - DNA, 238 bp, Homo sapiens
gaaaaacccttaaaaaacgggcccccaaattttccccctttcccctggggggtcggttttaaaaaattttgggaggggttccctagggggccccccggtgttttccccccccccccccctttttttggggggtaaaccccagggcccccccggggtttttttgggttccccccccccccccggggtgttttccccttttccggggttggggggttttaaaatacccttggggttttta

SEQ ID NO: 647299 - DNA, 98 bp, Homo sapiens
cgaggcgactcataggatcccccagtctccactccacctagcattacttatatgaagctccatacccattacaatctccagcattccccctcaaacct

SEQ ID NO: 647300 - DNA, 577 bp, Homo sapiens
ctcggctctgtcagtttacagaatacaaacctggagaaagaagtagtactgcaggtatatacgatgtacaactgtgcgtttcttgggtctgtattcagtagtcatagcacatgttgattgaatgcctactatgtgccagacactgatttaggcattagtggcaatgtagcaaacacaacaaagttcttcctttcatggactttacattaagcaggcaacatcctaaacatcattgcatcagtcaatagtcactcatggctctaagtgctttacaaatattaactcatttaatctttataatgatcttcacagagtaacattattctcagtttagcaaatggggaaactgttataccagagtttaagtcaacttgaccaaggttgttccagcttatgtgccagagccaaactcgtgtagacttggccagtgtgaatggctagatgcagctctcacagcatctttgaaataaggtgaaaggggaggaatcatcagcagcaacagagttagtgaatggtcacctcttgcagtttagacagtaggcaggagtctcacgcagggctagtatcagtctccaaa

SEQ ID NO: 647301 - DNA, 256 bp, Homo sapiens
cccaatgagaaaatagagactcgattggctgcaggaacagctgggcctaggcaacgaacacacgaggttactgggggtggggaggaaactaggtctcgctgaaggtgacagatcccttgggtgccagctggagagggcccccaagctcacacgccacaacatgctgcatgccagtgtgatgtgtggagacaagaacagacacgcaggcagaaaccaaatgagaaacctggaggcttcagggaggacatgccgggag

SEQ ID NO: 647302 - DNA, 371 bp, Homo sapiens
catgtgcttactatagggcccagtgtcagtttgtgattcacgtgtgagccttctggaggccccagagctgggtaccatggcactgtactcactcttatgagaaacttcagcttcagatcacagtgtgccttcagctgctctgaaggaacaaaactaactgggattgaagaaaccacctgtggaccattaggacactggtcatctccagaaccaacctgtcaagtgatacagtgtgagcctctatcagcacccagatttggggactcctgacctgtagccatcccctggccagcttcagctttacctctgcatgtaccttccactgctcagaaggcactgagtccattgggaagaagcaacccatctgtgac

SEQ ID NO: 647303 - DNA, 154 bp, Homo sapiens
cgcttttgaaatcataaactcttggatcattcagtgaaacttgtgctgtcagtgactgaaccctaccaacaataggttcagtgttcaaagctcaaagtatacggctccaagagttatcccactaagagcatgggcctttatcggggtaccgagc

SEQ ID NO: 647304 - DNA, 272 bp, Homo sapiens
cctgcattggtcctgagaagtacaatagctcccccagatacagacaaatctctatagctttgcgttagtcgaagaagaatcgcaagaccaacccaaaaattttttgagtaatattcatctctgcagatctgagtgacagtccgcttgaaacaccgctgtagaagtggtatccactgatttctttgtgattatgttaaaattactgatgtctctttgacttgttcaggaaatctgtcttctgacatatatactggatagtactcttcctgtat

SEQ ID NO: 647305 - DNA, 126 bp, Homo sapiens
gaggtagcgcaagttgaaaccagctgctaaaaatgaaggtggattcgtcccaagaagccaatgctgaggtgatgcgagagatgaccaggaagctgtacagccagtatgaggggaagcttcaggaag

SEQ ID NO: 647306 - DNA, 489 bp, Homo sapiens
  misc_feature (4)..(4): n is a, c, g, or t
  misc_feature (65)..(65): n is a, c, g, or t
  misc_feature (480)..(480): n is a, c, g, or t
aatnaggtgttcctgacttctgtacgcactgtctactcaacattatccatatgattcttaccctngatcccatgccattttatttatagttactgcaaatgtgaaattactgatccttttgctctgaacttgacatcccagacctcagatttctcatttattcacaaatgtcacagttcttagaatgagcagcaccttagttaagtgcattttcatgagctataaattattgcagagtggttccttagtgaccagtcctgccgaaagtctaagacaagttgcatattttacttaaatttgctgttaacactaaagtccaacatgtgactgagagccatggggcccaactgtccaggcactgaagttcagagatgtgcattccgtcagcattatcttaaattcaaatgaggataagtttcttctgtttcggaatgctctttgaagcaagaaacaagtctttccttaacatccctccacccncgctgccac

SEQ ID NO: 647307 - DNA, 307 bp, Homo sapiens
agcggccgtccttagcggcacaagaggaatgaatattccttaagaggcagattattagacccagagtatactttctgaggtaccctacgcgaaggaaggatcattgcaccattacggagaacgagaatacaaactgtcaggcctctgagcccaagctaagccatcacatctcctgtgacctgcacatatacatccagatgacctgaagcaaatgaagaaccacaaaaaataacattccaccattgtgatctgttcctacccaccctaactgatcaattgaccttatggcaataccccctccccgcta

SEQ ID NO: 647308 - DNA, 119 bp, Homo sapiens
attattatgatacagccactatagattcaaaagggtcatcagaaatctgaggtatatgatggggaaagaatattttgactaccacgtttaacaggtctgctatttaataatattagttt

SEQ ID NO: 647309 - DNA, 147 bp, Homo sapiens
  misc_feature (143)..(143): n is a, c, g, or t
cttctggtcactacacttgcctgaatgagcggtcgaggaattggcagccgtgtgtgagtccccgagttttgaagggtgctgttgaaacaagatgcattgttgtctaactcttggcagctgcgccctctgatgggcagatgctngaaa

SEQ ID NO: 647310 - DNA, 337 bp, Homo sapiens
agtgactctacaggatcttaaacgacccgaagacatagaaggcatctgctcaggcgaaagtacagaatcttctcataaagtctactgagaactgtaccattataaacatatttttcttgctctagggagcagttaaggggacggaatgggagctgtcagggtcccagggctgtcctacctgccgtattggtcacagtgactgccacgtgctcttccatgggcactgcagctggagaacactactcttcttccaaaggggtctaaaatggctagttagtataccgatctgtgagctgatggatagttgattggtgaatccctggtcttcgggtcgata

SEQ ID NO: 647311 - DNA, 477 bp, Homo sapiens
  misc_feature (29)..(29): n is a, c, g, or t
  misc_feature (367)..(367): n is a, c, g, or t
  misc_feature (451)..(451): n is a, c, g, or t
agtgaaaaaggaaccccacaggaatgggnggaaaatattttcaaaatcaccgtacctcaataagggatttggtacctaaaatatataaagaactttaacaactcaaatacccaaaaagacaaccccaatttaaaaataagtaaaggttttttattttatttaaatttttttttgagacagagtctcactctgtcaccccaggctaaagtgcagtggcccaatctcggctcactacaacctctgcctactgggttcaagccattctcatgtctcagccttctgagtagctggaattataggcacacatcaccatgcctagctaatttttgtgtttttttttttgtagagaccaagttctgccacattncctggctggtctcgaactcctggcttcaggaatccacccgccacccaaagcgctgggattacaggcatgagccaccataccagnccgcaaaagttattattaaaaactaa

SEQ ID NO: 647312 - DNA, 372 bp, Homo sapiens
cattttggtatagcccgaaccgaactggccgccgtcttggcaaggggcaggaacgtaatttgacggtcgcgctttaggtcaatcgcgcacaaccagccccagcctggcgcgctgccacaaatatagacgacgagcgtgtccgttcctttaaaacccttgcttgacctgtagaaggatggaaatttccccggctgtgacaaaatgccatgtgcaggctctttagctatggccgctttctcaaaaacgaaatggactctgtcgctcgataatcagttatttcggtatatatcccgacaaccattttcgtccatctgagtgtcgatcattacctttctgttctgatccaggtggaatgtcgtggggtcacgagct

SEQ ID NO: 647313 - DNA, 584 bp, Homo sapiens
cggagataggggggcccccttttgttttctaggggggcccccgccccccctctccgaagaggagaggggcatataaattaaggccccccgtggcccccctgtgtgggtaaccctcccggggggggggggagaaaaatgggccccagaccccccgcggggacccccggcttttgttttccataagggcccctctcccccccccccctccgggcttggggctataaggggtcccaggccctggtagtggttggccccggggtgaagggggtgtaaaccccgggtttaaaagggcccctcccccccccccttttaagcccccggggggccgggccccgggagaaaccaacccggtttttctagggcgggggcacccccccccgggggttttccccccccggggggggaccccttttccccccaggggggcccccccttgcctggggaccccggcccccccccccccctttaaaccccccccaaaaaattaaaaaaccccccccccttggccggcccctttttttttccccccctttggggccccttttttggaggggtttttgggatcccccggttggggcccttta

SEQ ID NO: 647314 - DNA, 233 bp, Homo sapiens
tgctgaagaccagttggttactttgggtttgtcaatcctatccttttaatcttcacctaatggaagtgaagtttatatcattaagaaattttatttaggcaaaattaaggactcatgagaacatccacgtagaaatcattcacgtataaccaagagcttgccatcactgaaaaacctgactcaaagcctgttaaacagcaaatggcttacatttctttctctacattaaaact

SEQ ID NO: 647315 - DNA, 325 bp, Homo sapiens
tcgtggattccagcccgatcttcgttcatggcataggctagcacggaggagagcgtgagcgactcacccccatttagcagtgaacaaggcattgagctccatgtttctttgctatagcagatgaatgtgtaagtgtcattccagtgcgccaggagatccgttgcctcttcatcatatagcgccgacatgttatgatactcaaagaactcctgggacgcagttatctctctctcgagtgcctttcaagatactaccgtacccctcggttctgtaacgtcctctaagttggaggcacttcccttctgagcccaggaacacatgctca

SEQ ID NO: 647316 - DNA, 1011 bp, Homo sapiens
agcggcggggtgcagactggtgctgcaagagggagcctggcccgacgcggaccgcttccctgcagtgccccgagtccctgtggtgccctgctgcctgcgcgcctggctcctgctcgcgtgccctctgtctgcaggctgtgccccggcggcggcggatgagccgtcctcggccgatggaggctgggaaacgctgagcgcagggcggcacgagaggcctcaacgccgtccctttcgccaccgtcttttccttgcctcgcgccgctgtgcattaactctcctttatccttatgtctccacgcggccccatcgcgggtgatgggcatagtatggttacgcaaaagtgcagcactcaagatggctgatggcaacgaggatctgcgggctgacgacttgcctgggccagccttcagagaagctatgagtccatggacgcttgcctgccccgactgagcgcagcggccaccgataaccgtacagcagacgggcggccacatgtgcgtctgggcgcggctacaaggagtaactcacacgtcacgagcgatcatattgacttttcactctgccctagaggcacccacctactgcgatctaccacactggacgacatggcaagactggaacacacactcaacacttgcacgcgtgactgtccatccttctattgttccacggaccccctggctcgcctggtcgctcgtgcttagaaccgcgcgtggcctggtaacctagttcggcacgctgaccacccactcacgcaggccacaataaccaaaagtaacgctcctaccccttgcacgggtacattccaacggaccctaccacgacgagaaggcggtacaactgcgcgtcaacacgacattcggatttgccgtcaaggcactttccgctcctagtcacaatcacaaccgtgcccacagccatagggcgtccttcgggccttcctctacccgaccccacccactcaccgctctccaacccccgtcacggccactcgcaccaaaccctacaccg

SEQ ID NO: 647317 - DNA, 140 bp, Homo sapiens
acgcggtgctgtgggatgctgttgattcctcacgacggctgaggttgtggagctgtcagtgaccgtgtgttgtcgccgttgagcccgggctgcctgggggttctctgttgtaggtgctattgaacacttctaaaactagg

SEQ ID NO: 647318 - DNA, 236 bp, Homo sapiens
tgtcgcgctgtggtgtccaggtgagagcgccctgtgctccgtcccccccggtggtggtctggtgaggatgccctatgacctgagggctctggtgcctcctaggctgggagctcttcctgggggctccctggaccacacagtcctgttttatggcctcacgtgttttcgggaacagggagcgagctttcttctgggcaactggctgtcacccaccaggggttagccccctgggtgat

SEQ ID NO: 647319 - DNA, 567 bp, Homo sapiens
tggggagtgtcaatttgcattatttgcatattgatttcaagctccctaatttggaatggctaaagtacaaatgttaatgcaacatagtacagttgtatttgtccttcatattcaggatgcgatatttacaaaatgcagaacagtttaaacttgttaagtcacattccagattaggagtggccaataatcatctctgctttgcccccattctactacccaccactgcccaccccatccccacattacacactcttcgatgctttcccacagtctctgcttcgctcctctctgatgctcactttactgtttttcacttttcacttctgtccttttttgtgccccaagtccactattgcttctattattgtgttccagctttagccatgaacgtactgctgtccatcttttctcctttctttcagttcatatagtttattccttcgatttcctcacgtttcgtttctctttccacttttttctattcctcgttccacttctcatttctataatactcgtcttccaatatcttccttacctttctctaatctcgctgtttcttttgtcccc

SEQ ID NO: 647320 - DNA, 519 bp, Homo sapiens
  misc_feature (1)..(1): n is a, c, g, or t
  misc_feature (19)..(20): n is a, c, g, or t
  misc_feature (24)..(24): n is a, c, g, or t
  misc_feature (61)..(61): n is a, c, g, or t
  misc_feature (75)..(75): n is a, c, g, or t
  misc_feature (88)..(88): n is a, c, g, or t
  misc_feature (96)..(97): n is a, c, g, or t
  misc_feature (129)..(129): n is a, c, g, or t
  misc_feature (135)..(135): n is a, c, g, or t
  misc_feature (150)..(151): n is a, c, g, or t
  misc_feature (219)..(219): n is a, c, g, or t
  misc_feature (505)..(505): n is a, c, g, or t
naccgaggggggaggaggnnaganaagggggagaaaggaaggaagaaggggggaataagtnaaaggagggggganaaaaaaaaaaganaggggggnnagatagaaaagagagaggaaaccgcaccggangggggnagggaagaaaaggannaaggagaggaaaagacaaagggggggcgaggaggggagaaaggagggaagaagaaagaagggagaaanaaaaggggggaaaaaaaaaggaggaggagcagacagggacgaggagggaagagggaagaagggcagagggcagaagggaaggaggagcgaagagagaaaaggggaaaaggggggaagggaaagaaagggacaaaagggagaggggaggaacgaacagaaccagaaacaggcaagcagggggaggaagaaagggacccgggaaaaaagggaagaaaagaaggggggggaggaacgagagaaaaccaaaaagccccgaaagggaagaaaggaaaagagaaggaagganaaaggggagccagg

SEQ ID NO: 647321 - DNA, 445 bp, Homo sapiens
  misc_feature (365)..(365): n is a, c, g, or t
  misc_feature (417)..(417): n is a, c, g, or t
  misc_feature (432)..(432): n is a, c, g, or t
taattagacagagtcttgctctgtcgcccaggctggagtgcagtggcccatctcggctcactgccaacctccacctctcacgcaattctcctgcctcagcttcccgaatagctgggactacaggcatatgccaccacactcagctaatttttgtatttttagtagagacggggttttaccacgtttccgaggctggtctcaaactcctgaccttagttgatccacctgcctccacctcccaaattccggggattacaggggtgagccgctgtgtccggccagcttacagattttttaatgtaaaaggcacatcaagagactatttaggaggccaaaaagggagcctgaggtatattgggtggggntatctgtcaggggaccattaacaagcctgctattaggctggggtaaaaaggntacaaattttggggnctggttttacaag

SEQ ID NO: 647322 - DNA, 1126 bp, Homo sapiens
aaacaaagaaggaaactctgttatttgcagcaacatggatgaatttggatgacattatgttaagtgaaggaagccaggcacagaaagacaaatactacgtgatctcacttatatgtaaatctaaaaatggtaaactcatagaagtaaagaatagaatggtaattaccaaataatatggtttagctctgtgtccccacccaaatctcatgttgaattgtaattcccagtgttgaaggtggggcctggtgggagatgattggattatgggggtggtttctaatggtttagcaccatcctcctagtgctgtctcatacagttctcatgagatctgatcgtccgaaagtgtgtagcacctcccccttgttctctgtctctcccctgtttgctatgtgacgatatgcttgctttcccttcgcctttcgccatgattgtaagtttcctgagggctccccaggaatgcatcctggtacagtctgcagaacttgtgggtcaattaaaacctgttatccttcataaaaacacaaaaaacaaacacacaaaaaaagggggagtaagccaacataaaatatacccccggagagagccacacaccaacagcgtacccacgattcggtgcaacaaaggggcaccataaagagagccacataaaaaccaaagacatgcccacacacatcacaaacgctcgagagacggcggcacaccgtcgccaccacgggacccactcggaacaggcaacaccaaacctgcgaggataacacacatagggcacacacacccacaaactagtaaaacgcaaagagaaatatcacacccagccaaacgcggaaccacagccccacaccacgacgcgcatacaacccccacccaagactagacagagaaaaataacgagaacgtaagaaagggggcaaggacagaaaagcgccacgaagagggacggagaaggcagggcggcgaagaggagagacgaagggaccggcgaacggaaacgaaaggcgtaccacccgcgagaacgaaagaccacgcaacgaggcacagtcgaccgacagagcgataacagggaaaagagaagaaagacgacagcaagaccacaaacgaaagaaggcaacaagaacacggtcggac

SEQ ID NO: 647323 - DNA, 968 bp, Homo sapiens
  misc_feature (5)..(5): n is a, c, g, or t
  misc_feature (92)..(94): n is a, c, g, or t
  misc_feature (97)..(97): n is a, c, g, or t
  misc_feature (99)..(99): n is a, c, g, or t
  misc_feature (142)..(142): n is a, c, g, or t
  misc_feature (151)..(151): n is a, c, g, or t
  misc_feature (205)..(205): n is a, c, g, or t
  misc_feature (241)..(241): n is a, c, g, or t
  misc_feature (251)..(251): n is a, c, g, or t
  misc_feature (255)..(255): n is a, c, g, or t
  misc_feature (272)..(272): n is a, c, g, or t
  misc_feature (275)..(275): n is a, c, g, or t
  misc_feature (279)..(279): n is a, c, g, or t
  misc_feature (283)..(283): n is a, c, g, or t
  misc_feature (286)..(286): n is a, c, g, or t
  misc_feature (294)..(294): n is a, c, g, or t
  misc_feature (298)..(298): n is a, c, g, or t
  misc_feature (378)..(378): n is a, c, g, or t
  misc_feature (402)..(402): n is a, c, g, or t
  misc_feature (437)..(437): n is a, c, g, or t
  misc_feature (487)..(487): n is a, c, g, or t
  misc_feature (495)..(495): n is a, c, g, or t
  misc_feature (529)..(529): n is a, c, g, or t
  misc_feature (577)..(577): n is a, c, g, or t
  misc_feature (585)..(585): n is a, c, g, or t
  misc_feature (659)..(659): n is a, c, g, or t
  misc_feature (774)..(774): n is a, c, g, or t
  misc_feature (809)..(809): n is a, c, g, or t
  misc_feature (845)..(846): n is a, c, g, or t
  misc_feature (849)..(849): n is a, c, g, or t
  misc_feature (874)..(874): n is a, c, g, or t
  misc_feature (877)..(877): n is a, c, g, or t
  misc_feature (892)..(893): n is a, c, g, or t
  misc_feature (896)..(896): n is a, c, g, or t
  misc_feature (900)..(900): n is a, c, g, or t
  misc_feature (903)..(906): n is a, c, g, or t
  misc_feature (964)..(964): n is a, c, g, or t
aaagngtgaatggacccctctcctcagtgccaaagagacaagaatgaagcagccccacctagaccatggttctgcagaactctgcaacctcnnnaangntgttacacacgatggacagaaggacgttctctcaacaccaggnttgattttngggaggctggagggaaccacgtctaggacctattaatactagctccttcctggnggctcccaagttctgaaaagaaaacaaaacgcagtnagcccacgtnaggntctccacgttcctgcangtnaaanccanganaccactgnagcntcagcatgggctgcacggggtgggcaggactgaggaggggagggcaggactgaagaggggcggggacccgcactccctgncagcagcccaccacctgccttttntactttggcaaaaacaaaaacaaaacctggaagcntcaagacaatgaagtaaactttaggaaatggaaaagacagcaggctgtgntcaaagcntctcttagcctcccagcaagtacttcccaagaantgctggtgactcttcagggccacaatggcaggttttcttcacagcagncccaaccncagcccagctgaagacggctcttctgagcttccttcatcagctgccttggcttccaagctgggaaggcattggnggtgtggtcggggaaggcacccagttgtttacagatggtagagggtgacacaggcagcatcgtcatgaagcagggccccaaggaaaggtcctccgggagaaccaggctgcccaangggaggagctgcagacgcacccgctgggaccgcanctgctggtggacaggctcctgtcgaggagacaacanncanacatgtggcaaaggacctccagagnagngctgatgagatgagnngcnggtnggnnnntgaatgtgattgagtacggtctgtccatgactggcactttggactgaggaataggacncaga

SEQ ID NO: 647324 - DNA, 428 bp, Homo sapiens
aaaacctcccacggtctacatgcacagttcaggaatgttgctgactgatgcttatgtaagttatcacaagctgtgttcatattggccatgggggacatactgtacgcttgtgtgtatgtttttaaacggagtcttgctctgatgctctatgctcgagtgcagtggtgcaatctcacctcactgcaatctcagcctcctgagaagctgagattacagtcatatgccaccatgcctggctgatttttgtattattagtggagacggcgtttcaccatgttgcccaggctggtcgtgaactcctgagctgaagcagtcctcccgcctaggcctcgcatattgcaaggattataggtgtgagccattgcatctgtccaacaaatcagacagcatatgaggagcggctcttgtggagagagaatgcgttagga

SEQ ID NO: 647325 - DNA, 255 bp, Homo sapiens
actacatacttccgcaccttaggtacatggaactcctttgaagttcttgttcctgtatgtgtaaatgggtagggaaggaggagcacatttacaactacggctacatcacattttaaacatgaatgaaagggcacataaagcccttttttcagcagtcacttaatggttaatatggctaaaaattttgaaaggttttatgtgagagagcattccagactgtcagaaaaaaactagatttcttgctatttatggact

SEQ ID NO: 647326 - DNA, 132 bp, Homo sapiens
tcttaattttgctcttgatagctagatgtttcttttaacttttatttcgtaagtaaatatacacaaaggcattcatctttgttgaatctgttgtgcagatttttcttgatgagcattctgttttattttctt

SEQ ID NO: 647327 - DNA, 469 bp, Homo sapiens
tatgagttgcacaactgcccgctctgtccctttccggcatgatcggataatgaagcttcctggccggtacaactacacggcctgtggttgtctgggccataactgatgatgtgcgggttcaggagggtcccaaacttaaggtatgtgcactgcgcgtgaccaaccgggcccgcatccgcatcctcaaggcagggggcaagatcctcactttcggccagctggccctggactcccctaagggctgtggcactgtcatgctctccggtcctcgcaagggccgagaggtgttccggcatttcggcaaggccccaggatccccgtacaacctctccaaaccctacgtccggtccaagggccggaagtttaagcgcgccaaaggccgtcgggccagcctaggccacaaaaactaaccctggatccttctctcttattaagaagatttttgcttgaaaaaaaaaacaataaaaac

SEQ ID NO: 647328 - DNA, 437 bp, Homo sapiens
gaatgatatgtaagacagagaatgcaggaaagatgacatatctgatgtcacaagtagagaaatcagactgtggggaatggtctgcgatgacaaatgagaggaagacagaataatgaggactatggctgactattttgtagaattggtgtggaaaagatgatgagagctgcatttaatttctcagtaaagtctgatagtgaacttccacagatagtagtgggagctgtgacaggtttgcaatgagtggaggaaatgaataatttttatagtagctggagatgagattctcttcctgttgtcaaggtcagagcgcagtagtgctatgttggtacactcgcagacctctgcgtgctgtgatcaaaggattctcgctgtgttggccctacaaagtagtgggaattatagcggtgatcctttgctcttgtccgaaccttgtg

SEQ ID NO: 647329 - DNA, 289 bp, Homo sapiens
gcacacaggtcagactttaggacagggcctttctccatctcgactgtagtgttttctgtcactcacttggtgggtaaaaggaccaccctaggccaggagtatatagatacatggtttctgagtcttagagtgagacttttctctaacaatcaaagaatggcgtagaatattcttgttgctgccaggttgagggaaaattctctctcatgctacattttatattgaaaaaatctcatgtagattcaagcttcaacgaaactattgtagtagctaaaatatagctgaattt

SEQ ID NO: 647330 - DNA, 273 bp, Homo sapiens
cgtacacaagagatgtccaatggggcattccatagcagagacagactcgggtatgtttaattccagaggctttgcttggtgataataaaaggatgggaaatagaggaaattagatccaggaaagggcaatagacaggtaacccagctagatgtaagagtacggagcaatcgaagaggcatatccacactgggggtggctataggcctgaaaattgctgaagatgactgctttcactgaggtcaaggattgtaatattgccagcttttgaaagc

SEQ ID NO: 647331 - DNA, 227 bp, Homo sapiens
  misc_feature (213)..(213): n is a, c, g, or t
gtccaattcatccgcgtagggttagttaatgtcttgagtatacttgaggagggtgacgggcggtgtgtcgcgcttcagggcccgtttcaactaatgcactctactctcagtttactgctaaatccaccttcgacccttaagctttcagtaagaggctatcgtagtttctggggtagaaatgtgccatttctgccactcatgggctacacctgnactaacgtctttac

SEQ ID NO: 647332 - DNA, 110 bp, Homo sapiens
catgcttccaggctgttgatgcagcggtagtgagcagatgtggcccccggtgggacaggcctgcactcgctcgatgtctctcacaggctgactcccatcacacatctgct

SEQ ID NO: 647333 - DNA, 259 bp, Homo sapiens
  misc_feature (191)..(191): n is a, c, g, or t
  misc_feature (255)..(255): n is a, c, g, or t
gttatagttttgggtggctgattagcttataggcttgcttcctcttagagggaaaggtgaacggtatctgagttattggtgacgaatctgtacgtgtctacagcgaccttaatacctgccttctcattagaaagaattcaaccgaggggcgtaagagagaaaaagagacgggcaagtttcagaggatgagnggaagtttatgtaaaaaggctttagaacaggaaagaaaggattttgtgtgcggtgctcgaattncgaa

SEQ ID NO: 647334 - DNA, 114 bp, Homo sapiens
  misc_feature (36)..(36): n is a, c, g, or t
tgaagggagtatctcagtggtcagcgacagtgccangtctgatgtgtctcacagttgaaagctgagacagtgtcttgtgagggactgagatgcaggattcttcactcctcccct

SEQ ID NO: 647335 - DNA, 650 bp, Homo sapiens
  misc_feature (17)..(17): n is a, c, g, or t
  misc_feature (69)..(69): n is a, c, g, or t
  misc_feature (87)..(87): n is a, c, g, or t
  misc_feature (90)..(90): n is a, c, g, or t
  misc_feature (95)..(96): n is a, c, g, or t
  misc_feature (122)..(122): n is a, c, g, or t
  misc_feature (127)..(127): n is a, c, g, or t
  misc_feature (129)..(130): n is a, c, g, or t
  misc_feature (134)..(134): n is a, c, g, or t
  misc_feature (141)..(141): n is a, c, g, or t
  misc_feature (165)..(165): n is a, c, g, or t
  misc_feature (171)..(171): n is a, c, g, or t
  misc_feature (177)..(177): n is a, c, g, or t
  misc_feature (197)..(197): n is a, c, g, or t
  misc_feature (237)..(237): n is a, c, g, or t
  misc_feature (254)..(254): n is a, c, g, or t
  misc_feature (264)..(264): n is a, c, g, or t
  misc_feature (320)..(320): n is a, c, g, or t
  misc_feature (396)..(396): n is a, c, g, or t
  misc_feature (402)..(402): n is a, c, g, or t
  misc_feature (542)..(542): n is a, c, g, or t
  misc_feature (600)..(600): n is a, c, g, or t
caaaaatcaacccatcngccaataaaacttgttccttaaagtcttttacagtattttctctcgaaaatnaacttttttttaactgcntanatgcnntcttcacttcatttttcagtaaaganaaccnanntggntaacagnctctcaccactcgacaagaccagncgaggntttggntaggagccagccgtcttccncttgcctgaagagaatcttgttaatctgtagtccagaggnaattctgcgagtgcctnaatacttggnattgcaatagtgcggtgagtgctgagtctcttacaagaccatgtttaaaccaaggngttttctgttttttccagtgccaaaactgaatcaataaaaaaagagccccagtttttagatgaagtttttaaaggntttgcnttggggcccccagattttcctttcttctctagaggcgctgactccccaggcctctgactccccgggccttcatcccccctgagttcttccaggatgaggactgttttccaattactatagttacgagctgggaaaatatnttaattcatgctgttaccaaaaaaaacaaccttgggttcaggtttgccagttattttnttcagaagttcatagaggtggacagcgttcccttgggagttccagccagg

SEQ ID NO: 647336 - DNA, 379 bp, Homo sapiens
  misc_feature (52)..(52): n is a, c, g, or t
gatttggttggaatttttgctaaattgggaatgttgcctgaactttatgacnccattttcttttaacttttttcatgggcttccctatatggacataaaaattaaatgttgaaatttatgaaaaccctttatgaatttagataatttttaaaaattgttaaaattttttgcgccaaaaaagtaatgtaaataaaaattattccttttaaaaatgggcccaaataattacctttccatgtttggtgaaacaaaacccaatgttttttaaatatggagatgttgagtctttttcctttcctaaaggggctgaaaagcattaaattccccattttccttttttgttttccttgtgaaaataaaaatgccctaaggttgggta

SEQ ID NO: 647337 - DNA, 1146 bp, Homo sapiens
ggtgacgcctgagacagcaccactgctgagtgagtctgaggactgtcctcccacagacctgcagtgaggggccctccatgcgcagatgatggggccactgacccacctgctgcttctgctggaggaggggaagctggtgcccaaatggcccagtgcaggcagctgtggtgctctgccaaatgtgggcttgcccctcgcacacagggctcacagtggcatggccttgcatggggtccagtggctgtttggatggacccctgagggctgagtgatgcagccatggaccctgccttgctcccatcctcacctcagatcagtgaaccagggcctccctgttcactggttgacaacatggtcacgggctcagacgtgaccctctggctgtcaccgtgctcacagggatgctggtgtgcttggtgagaccccgcactgcacactgggaatgcctaggtcccttcccgaaccagaccagctgcagcggcacggggacctggatagttcagggcttttccaaacatgcatccatttactgacaacttcctgtccttgttcatggcagagctgttcgctcctcccagatggcttcggagggccgtagggcccaccttggaccctggtgacctcctgtccactcactgactgcctcagcggcctgccccagcgcctgcacgggcctccttccctcctgtgcgcaactgcatcgccgcctgtggtctacggcctgatgacgggcgaacacgccacacgggtccctgccggcggcatgaagaccttgcacgattctcgagtcagcgtgtccataacgattgaccctaaggaagcccattcagttgtttcgcctttcactaacggtccgcaaagttcacgcggcccgagatatggatcaaacacccagggggtaccgggacacgcaaaacagcgaggggcaacggacccgcacaggcaagcacgccccaaaaacgcgatacgaagtgagaaggagacacaagaacacatgcgacgaccgagaaacaccacgacgccagcagtggaagctaagcaccacacgtgcagcgcaccccacgcgccgcccccactccaaaaaccaccaaagccgccgcgctgacagcccaagcccccgcctcccctggctacccccccctctcc

SEQ ID NO: 647338 - DNA, 127 bp, Homo sapiens
atatatctcactcttacagtcagagtggcacatcttgaggtcacggcaggggtggcgtggttcttgcggctgccctctgggctccggatgtactcgatcttgctggctccaggctcttgaggggtgg

SEQ ID NO: 647339 - DNA, 682 bp, Homo sapiens
  misc_feature (475)..(475): n is a, c, g, or t
  misc_feature (682)..(682): n is a, c, g, or t
cttccccactttgaaaacctttattttgggccccggaaaggggggcggcggcccccccctaactgggggtggagctttttagggccccccccaagagccctaaaaaagctaaccttgaagctttccacaacgggcagaaggccttgggggaggtcctcaagcgcgggcttggccttttcgatgagcgggccaaaatgctcgggggccttggggtggaactcggccaatttggcccccccgttttctttgaaagcctaaaggggcgcggccaagccctggcccaatttgtttttttagggggccaaattcttgcccaaggcttccacatgggcgcgccgcgcggcccgcatttccccgcccagggggttaagttttttttgcagcttgggacatttttggccccccccccttttgagagtttggcccccaggggtccacctttgggggggagagctccattttctcctggcacttntttatggaagtcgccaaggtagggctgcaccttggccctaaccctcctcaggatctttctaattctcctgctaagggccttggtcttttttacaggttaccccaaaactcctgggtacagggcccactttttccccaattgtgtaaggggaagtcaccctcccccatttaaaggactttaggttagttgtttccaaggggaccttan

SEQ ID NO: 647340 - DNA, 381 bp, Homo sapiens
  misc_feature (85)..(85): n is a, c, g, or t
  misc_feature (127)..(127): n is a, c, g, or t
  misc_feature (152)..(152): n is a, c, g, or t
  misc_feature (193)..(193): n is a, c, g, or t
  misc_feature (281)..(281): n is a, c, g, or t
  misc_feature (284)..(284): n is a, c, g, or t
  misc_feature (325)..(325): n is a, c, g, or t
  misc_feature (344)..(344): n is a, c, g, or t
  misc_feature (349)..(349): n is a, c, g, or t
  misc_feature (354)..(354): n is a, c, g, or t
  misc_feature (366)..(366): n is a, c, g, or t
tcccccatgaaaactgttcccacctgatggtggagcacacgccccaacgaggagagcatcgactggacccaagatcgagccccancgtcaaccttccctcaagtcgccccaaagacaacgtggacgnaccccacggggaaccttcccgcagncggggcctgacggggtggcgggtgttcctgctgctgctgtncgctctccctgggcatcgttgtctgcgccgtggtgggggccgtggtgttccagaagcggcaggagcgggacaagcgcttctactgagntgnccttcggcggggcctgtccctgggcccaggagccaatgtgnacttttttttttaccgggnttatnaaagnacaacaagatgnccttatttcttaact

SEQ ID NO: 647341 - DNA, 1458 bp, Homo sapiens
tccacgcacaggggggcttgttaattccccccggggccgggcggggggggaccaaaatataaacaaagggcccgggggcgccccgggggtcgtgggcccgggtcgtggagacctgggcgcccgccgggtgtacacacccgtgtgagaaggggtgtgtgcccaggggcgtgtgcgcaggggactggagatgtcatccccccaaaactggagagaagagggcgccctctgggggacttgggaggtgcttcacacaagtgtgcgcataggtcgttgggcgcaccaggtgtcccggggagaagagtgtgtataacggagaagagggggtggtgtggcgcagcggcgccggggtgagagaagttgtgtgagagagaagaccccggggagacacagagaggcgtctgtgtggaacagagagtgtggctcaaaaaaggccacagggggtgagaatctccacagggacaggggggcacaaactggggggcggccgctgggagagtgtgtgcgagaacaaacgcgcgggtgacacacacaagcgtcccctgtgagagagacaccacaaaaagcctctgtggtgtggcgtctcaccacgggcgccacacacaaaaagagagccgtgggcgaccggtgcacacaccagagcgacccggcgccccctgggagagagaacaccggaggggccctaacagagagggggaactctctccatatatacgacaaagggtgcggcgaagagagtgggtgcgccgagagatcaccagggggggagcttcacaaaggttccagaggagaaatatcacatataggtcccccgtttgcgccacgcaccccctcacggggagagtgtctaccaccgcgtgggacacatctgtggacaaccacagagttgcgccccacatttcttgtggtgtgttcccacagcgacatcattttggaaacgggtgcaccggtgtgacaccatctagtgggtgctgcttctccaacgcctttgtggaacaccccagaacgaccctactcttgacattgtacaaacattttggtctcccaaacaatcatccccgtgtttttccccacccaaagtttatcattcccactgcgttgcgaagtaatacccgcggacgcggagcaagcgcaaccacgcagcgtgatataaaacaagaagcacactggccacacaaacaccaacagggctgttagactaccaccccctccagcagcaggcgctaccacacaagacggccccacctgtggcaagacagcttaccaccaatacatcctgtgctagcgctttgcgtccccccgttaacaactggaagtacaacataggtcacaacaacactgatggtatggaacaaatatttgatccccctctgtccccgccccctatcattgaacagtgatggcactacccacagacgagctagtgtagcataaactaacttcttcaacaaatagcccagg

SEQ ID NO: 647342 - DNA, 186 bp, Homo sapiens
ggctagactgtctctatggagagtgcgctacggggtatgcactattcacaccatcaccatgagcacaagtaaaaagaagaagaagcataaaccagtaatacacaaacatcaagtcataatggcatgacaagtaaaagaaaaggacaagggatgccttgtcacgtattacgtccagactcctgtcca

SEQ ID NO: 647343 - DNA, 672 bp, Homo sapiens
gccggcgctgagggcggcgcggcgggccctgacgacggggtgggtggcctgtggcctcctcgtggctcgtgcccagtgctgcttcatctcctgctggcctcagtggtgcactgtgatgttgcctgtgtggtgcgcagtatcgactgcctggctccacgctccatgcctcggctccctgctccgggtccctcgtgcatgggactgcctcctggacctgccagcctcgctcctggacacctgcgccgtgtgtcagcagagcttgcagagcctggctgtgaggctggagcccaagctgcttgccctgtctatcaatccttctgcctgctgcatgcctgcccgagcctggagctgccagctcagctgtgcccatcccgggggggcagcaacggcggaaatccagcaagtaggtgtaatactggtgcccagatatgcctgccaagaatgcagacagatagaccttgtggataattattttgtgaaaagacacaatctgaagctcctagcagttctgatgaaaaaatcagaacaggtatgtactagttgtgaagacaattgcaagtgcagtagggtaagggtgtaaaatgtggaaagtaggtatgtaagacatgtatcgaaagcaccatacaaagagaaaaattaactaaagatcacttgatcaggcagaaagacgat

SEQ ID NO: 647344 - DNA, 822 bp, Homo sapiens
gatccggcgctgccccaggaccgcgccgcgctttgtccgcgccgccaccgccgtcgcccgccgccatggagcgcgccgtgccgtgcgccgggtcccgcttccgctgtgtgttcgggggcttgcgctgtggcggccggagtggacgcgggatgtcctcctggaggcctgctgtgcgtgacggacacggcggatggccactcatcagaaggactgctcgctgccatatgctacggaatccaaagaatgcaggatggtgcaggagcagtgctgccacagccagctggaggagctgcactgtgccacgggctatcagcctggcaaacgagcaaggacctgcgtgtgccaaacggccccacggtgacaaggccagcctggaggccaccatttgtgaagaggtgctgccattgcgtgtctgcgtggggagggcggcccaggccaagggccagagcgtgcgagtacaagcctcatggttggctaccagtgtggacaggtctccgggcatgctgtgtcaagagccaggagaccggagattggctgtcgggggcctccaaggaaaccggatagcgatccttggggttgaggcggaccaagaggacccatatctgaatgaccgctgccgagggaggggggccctgccagggcaggcagtgccgagacacggtgtgacgagggtggtctgctcctgcttcgggggctaacagcgtggtgctgggggtgtctcctgtgacagatgctctgagtggctccgggcggcccagttgccggtttggggatctgctcacccgtgggtctttcgcgccaccggacatgcggctggttagg

SEQ ID NO: 647345 - DNA, 826 bp, Homo sapiens
ggacgcgtgggcaaatttgcatgttgaagcctgtataaaacatggtacagtgagtgaatatacccccatccccaagaacactttatacatattaaatggatatatgattactgtgcaaaaattcattctggaaatgaacatatatttgagcactaatatgtaatgtacacctgccctaaggagaaaataaattataaaactttttacattcaaaattactttcccaagcatgtcttagaataatctatgtgttgatgcatgtaaattgtactttcaggtcaggcacaagcaaatctggttcatttcatgtaaaaaactcagtctcacatcaacagttcagttcagtggctttcatccagtcttacaatcgtttcagtagtccaaaacagtaggtagtattcaaacgtcaatcagcaccatccagaaaaccttgtcgtggacaaaactcagttcactcactagcttctagcacctgcaagttagctccctataaagggttcatacaaataatgacccaaattgttacatgtgtagatattaataactatgtaccagttactagatgtactgtggatatcctaccctcatctactgaacagggataatactgacatacattattagacaaactatcaaaacttcacactttgtaccatttaaaaactaaaatattaactcttgttccataacagactaatcgggatcagtagggacactcgggaacaaggagcaagggaaacaacagcaaaatatcattcacatgtcctaggttcatacatatattatacactaatgtccatatcaatagcacagctaatgcatgata

SEQ ID NO: 647346 - DNA, 1320 bp, Homo sapiens
ggggcggtgatgaccccaacatgccatctgatgtgtcggtgctgaaatccagatggctgtttctgagcctggagtggaggcaggcttgctgcctctacatcgccactgtctccacacccgtactaccagccctcctcatattatataataagtactgcacacaagattattcgaaacactcataaactcatatttaaccacttatagataatcattccaccacatcaacctccaaatagaaccactcgttatcaactttgttctttatacttacataacacacacacaacatttctctttcatcccacatttatattaaaatcatacataccaacacaaattgcatcaataacacccacgacaaacatacactatcaccataatacaataaacatattgtaaccaaatttatcctataacactacaacatacataccttgcacgtgaatataccaattcatctcttccacactagcatttcctcaaacatctttatctacatccttccctcttcatatactatctaatcgttcaccgacactcttcgcatatctcaactctaccaaccttcatgtctcccatcaacatctgaatcacaccctctgctattctatcctactactaaatgatatactctcgtgcgttagccatatacttacttctatattaatttcacagcatactctaccacaaaactcgtttatgcactacccatcgttaactcccccaaattgaaacaccatcacatcttatgacccacccccaatacataccagatccactgaatcttcatattagttaaccttcacgatgacatcaacactctaaactatgtttgttcctatacataccaatagtttctttgtcgtcaacaccaatcttatatcaccctttctatagaaattactcacatcctaatcttttacctacaatccaattcgtattttactcaccaactttcttataatattataacatactaacatacttagctcacccaccactgaatcatacacacaatcacatcatactcacactcatacaagatctcagagaaaaacaaaaatattcgaaataacatatctcaaatcattctactcttgagcaataataaaaccaacaacactctcttacccgctactatgaatcagaccctacaccattccgtgactacagccaagctcacacatcatagacacactaccacacaaccatcaccctcacaacccatccgaaacataacacactaaaaaaccatatcatacagtcaagcaaacctagaattatccttcagcgaacatcctactcagcatacaacct

SEQ ID NO: 647347 - DNA, 947 bp, Homo sapiens
ggtttcggagtgtttttctttgatacgggagttcctcctgctctcgcccctactctttctggtgttagatcgagcaaccctctaaaagcagtttagagtggtaaaaaaaaaaaaaaaacacaccaaaggctcgcagccacaaaggggatgaaattttcttcgggacattcctccgggttctcccggttaactggatcggtctggcgcccctaaaagtccttcgtggaaagcttttaattcctaaagaggacgaaatatcagtcaccgggcggaaatcggtggctggattcacaagggagctggggcatgggaattggggcagactggactggcgctcatgaattcggcgtaaccttcaaagagcaagctgggtcctcggggatcatcacaatcaagccttgggcactgggcgcgaaacagctggccaaaatggcccggggaccggggtcgccaagggctccatacctttgggggcagactggccagcaacccggagaaacgtatctttctaccagttctctggcacaatacacaagcgtcgccagcggccgaacatcggggcccattcgtcaccgcatcctccacgtaaactcactggggcgggtgcagtcaggcctcataaccttcacgcatccgctgttgcgtgaacccaccacaagattcccctccgagaatcttggccacacagcgacacctttctgtgaaaacgcttaaactggggctcgccttgggcccccattttgtcggggagcatataccaaaagggggccacatatactagtcctttggccatcgtgaacccgctagtacaattatcaccaaaggggcgccataaattgggttcatctgggggctgccctttccagagacagactgcgggaacaacgggtctcagcggttccccccctttctcctaaagcgggggtctacccgctgttccaccggca

SEQ ID NO: 647348 - DNA, 216 bp, Homo sapiens
cgtgtgtatatgagtgtgtgtgtgagagcatgtgagggcgtgtgtatatgagtgtgagtgtgtgtgtgagggcatgtgtatatgaccatgtgtgtgtgggagagcacgagggagtgtgtatatgagtgtatgagtgtgtgtggttgtgtgtgaccgtgtgagtcaaagagcatatgaaactgtgaatgtgtgtgaaaacgagtgtgtggtagtgtg

SEQ ID NO: 647349 - DNA, 110 bp, Homo sapiens
cccatttggcaccagtgttctcccccttgtcttgagcaggtaggacacgctgtagacgcggctgcccacgtgcttcaccaggatctcctcgcgggggtccggttgtctga

SEQ ID NO: 647350 - DNA, 509 bp, Homo sapiens
  misc_feature (453)..(453): n is a, c, g, or t
actcctatatatcagtattgaccacctctcctcaacctgtctctaaaggtaggagaaaactgatttattctccttgtattctcttctttctctgctccgtcattagtttgctgatattttctgttcggaaagggggtgaagaaccttcccccctttgagggagataagttttggtttccctgtaatatggaacaaacttcatacctggcaagcacaaagaaattattattttgccaaagtatgttctgcagaccacatattccagaaattacacttctaagcaaaataatctttgataatttgaatttgggaaaaaaactgcttactacattctttgatactgatatgcaatacacattaccatgttacagtctcaagaagttgttcagttaactgttaattttatttaatctggtatttaccgtatttaatttatgaatcactgtaagattntaatttttttttaattaatgttccatgcaattcatggaaaagactgatctatagga

SEQ ID NO: 647351 - DNA, 363 bp, Homo sapiens
tgcttcctttcccagattggtaattccatcatggctgggacatttagaatccatcttggggagctttaaaagtcatgggcggcaggagagacagctcatgcctgtaattccagcactttgggaggccgaggcgggtggatcgcctgaggtcagtagtttgagaccagcctggccaacatggtgaaaccccgtctctactaaaaatacaaaaattagccgggcatggtgatgggtgcttgtaatcccagctactcaggaggctgaggcaggaaaattgcttgaacctaggaggcggaggttgcagtgagcccagatcacagcacttcactccagcctgggcgaaagagcgaaactcccatctca

SEQ ID NO: 647352 - DNA, 163 bp, Homo sapiens
  misc_feature (145)..(145): n is a, c, g, or t
  misc_feature (154)..(154): n is a, c, g, or t
agggaggatatacggccaaatactcaagtggtcttctctgtgcaggtgagctacagctgatcttgtcagagacaacgttagttctactgagtcacccagagccctgtgctggtcgctgagggtttagttccatgtggacagtctnccacaattncctctgggg

SEQ ID NO: 647353 - DNA, 156 bp, Homo sapiens
ctccgggacgcatataagtgattagagaatgatcaaactctgtagggattacatcaggataaccttcctgatcctgaagttcttgaagactgtgtctgggtccatctttgtagctccttttagtacctaacacatactggggtacctcaagggtat

SEQ ID NO: 647354 - DNA, 871 bp, Homo sapiens
ctcggagaacaacgtggtgtacctgggacctcaagctggagaacctcatgctggactaggacgggcacattaaagatcacagacgttctgggctgtgcacggatggggatcaatggtcggtgccaccaatgaagaccttttgcggtagcatctgagtacctggccccgaggtgctggaggacaatgactacggtcgtgcaggtgtactggtgggaaggctgggctgtggtcatgtacgagatgatgtgcggtcgcgccgtgcccttctacaatgcaggaccatgacgaagctttatgagctcatcctcatggacggagatcctgggttcccgcgcacgcttggtcccgaggccaagctccttgctttcagggctgctcaagaagtgaccccaagtcaggaggcttgagcggggtgcatccgagtgacgccaaggagatcatgcagcatcgcttctttgccggtatcgtgtggcagcacgtgtacagtagaagaagctcagttccacccttcaagccccaggtcacgtcggagactgacaccaggtattttgatcgaggagattcacgggccaggatgatcaccgatcacagccacctgagcaaggatgacagcatgagagtgtgtggacagcgagcgccaggtccccatggttcccccaggttcttcctactcgcgccaggcggcacggcctgatgccggcggtgggactgcgctggaccgatgccttgtgacgggactggccacggcggcctcgtgcgcatgatcctgtatttacggcttccactctctcgcggtgcgttttgggaaagccagctgtcgttttgggccccatggaaagcccttttggtctcggtggcggaccccccccgg

SEQ ID NO: 647355 - DNA, 144 bp, Homo sapiens
gattttttggaaccgctgcgcatgagagccaagttgaggaagaagcgaatccaggccgtaagcgcaaaagaagaaagaggatgcagagggcaaggaaccgcaagctgtttcaccggggaggccacaggagcagaaacaaggaat

SEQ ID NO: 647356 - DNA, 507 bp, Homo sapiens
ggtccccttcctgccagagcaccgggcacacctcactgtccttcctccctccagcggcggtgctctcttctagactacgggcccagggaagagggagggccccactggtgctgccctgtccctgagtagggctgggtgaagggcaggggtgcgacaccggctggagcaggaggtggcagccatcgggggcacacggacggaggggcagccctcccccaagcacacggcacaccggggggacagagcggggtgtgcccttgattatatcaaataaaagaagcagccccatcaccagtggaataaaccacagacctgaagcccctagggccgcccagttcagtctccagggggcagtgagtgagggtgggagacagcgcggccgtaggggcctgaggagccactcccctctatggggggaagggagaacagctccagcggcctcctcacctccttttcggtgaatgtcttgctgagaggagacaatattcttatattcttaacagaaca

SEQ ID NO: 647357 - DNA, 129 bp, Homo sapiens
tcgtcaggctcggctcggcctccaaagccccctcttccccgacctatcataccccgacctctaccaccgattccgacacgacccatagctccacgcctttcgtacccccgggggtatcctactagtagt

SEQ ID NO: 647358 - DNA, 1674 bp, Homo sapiens
  misc_feature (1188)..(1188): n is a, c, g, or t
agcggctcggccgcgcgcgggtctggccggctctatgtgggaaatgctggctgtgctcctgagcctgatggctgtgctgtgctgtgtgctgtgcctgctccctgctgggctctctgtctgctgttcactgtgtttgtccccatgctctgtctgtgccacactggctgtgctgcctgtgtgcattgatgctgctatccactgtcctgtgctcctgtgtgcctgtgatgccacaatgcacccatgccccatgccctgtagcccctgaacctgtgagctgtgtgtgaccctgcttgtcatgacacatgtgttgtacgtgagtgcatgttatctgtgatgtgcatgttgccaatgactctgtgaacctagttgtcctgacgactgactgtcatatgacgcctgtgagaccagtggtgacttgtggacaggcaatacggcaacttgcattgcaagtggtgtctgcatggcctgtgtgtgtcaagacgtacaatgcatcagggttgtaagtgtgtgcattgtgtgcgcacttttcgacgtaaggtgcgctgacataccggacgacctgcgtacatcacctgagatgcatggatgtgtgtgaagctgcagacaccattatcatacaagaaccacaggaagtccatgtgaatcagcgatgccaggtgataaagatgcccccatgacccatcgtatccttggcagacaacaatgtgaaccaatggggtctgacagatgaaccatcacctacctatcagtggtggtggtatacccaacaatttatacaaggagggaaccatgaagcaaagcagaacaacaatacccaaggatggcaccaccaacatatgagagagaccatataacattggcactaccgtcgggcagcaagaggcattcctgcatagtggggcacttagtgggcatatacctataccaaaaatggtatagggagaactcaacaaataagcacagttacatagagaaagcagtggtgacgataaaaccgcaatagccgaggcgctaggacttggagctttacccggactggcgatatgcaggaggcaaaacagactggcgctagtacagggactattagaccatgtatagacgtaaaacgacaggaacaaagatcacacaggtcggctgagagcacccatgtgtgtgcccccacacgaacacgatggcgcacgtatgggngagcaccaaattcaagagcccatgagtacacagcaccagagggcagcaacagtatgagcaaccacggggaatagaggcaacaccccataggaatcgagacacaccaaagcgacggaagcccccgaatgcgaggggcaccaagggaaagcgacaacacgcagaacgtcaacagggcacacaggcaccacaaagaacttgaaaccacggggccgaaccgagtagtgatacacagcgcaaccggaggagacgtggcacagagggacacaagggaatgagccggacaggaagaagcaccgccgataacacatcaacatagcggagcacagaaaacgaggacacaccccccggagaagcgaggaacagtagagacgaaacccatgagacaaagcactcaccagacacagataaggcacaccaagggagagaaacacaagacagcagacgcgaacaaacacagacacgaaaagagagcaaacaaacacagag

SEQ ID NO: 647359 - DNA, 324 bp, Homo sapiens
ccttttttttaatcaaaaagggcccaaaaaatattatccaagaaccctagggctgcttttaccagcgatgaaagcacgtttttataaggtcaaataatggaagctgacccccctttgggcggctaaatttaaaaaaaacgttcaaaaatccctccggcccatttttgaaatttgtctttttttgaaaatttaaacaccggttatttgtttactttaatcctttaggaaaaagaattcaaaactgttgtttttttttaacccctttttgcttttcaaaaaaaaaaactgttcccccccaaaaaaaaagcccaaagttaaagttta

SEQ ID NO: 647360 - DNA, 505 bp, Homo sapiens
tctcacacatacagttatagaacgaaaatatcatacccatccccaaaatgtgatgaatcatataaaataacttagtgacctgtctcatctcacaaacagtcagaaagagaaaagaatagtactttcagctagcctatgcaagctagttgaaggctaagagggaaaacctatcaacggtgtaacataacagaagtaaatgaatatctcgcggccttcattcgaaacaggcactgacccagagtgattttcagtaaatgtccctaagccaatggtaaatgaggatcgtcaggaggtaccggcggtcgcgatcatcccaaggacacatacagtgtctaatatagataagttgggtctactctcttctatatatatgtagacatcagctccaagacgtaggaaaattttactgatgcagatgagtggaagaagtcgcggatttgatgaggctccatattagaagtacgttaggccaggcacggtggctcacactgggcgcgtaggggta

SEQ ID NO: 647361 - DNA, 225 bp, Homo sapiens
cgacgcggccgtgtgtgggtggtgactgccctgtcctctgcctcgggttcattcttcggtgatcactgcccgttgctgggtggcgctgcccgtcctctgacttgggttacttcttcggtgacactggcgttgctgggtggcgatgcccgtcctctggcttgggttacttcttggatgacgtcggcgtagctggggagaatgtgccgttcccatgactgcctcgta

SEQ ID NO: 647362 - DNA, 324 bp, Homo sapiens
  misc_feature (40)..(40): n is a, c, g, or t
  misc_feature (97)..(97): n is a, c, g, or t
atcaatgaaaactttctttaccactaagatgttgaatttnttgccataatgggaaagagaggcctttcgtgctttctcaatagggctaactaggttnattattgatgttccaaataggcactctgtctttgcccatagtccccattttacctccacagaatagaagaacaagaatggcttcaaacacatgctgggtaacctaaaggcaaaaataaacaccttatttactagtaactctctttcaacaaatttatttggtttggcagtatacattaaattgtattatgtatcttacataaagcatcccttcggattggtaaaagg

SEQ ID NO: 647363 - DNA, 233 bp, Homo sapiens
ggagatctgcaggattcagccctatcataatgtatatcaggtggagtatgatgactcatatcggcaagagcgtcgtatactagggggatatttgtaaacctacatgaatggtgctttgaaagaactaatttatttttacgagggcagtcctcaaatattgagtcttaactacttggtagtgatgttgagacatgtataacaagcagatggacttagttatgtaacgtcggaaa

SEQ ID NO: 647364 - DNA, 290 bp, Homo sapiens
  misc_feature (52)..(52): n is a, c, g, or t
  misc_feature (72)..(72): n is a, c, g, or t
cgcgcatcccctgtggctgccctgaaggccaaggtcatccagaagctggagnacgtgtccaagccacccgcntacgcctaccccgccacccccagctcccaccccaccagcccgccgcccgcctccccaccgcccaccccgggtatcacccgcaaggaggaggctcccgagaatgtggtcgagaagaaagacttggagttggagaaggaagcccccagccccttccaggccctgttctcagatatcccgcccaggtacccgttccaagccctgccaccgcactacgggag

SEQ ID NO: 647365 - DNA, 370 bp, Homo sapiens
tgagcgtgcgatagtgtgctgataatttgtgcgtgatggtactaacctaccggtgctattgatcaggctcagtttgaattcttccgcgagacaggtaatagttcatccatcatttgatcccctgtagtagccgccacagttggttttcactacctctccctacgactttgcgtgactccaatacatctcctggttgtcctgtgcggtagttggtttccagctgttggaagacgtcttgattgagagactgttgatcgcacccccatcctggccacatctctctcagtatctgataatgctctgtccacacctccacaccaccttcctcctctaccctctgtcacaaaggcacaggtccctcttccaccaa

SEQ ID NO: 647366 - DNA, 948 bp, Homo sapiens
  misc_feature (352)..(352): n is a, c, g, or t
  misc_feature (391)..(391): n is a, c, g, or t
  misc_feature (394)..(394): n is a, c, g, or t
  misc_feature (436)..(436): n is a, c, g, or t
  misc_feature (515)..(515): n is a, c, g, or t
  misc_feature (517)..(518): n is a, c, g, or t
gggcagtttgaaaacctaacacctgaacttccttttgagccaaaccaagaagttcctgtagcaccttcacagtccaggcaagatttgactgatgaattagctcagaagttatttgatgtttcagaaataacttcagcagcaatggttcattcgttgcctacagcagttccagaatctcctagaattcatcctacaagaacacccaaaacacctcgaacacctaggttacaagatcctaacaaaacaccaagattttatcctgttgttaaagaaccaaaagccattgatgtcaaagagtccaagaaagagaaaaacaaggcatagcacaaatccccctctagagtgtcatgtnggttgggtaatggattccagagaccatgggccaggaacntcntctgtcagcacttcaaatgcttcaccttcagaaggcgcacantagcaggaagttatggatgtactcctcattacattcccaaagttccagaatccttctcatgaacttttgaaggaaaatngnnttacccgaaaagttggtaccacaaggtatggacgaaagaatgccttagtgcacagaaaaggttggaacaattgggtaaagtatcgcaaaggacaattggaataccctaagatatagggatttatgggtcattgtgaacattagaaaattcagttatagatacataaaaagtgtttaaagaatataagacaaactggatttggagaaatattgagagcagaaacagtcaacggagaagcgcgataagacagtagcaggcaacacggataaaacaagaaacctgcgcctgagaaaaaaaaatttacaccggaaaaaaaaaaatcgcacaaggcaatagcccaaaaagaaacccaacaaaaaacacaccacacatggagcgacaccgcagttggcccaaaaccaggttggagacacacctcaaacaaaaccaa

SEQ ID NO: 647367 - DNA, 747 bp, Homo sapiens
  misc_feature (151)..(151): n is a, c, g, or t
  misc_feature (190)..(190): n is a, c, g, or t
  misc_feature (193)..(193): n is a, c, g, or t
  misc_feature (235)..(235): n is a, c, g, or t
  misc_feature (314)..(314): n is a, c, g, or t
  misc_feature (316)..(317): n is a, c, g, or t
ggcacgagcggtcacgagagtcagagggttttaatttacttgtgaagttcacactattgaaactaattgcaatgcttgactttattttctttagagtccaagaaagagaaaaacaaggcatagcacaaatccccctctagagtgtcatgtnggttgggtaatggattccagagaccatgggccaggaacntcntctgtcagcacttcaaatgcttcaccttcagaaggcgcacantagcaggaagttatggatgtactcctcattacattcccaaagttccagaatccttctcatgaacttttgaaggaaaatngnnttacccgaaaagttggtaccacaaggtatggacgaaagaatgccttagtgcacagaaaaggttggaacaattgggtaaagtatcgcaaaggacaattggaataccctaagatatagggatttatgggtcattgtgaacattagaaaattcagttatagatacataaaaagtgtttaaagaatataagacaaactggatttggagaaatattgagagcagaaacagtcaacggagaagcgcgataagacagtagcaggcaacacggataaaacaagaaacctgcgcctgagaaaaaaaaatttacaccggaaaaaaaaaaatcgcacaaggcaatagcccaaaaagaaacccaacaaaaaacacaccacacatggagcgacaccgcagttggcccaaaaccaggttggagacacacctcaaacaaaaccaa

SEQ ID NO: 647368 - DNA, 196 bp, Homo sapiens
tagccctgtgtgtcccgtgtagtccctgtgtagtccctgtgtgacccgtgtagtccctgtgtagcccctgtgtagtcgcgtgtgagccctgtgtagtcccctgtgtagcccctgtgtagtccctgtgtatgcccctgtgtagcccctgttgtaggtccctgtgtaagcccctgttgtatgccaatgctgtgtgact

SEQ ID NO: 647369 - DNA, 171 bp, Homo sapiens
tgaatacgcgacaactaggtgatcctagcagtagtcgtatgcttgtttcacggacttagccatgcatagctcagaataactgcattgcaggaatctgcgcatggatcattacatacagacgtaaactgccgccaaaaatcttgcggactccgcttaaataggataacttgg

SEQ ID NO: 647370 - DNA, 873 bp, Homo sapiens
  misc_feature (233)..(233): n is a, c, g, or t
  misc_feature (401)..(401): n is a, c, g, or t
tcctctctccttcctcaagcttaataaggctctggcagggcatccaagataacacagctctgattcctcagacacactcagccccctctgataacttcataaaacagctccttattgtctgggccatgaagccaggctaatgctaaagttccagttgcaaaaacgattgtaactgctacttatccgttatgtaggccagcgtctcctgaggtactggacactctactcactgngcaccatgcgattcaggctcaggtggtgtcaacagtcttcccgtgagaagcaagccagtacacccagacagggtctcagaacacgctagagtcacaaggaaagggcttggcagtccgagatgcacatgtgcagtacagtgaacacagaggacgaagaactgcatgaanctgtgtatgtttcttcgccatcacgtggttttagcagcacccgtagggaagaccctgatggtagcgtctttaatgattgctgacatggacgcactaatatgctcaacaatgcctccaacaggcaaatgtcggaaatacactttcagagctggatgggactcaagatcatctaatataatcgctctcatttgatttcctctcaaggaaaccaagggcaagaaaagtctaggcaatatcgctcacattcacacaggcagattagtaacagagctgagttcgggtctggtataggcttaatactcttgattctcccagaaatgaagcactaaagataaaataggaatatattggataaccaaatatgtaaccagaatacatggggcaaaggggttttaattatattaactattagtaaaatctgaagagaaaagttgacagtcagggttacaacagtgataatagaaagagggca

SEQ ID NO: 647371 - DNA, 363 bp, Homo sapiens
  misc_feature (180)..(180): n is a, c, g, or t
caaaaaaaacagctgtcagcccgaggaaaagcccccggcctgcagggcctcagcttttttttccagacccagatccccaaaaaggtggccctggacctggagtcaggaggcggtgtccaggaaagtcgctcatcaaccccgggttcaaaagtaaaaaaccagctggtggggtggacttcnattaaaccttaaggtgcagcccaagcgtggccccccggggagtccgcctattaggggaaaggcagttttttaggcccccatcaaagaccccccgcccccccctccccctgcctgttttgggccaggactaacccggctcctcaaattccttccctgtcaaataaacagctcccttggttggga

SEQ ID NO: 647372 - DNA, 1389 bp, Homo sapiens
  misc_feature (160)..(160): n is a, c, g, or t
  misc_feature (259)..(259): n is a, c, g, or t
  misc_feature (371)..(371): n is a, c, g, or t
  misc_feature (486)..(486): n is a, c, g, or t
  misc_feature (501)..(501): n is a, c, g, or t
  misc_feature (509)..(509): n is a, c, g, or t
  misc_feature (521)..(521): n is a, c, g, or t
  misc_feature (527)..(527): n is a, c, g, or t
  misc_feature (742)..(742): n is a, c, g, or t
ggtgcgaatcgcactcacacggtgtttcttcagacgattgcgcgtcgaagggagagcccttgggacgtgtcatccttatgagactgttgtgcagaacaacggctcccaacaaggagcagccaagagagaaattctatcgatgcgtcatgcatgcatgtgngcatcagaagagagggcagttgtgggttagtacagggatgtcctggcttgtacatcagaagtataatgcctagggcttgtacatgttgatgcaaggganttgatggactgtacatcacgtgccagtaatgtggtcagcgtggtatggacaacttgtccatgtactaatgggtgtacgaagagtctatggagaagactgaagaaccgttcantaccataatgagtgcattaccaggggtccatgagacacatctgtggcatcacacatggtgcaatatgtgacgtggtaaccgcatatgcaatagataaatggatctcaccacgatntgtgttcaatcttgncatcttgntcataggtatcntgatgnatgggttgtgaatggtacacagcaatgctgagctgattcggggacataacgggtggaaaagcaatggcgtcatggacatctagttgatgcgaagcggcgcattgcgaagcacgacttctcggggaatcccaggaatgaatgtggcaagaatcacatggacaccgcgaaggagtgcatgccagttagccatggatgccatgcttggaacacaacanatcgggagtcaaaggtatagagatcgtatgctccgtaaggataattctattaagcgcaacccaaagaactctaatttaccctatcgtcggtttaggcctcatcgtgatggaagacatcccctcttccaatcgccctaagtttggcgccgcagagaggaatgcttaagaaaattgcttgtggttggactctccgaccatggtcaggaataccccgttgtgagagcgtctcccattggtatgcttccccttgttgttccccttgcacaaatggcctaatgggggtggcacttgtggcacgtagggcgttgaacggtatgaactggagttgcttggaaagtttaggaaaccttaacattttactcggatattgaaaacccacccaagggtcgccggcggacaggccttggttagaaaaataagctcccccgcagcaagggggcgcccagaggggcaaaaggagagaaaccggggaatttgttggtgcccacaacggtggggcccccaaaagggggggacgcggacataaaaataaacgcacacgcagcagcggagggcgcggccaggtataaacacagctgccgggcgttgcgcacacgacagcagggacccggaaaacatcagcggaggagaaaacagcaacacggggc

SEQ ID NO: 647373 - DNA, 262 bp, Homo sapiens
ttggggttgctctagaggatccccgtaggcagcgcagccacatcaatttcccaagcaatatccaaattgccgttgaaacgttcattctcgatatacaaataggaacggacgagagcaagctcctgttcaagcggaacaagctgctcggaattttgaaagttgaagctggatcgcaaataatttccgaactcatcaagcagaaggcgcattctgttcagattgatgtggcctcgctgcctacggggacctctagatcacccca

SEQ ID NO: 647374 - DNA, 409 bp, Homo sapiens
  misc_feature (5)..(5): n is a, c, g, or t
  misc_feature (25)..(25): n is a, c, g, or t
  misc_feature (31)..(31): n is a, c, g, or t
ctttnacccccccctgtgggtttgnccttgncccccggaaatttgggcctaaaaaccttagaaaaaatccttacatgataacctcagtgatgccttacctcatagtttttggtgtttctcatagataagatataaatcggctgggcgcggtggctcatgcctgtaatcccagcactttgggaggccgaggcgggcagatcaactgaggtcgggaggtcgagaccagcctgaccaacatggagaaaccccgtctctactaaaaatacaaaattagctgggcgtggtggctcatgcctgtaatcccagctactcgggaggctgaggcaggagaatcgcttgaacccaggaggcggaggttgtggtgagcgaagaatctgccattgcactccagcctgggcaaacaagagca

SEQ ID NO: 647375 - DNA, 147 bp, Homo sapiens
  misc_feature (40)..(40): n is a, c, g, or t
ggtatggtaaaggtggagaagaatagaataggcagtcaantaagatctgctcacaagttaacaatttaagacaatagacacttgaagtaaatatagcatgtattacgttatttgttaagccgttacacattacgaatgagcaggatg

SEQ ID NO: 647376 - DNA, 1274 bp, Homo sapiens
gaggacaatcccaaggcggtgagggcacagagcagtgaacccagcacctacccctgaagcagacgacgatggccgcagactactggattccatgcattctgagccgggaagtactccaccatgatccatgcaatgacggggcacgagaatcatggagcatggaacgcctaggtggcttcgctcgacttcagggccccacggtctttgtctgggaacatcggggacaacgcgtctacgattgtccaagtgtctacctagctggcgcgatccgcctgtctggtaatggtaggtgaagtacagtcttggcactatcgatcaccctgtggtaccctggatgcgctcaccgcgattcgctgcgagatgctgcgctgtgagcgcgaccccgtatggtggctcatcactgagttgcctgagggccactgtcacctagtgttcgctgctgaagagtgactcctacggtggccgtgctagctagccggctggcgctgcacaagcgccccgctgctacctatcagtccaaggtgattacgctgtgcctgtaccgagacctcagcggcatgttcaccactgagagccgcctgggtggggcccgtgacgagctcgggggccgcagttggcccggaggcctgagggcctgggctcagagactagccccacagtggatgacgaggagggagatgctgtatggggatgcgggactcctcttcagacccaaaaaagggaaccgagggccagacataatcaagacaagcagcctgaatgatgcggtgaccctagtaaacattaccggagcaaagagataaccaaatggatggcatgcaagatagacggcagaacatggaaccctatgaggatctaccagcttacccaacatggcaggataggtgaaccaggggacaggaaccataccacgcagcgggcacaagcgagccactgagtaggaacagagctcctctgggagagcgaccagaaacaaggagcacaggactacaatagaacgagaggccaagacaaaggagaacgcaagcacacaaggcaaaagaggacaaacgataagcgttaggaacgacaaacaaaccacaactagagcgctcaggcgaagcagaataacagagaagaccaaaacaacacacagaggacacaaccgataaaaggcgagaacacgtaaagaaacaacaaaaaaagggacataagtcagaaccaagcaacatacaaaaataagacacaagaggagcacagtccacgccagcatgagaaagatagacaaaaaatgt

SEQ ID NO: 647377 - DNA, 191 bp, Homo sapiens
attactactttgagtttatttaaacaggaaacaattttaagagagctataaagaaaacagagtacagagacttatttagagtatatatatatctagagtgttagcctatatcacctgatctaaaatgcattgcagtttttaacgcaacacgtacagacatattatctcaatataccttcagctttcataca

SEQ ID NO: 647378 - DNA, 257 bp, Homo sapiens
  misc_feature (30)..(30): n is a, c, g, or t
cagctgagccacgccaaccgccagcgcgantgaccctcaaacacctcaggagtgtccagggacggctgaaggatacgcagctccacctggatgatgccctccgggtcagggaggacctgaaggagcagctggcgattgtggagcgcagagccaacctgctgcaggccgaggtggaggagctgcgggctactctggagcagacggaaagggcccggaaactggcggaacaggagctcctggactccaacagagggtgc

SEQ ID NO: 647379 - DNA, 408 bp, Homo sapiens
gggcccatgacacgagcatggcttactgcaacctccgccggccaggttcaagcaatcgcctcagcctccctggtagctgggattacagaggcctgccagcatgcctggctaatttttatatttttagtagagatggggtttcaccatgttgcccaggctggtctagaactcctgacctcaggtgattcacccccccttggcctcccaaaggtctgggattacaggcataagccaccgttcctggcctcctaatctcttcttttagggacaccggctgtactggactagggcctcctacagtgatctcattctaccttaatcacctctcaaaggccctgtctccaaatacagtcacattctgagatattcggggttaaggcctcaatatatggattttgggacacacaa

SEQ ID NO: 647380 - DNA, 993 bp, Homo sapiens
catgtccttccttcttgttctatcgctgttcttttggcaagctgtgtttcacctacctctatttggtccatagcatgttccccctgggggcgcatgcccctactggatggtacaaagcgcgaagaggccccccgcgtcgaaaattcccggtttcgatgtcttgttccgatgtgcttgggcgatatcaaccgctttaattgtggacgccccttcgaaatgtgggcctcgctaaggcgataattttgacgcgggccgcttctctcgcttggcttggtctgggcccctggttcccatggggaattccgttctagaatggccgttagagcttgatgacttattggggaccatgcatgacaggtagttcacacatggggagcactaggtggattgagtatcgtaggacggggcttggcgcccgttcgtagccgttgtccggtccttcgcttgggcaaattttaaagccttggccacgagcgctctgaaggtattaggccccttgtcattgcttcagtgtagcacgaggggcagcgcgcggggacctcgtacacctctgcatgctgggcaacggggtctgctgagggtctgatggaactccagcagctcgtgacaactgggtatgagactgggcaatagagctcagtcacaggccatgggcttcctggcctagagtgaggtagacgcaggcggcagaggtgcatggaccacgatctccgccaagtcatctgcccagcagcgttatccgtcgtgtccccagcccacgtgctccttgggtgtcagcttcctcgtgacctactatgggagagagtcagctgccttgtgtatccgttctggggccacagcttgctgcaaagtcctggatcatgccacatcaaccctcgggagtggtgttcccacgtgctggctcccagagctttgaccagattgtgatcccagcgttggccccatatgttgtgttctggactgaggataacagcggtggactgcagtgttttt

SEQ ID NO: 647381 - DNA, 266 bp, Homo sapiens
gaacacactaccactaccaacttcgttctcaattatcacgtcggagctaagtgatgggaactcattacaacagagaagggaacaacagacactagggcctaattgaggacggaggagggaaaggggcagcaaaaataactattgcgcgttaggcttcataactggttgactgacaactacatctgtgtaacacaaactctcatgacaagacgttacctatactaagaacacccttcccatgtacctctgacaccctaacaattacg

SEQ ID NO: 647382 - DNA, 243 bp, Homo sapiens
agggttgtggggtggagggagaaagggctgggagggagtggggaggaattgctagctgtagtgtgacacattgtagtgtttgccaggaaaggagccagtcatgccggaaacattgatttttgggaagccacccgggtttcattcctcccgggggtgggaggcaacatttcctctttttacagaggggacatcctttttttttacaaatttttcaataaagacacatttttgagtgaaatccca

SEQ ID NO: 647383 - DNA, 434 bp, Homo sapiens
  misc_feature (45)..(45): n is a, c, g, or t
  misc_feature (86)..(86): n is a, c, g, or t
  misc_feature (121)..(121): n is a, c, g, or t
  misc_feature (137)..(137): n is a, c, g, or t
  misc_feature (144)..(144): n is a, c, g, or t
  misc_feature (147)..(147): n is a, c, g, or t
  misc_feature (166)..(166): n is a, c, g, or t
acacccagctcatcagaagaagaggagctgggtcagcaagctaangccggcaggaatttcagaaaccctttggcccaagtaagctntgggcaggaaagccttcggtcactgttggctacanagacccttcccctgtntcagctnagncagctcgaggcccccgacnaacacttgcaggggtccctgctattagcgccccaccgccgtggagttcgttaccgcttccttagaacttctacagaagccaagttccctggagccctttggcagctcttagctttgcagtcgtgtaattggcccaagtcattgtctcgccttcactttccaccaagtgtctagagtcatgtgagcctcgtgtcatctccggggtggccacaggctagatcccccggtggttttgtgctcaaaataaaaagcctcagtgacccatgagc

SEQ ID NO: 647384 - DNA, 118 bp, Homo sapiens
  misc_feature (16)..(16): n is a, c, g, or t
tggtggtgcacacctntggtcccaattactggggagactgaggcggaagaatcgcttgagcccaggagatggaggttgtcgtgagctaggatctgccactgcactctagcctgggtga

SEQ ID NO: 647385 - DNA, 163 bp, Homo sapiens
aaagctgcagtcgtggacatgaggcacagtcatactgagagcgcagtcgtaatggagagcgcagtcgtactgtatgacacagccgtgggagccatggagtgtcacaccatcaggtgcacctcctggaagggggattcaacagcctccggggggagtgctcttt

SEQ ID NO: 647386 - DNA, 361 bp, Homo sapiens
atggcatgtagtgaggacatgagacactgcaaagaggatcttgccatgatatagaggaacatcttaaagccggggcggagaagttcatggacaatgcctgagactggaaaccccttcaagcctctttgcctcatcatttaggtataaaacaagtgttctatacataaatgtgactttcaaatgctgtaatctggatgccaagtatgacaaccactctagtagaggaatgtgatctagcaaagattttaaaactaagcagaaaacagtagtccttggccatatggaaaggaacaaattgtaatagcaacactctggtggaagcagaggcaagggcaatcctaaaccaagaaactacagcaaa

SEQ ID NO: 647387 - DNA, 144 bp, Homo sapiens
aacaaattctcaaagatatggctgccttcaataacggcctattattttttgctttgagtaaccaactagcaaagagaatgttatgagaggtgctacaaataaccaagggactgcgaatttttcgcatgcggagtccttttgatc

SEQ ID NO: 647388 - DNA, 216 bp, Homo sapiens
cagagtatccccattcaatccgcggtgacgccactcctggtactgctgaccactcatagacgaggtcgtacactgttgctctcattcctcggtgaactccatctacgtccatgccctcgcctgtgtaccacctggacgccaaggccttccaggcggatacatggcatgtgcaactgctccgaagatccgcttagtacagctcctggcatggctcca

SEQ ID NO: 647389 - DNA, 166 bp, Homo sapiens
atttttcttccattgagttgcttttgtacctagtcaaaaatcagttgtgcatatttgtgtaggtctctattgtgacattgatctatttatctctctacaaataccacacagtcttggattactgttgctgtatgttaaatcttaaaatcaggtaaaactgagacct

SEQ ID NO: 647390 - DNA, 365 bp, Homo sapiens
tcctgaattgtgtggtgttatgaatggagaatacctagatacttttataagaaagaacgacgcgagcttcgacaccatacttctatttatgtatgctagccaaaagagtatatcgatgctcttttggtggacaaaacatgttatgtctccattaaaaagaagcccaatgcatcattttggaggtccatgatggtacgtatggcccacacatgaatagattagcactcgctgagaagattttgaggcttaattactttaagcaaggacttgagtaggattatatgtcctacgttagacgatgtcatgaatggaaaatatacgcaaatcttaaatatattccagcctcgttgttatacaacataaca

SEQ ID NO: 647391 - DNA, 277 bp, Homo sapiens
  misc_feature (86)..(86): n is a, c, g, or t
  misc_feature (151)..(151): n is a, c, g, or t
  misc_feature (183)..(183): n is a, c, g, or t
  misc_feature (190)..(190): n is a, c, g, or t
  misc_feature (245)..(245): n is a, c, g, or t
  misc_feature (253)..(254): n is a, c, g, or t
ccgagcgcgtgccctgccgccacgacgacgtcttctttccgcctagtgcctccttccgcgtgggctcggccctgcgctagccccgnggtgtccgcagcatctcggctctgggccggacgttcacgcgcgacgaggacctggctgttttccncgcccccgggcctacgcttccacggccgggcnctgacgngggccccgaggactgcgcggaccgtcgggcgcgtctcggcaaccggagccaccgngatctgcnngccctgctccacccctgggcggc

SEQ ID NO: 647392 - DNA, 543 bp, Homo sapiens
  misc_feature (5)..(5): n is a, c, g, or t
  misc_feature (385)..(385): n is a, c, g, or t
agagntgtgcagacacaactacgagctgagcgggcccatgtctctgcagcgccgagtccagcctagggtgaatggttccttcttcaagaaggggcccttgcacgcaccacaacctgcttgtctgccacgtgacggatttctacccaggcagcattcaagtccgatggttcctgaatggacaggaggaaacagctggggtcgtgtccaccaacctgatccgtaatggagactggaccttccagatcctggtgatgctggaaatgaccccccagcagggagatgtctacacctgccaagtggagcacaccagcctggatagtcctgtcaccgtggagtggaaggcacagtctgattctgcccggagtaagacattgacgggagctgngggcttcgtgcttgggctcatcatctgtggagtgggcatcttcatgcacaggaggagcaagaaagttcaacgaggatctgcataaacagggttctgagctcactgaaaagactattgtgccttaggaaaagcatttgctgtgtttgggtagcatctgg

SEQ ID NO: 647393 - DNA, 492 bp, Homo sapiens
  misc_feature (137)..(137): n is a, c, g, or t
  misc_feature (141)..(141): n is a, c, g, or t
  misc_feature (144)..(144): n is a, c, g, or t
ctacgagctcaatacgaatcatgtcatagtgttactgtgttaaattagtatcgcgcaacagatctgggtttaaaggagagctgaattggtttaaataggctcccttggctagatatgtagagactcgctcatcaganccgncanggctcatgaaatgccacgggtcaggaggatcccagcagtggacctttgggaaaaacaatcggctataccaggtgtcggttggacagtgctgagagcagtgatcacctgtgaaaagtagtaccgagctcgttatggcgatctgcgatggctcctcttcacagcagtggcatttggaaggttaaggtggatgctgtggcgggaacgttgcttcatcaggcgttgcctccggtgtggagtttggggctttaggaaagcctgggttgggtggagcagaaccatcttggagaagatgacagttccctgtcctcccggagatgcctgggtgtgttagcagaggtgacacgtgtc

SEQ ID NO: 647394 - DNA, 492 bp, Homo sapiens
  misc_feature (137)..(137): n is a, c, g, or t
  misc_feature (141)..(141): n is a, c, g, or t
  misc_feature (144)..(144): n is a, c, g, or t
gacggtatcgatggatgcataaggactgtgactaccgtgcaccccaacatcagatctggatcatataatgaagagtcatgaattggtataactggtctcctttgtcacagatatgtcagagcactcgctcatcaganccgncanggctcatgaaatgccacgggtcaggaggatcccagcagtggacctttgggaaaaacaatcggctataccaggtgtcggttggacagtgctgagagcagtgatcacctgtgaaaagtagtaccgagctcgttatggcgatctgcgatggctcctcttcacagcagtggcatttggaaggttaaggtggatgctgtggcgggaacgttgcttcatcaggcgttgcctccggtgtggagtttggggctttaggaaagcctgggttgggtggagcagaaccatcttggagaagatgacagttccctgtcctcccggagatgcctgggtgtgttagcagaggtgacacgtgtc

SEQ ID NO: 647395 - DNA, 87 bp, Homo sapiens
tcttcttactacactggaagtctgaactgggtgcctgttaccgtcgagggttactggcagatcaccgtggacagcatcaccatgaac

SEQ ID NO: 647396 - DNA, 305 bp, Homo sapiens
ctttttaccctaagttagagacagagaggggaaagcatgtatttgtaaagaacgaggcagcatttcagaagtgcttaataattggacctgatttcaaatgggtcactctatatggtttatttaaacacagtgatttgtaagtttctgcacgaagtacgtagtctcaggagaatagctgtacctctgatccacacattaggcatgattagaaaacacaagggtaggaaatacagttttattctttcagcatgacagaaatagcacactatgtagatctaatatctgacatatagatacattaatat

SEQ ID NO: 647397 - DNA, 146 bp, Homo sapiens
tgagggagagagagttaaattccaaacactccagacagaggacactacatttttctcgctggtgatattcagaaaaaaaaaattcatttcaaagcctttgctaattcttcatgctgctgatggtagagactaggtataaatggctg

SEQ ID NO: 647398 - DNA, 108 bp, Homo sapiens
tcactctggggaagggatttataaatattagcctttgcatttctcagcctttgcagtcttcccattagctgttctcacgtatgcgtcagcgagcttggggctttgggg

SEQ ID NO: 647399 - DNA, 309 bp, Homo sapiens
cgtcggcgataagcagagataatgctactgctgttccatagggtctgcatttgtagtaggttttatactgacgtatgcacaacccattaactgataacagctttcaattaatagtctacaagactactacaagaattaccaggaaggagagaaccaagatggaacagatggggcagtggaatcacaaactagaacccttggattaaagacatcttctgtggccgggcacagtggctcatgcctgtaatcccaacactttgggaggcgaggcaggatggtctcgatctcctgacctcgtgatccgtcgac

SEQ ID NO: 647400 - DNA, 805 bp, Homo sapiens
  misc_feature (191)..(192): n is a, c, g, or t
  misc_feature (202)..(202): n is a, c, g, or t
  misc_feature (211)..(211): n is a, c, g, or t
  misc_feature (219)..(219): n is a, c, g, or t
  misc_feature (230)..(230): n is a, c, g, or t
  misc_feature (265)..(265): n is a, c, g, or t
  misc_feature (276)..(276): n is a, c, g, or t
  misc_feature (281)..(281): n is a, c, g, or t
  misc_feature (284)..(284): n is a, c, g, or t
  misc_feature (290)..(290): n is a, c, g, or t
  misc_feature (297)..(297): n is a, c, g, or t
  misc_feature (299)..(299): n is a, c, g, or t
  misc_feature (301)..(301): n is a, c, g, or t
  misc_feature (303)..(304): n is a, c, g, or t
  misc_feature (306)..(306): n is a, c, g, or t
  misc_feature (308)..(308): n is a, c, g, or t
  misc_feature (353)..(353): n is a, c, g, or t
  misc_feature (357)..(357): n is a, c, g, or t
  misc_feature (375)..(375): n is a, c, g, or t
  misc_feature (457)..(457): n is a, c, g, or t
  misc_feature (473)..(473): n is a, c, g, or t
  misc_feature (486)..(486): n is a, c, g, or t
  misc_feature (516)..(516): n is a, c, g, or t
  misc_feature (518)..(518): n is a, c, g, or t
  misc_feature (520)..(520): n is a, c, g, or t
  misc_feature (527)..(527): n is a, c, g, or t
  misc_feature (596)..(596): n is a, c, g, or t
  misc_feature (627)..(627): n is a, c, g, or t
  misc_feature (650)..(650): n is a, c, g, or t
  misc_feature (679)..(679): n is a, c, g, or t
  misc_feature (708)..(708): n is a, c, g, or t
  misc_feature (713)..(713): n is a, c, g, or t
  misc_feature (760)..(760): n is a, c, g, or t
ttttaaattcatgcacttttactatgcccattgcacttctcatccatggatttgccttgccttaagaattaaccatggccttgtggctgggtgacccagttgacttttatcttgcacagctaaagagggtctgatgggtggctcaacacccacccactcctataccatgtcatcagtgttcacattttccnnatgagttgangtgccttgntctgtccnctgccaccacnaccagtgctgagttttcccatgtggttttgctttngtggtgttacngcctngcngcagancggggantntntnngnangcctccagcctgggacctcactcagttcccagggtattcaaaganggcngcggctcccattccagtnccgatgcacatggacaccactccgtatgctctcttcccacggcgcttcagctcattgagcagcgtgatgtacctgttgtgcnccagtgcagctcagtnggtgctctatggncactgcaccccccagggggttcaccttctngngngggagtngtagcttctccacacagtaggcagcctggcttgcaaaggcctcattgatctcgaagatgtccacgtcantcactgtcagccctgctttttgcaaagctantggggatggcataggcaggtccnatgcccatgatgtcaggtgggaccccaancactgcataagacctcaggaccccaaggntgggnaggcccaactcttctgccttggacctccgggccaaccaggatggcanctgccccatcactcacctggctagagtttccagctgtggtagaac

SEQ ID NO: 647401 - DNA, 433 bp, Homo sapiens
  misc_feature (8)..(8): n is a, c, g, or t
  misc_feature (28)..(28): n is a, c, g, or t
  misc_feature (48)..(48): n is a, c, g, or t
  misc_feature (115)..(115): n is a, c, g, or t
  misc_feature (171)..(171): n is a, c, g, or t
  misc_feature (176)..(176): n is a, c, g, or t
  misc_feature (192)..(192): n is a, c, g, or t
  misc_feature (368)..(368): n is a, c, g, or t
  misc_feature (398)..(398): n is a, c, g, or t
  misc_feature (409)..(409): n is a, c, g, or t
aatccctncaagaaaacgggaaaaaacncccaaaacacccaaaagggnccctagttcctgtagaagacattaaagcaaaaatgcaagcaagtatagaaaaagcgcattgaacagncccgggcacctacatgtaaattaagcccaaagatggggagaaaggaaaaggagagncaaanatagtccatactgagngtcatcaacaatccagactgaagttttttattttaatctcaatccccttttttgatttgccacccatgccttttcaggctggaaacaattttttggttccctaaagcacttttttttgactgctgtgattcagtgaaccttgccctttgctttttattacttgggcatttgcctcncctgacaatgttttaaatcgcctttgtatntccttagctgntcaataaatatttgaatgcctcca

SEQ ID NO: 647402 - DNA, 864 bp, Homo sapiens
  misc_feature (1)..(1): n is a, c, g, or t
  misc_feature (103)..(103): n is a, c, g, or t
  misc_feature (117)..(117): n is a, c, g, or t
  misc_feature (123)..(123): n is a, c, g, or t
  misc_feature (125)..(125): n is a, c, g, or t
  misc_feature (144)..(144): n is a, c, g, or t
  misc_feature (147)..(150): n is a, c, g, or t
  misc_feature (152)..(154): n is a, c, g, or t
  misc_feature (159)..(159): n is a, c, g, or t
  misc_feature (777)..(777): n is a, c, g, or t
  misc_feature (838)..(839): n is a, c, g, or t
ngcggtgcagaaggcggcgcccggctcccagaggtattcccagacaggcaactatgaactagctgtggccctctcacgctgggtgttcaaggaggagggtgtnctccgtgtggggcntgtgtncnatcatcgggtgggcgaganagnnnnannnaatgnctacactgtaactgacctagtggagtatagcatcgtgatccagcagctctcaaatggcaaatgggtcccctttgatggcgatgcattcagctggagtttgtccgcattgatccttttgtgaggaccttcctgaagaagaaaggtggcaaatacagtgttcagttcaagttgcccgacgtgtatggtgtattccagtttaaagtggattacaaccgggtaggctacacacacctgtactcttccactcaggtatccgtgcggccactccagcacacgcagtatgagcgcttcatcccctcggcctacccctactacgccagcgccttctccatgatgctggggctcttcatcttcagcatcgtcttcttgcacatgaaggagaaggagaagtccgactgaggggctagagccctctccgcacagcgtggagacggggcagggaggggggttattaggattggtggttttgttttgctttgtttaaagccgtgggaaaatggcacaactttacctctgtgggagatgcaacactgagagccaaggggtgggagttgggataatttttatataaaaaaagtttttcccctttgaattgctaaaattgcattttcctatgtncaatcatcctctcatttctaaaataaggacttgccaggcacggtggtcatcctgttatccnncccttttggaagccaagcggcggtc

SEQ ID NO: 647403 - DNA, 1153 bp, Homo sapiens
accacgcgtctgcccacgcgtccggtggagaagggcgaggagctctcctgcgaatgatgctgaaacctgctctcatgtagcctataacgaactgtgtgtgtgtgctgtgccacgagtggctgcctgtgagtgtgttgcttgtccatgtatttgatgcatgaaaatgcaactgatgtgatgggctctggacgtgatgaacatgtgtggccctgaagtgttgctgtagatgttacctgtggatgaatgtgttggacgaccattgatgcgtccatgtggcttgttgttgctgaataacctgatgcattgtgtgccattgcattggaacatgccacgctccatcaacagtgataggacctggagtgaaccgccctgaggatggcgcgtgggctcctatctaccccattgacacgaacttgacatgtgtgttgaccataacataacctgggctaacctttgtgccctggacggtgatagtgaccaacgctgatgttggacctggaaacaaactggaaatggctggcatccacctttggaacctgccatgacaccctgggatacatggctgctacccccaaggtgactgcggcccaattgcgatccaatacaacggcagacagacacacggagaaggaatttgcgcaggccagcaaagcgaccaaaaagccgcgccgcgagatttcgcaggaccctttgggagagaccccatttgaggtcgaccacgttggaacaacgcgtgttgtagtaccctggataacattatgccccaaaccgttagccgggaatggacggtacctggcgcgacaaagagtagaatggcgcaccacacaggaattggtggaaacgtgtgatagcaacagttcccgttcccagtgccgcatggtgaggaacgaccaacagaagggacaagcaaccaaagaccgatgtgaatacatgtcccgggaaacgtcaggcgacagtaggcggccgcccgaaacgataggggagtcgcctgggaaaatatccgattgggcactaatccatgaagacaccgtcccatctcgtaagggccaggacatgggttgaatccagttctcccaggtaaatgctcacaagaatagcgacaacgacgggcagcgagacacagaccgctattcctaggagtctaaattgtggc

SEQ ID NO: 647404 - DNA, 819 bp, Homo sapiens
  misc_feature (732)..(732): n is a, c, g, or t
  misc_feature (793)..(794): n is a, c, g, or t
aaactaggctagtcgaggctgggtgtgaatcggccgaggctccgctgtggacgtcgtgtcgtcctttgtctggtgtccgagatagcccctaaccaattgcctgacgcgtgtcgactgatcgctatgtggagttgtacgctgtacttgtatcctttcttccctctactgtggcaaatgggtcccctttgatggcgatgcattcagctggagtttgtccgcattgatccttttgtgaggaccttcctgaagaagaaaggtggcaaatacagtgttcagttcaagttgcccgacgtgtatggtgtattccagtttaaagtggattacaaccgggtaggctacacacacctgtactcttccactcaggtatccgtgcggccactccagcacacgcagtatgagcgcttcatcccctcggcctacccctactacgccagcgccttctccatgatgctggggctcttcatcttcagcatcgtcttcttgcacatgaaggagaaggagaagtccgactgaggggctagagccctctccgcacagcgtggagacggggcagggaggggggttattaggattggtggttttgttttgctttgtttaaagccgtgggaaaatggcacaactttacctctgtgggagatgcaacactgagagccaaggggtgggagttgggataatttttatataaaaaaagtttttcccctttgaattgctaaaattgcattttcctatgtncaatcatcctctcatttctaaaataaggacttgccaggcacggtggtcatcctgttatccnncccttttggaagccaagcggcggtc

SEQ ID NO: 647405 - DNA, 762 bp, Homo sapiens
  misc_feature (270)..(270): n is a, c, g, or t
  misc_feature (395)..(395): n is a, c, g, or t
  misc_feature (762)..(762): n is a, c, g, or t
ggtgggtgggggacgggccgaggcgatggcggagaagtttgaccacctagaggagcacctggagaagttcgtggataacattcggcagctcggcatcatcgtcagtgacttccagcccagcaggcaggccgggctcaaccaagaagctgaatttgtattgttactggcttacaggatattgacaagtgcatgacaggatgcttcatgatattactgtaccgttacgcaaggtttttcgaatatatacgcatcaacggtcaacatccccanctctacaccaaagagtgcctggcagagggctctagctaaaaatgagcagttataaggcaagatcgacagccataagaaatttagaaagcctgttgattcaagaactttctgaaagatatttccgngaagtacagtgggctaagctatcgagaggcatccggggggcaggatcgacccgccttcttaagccagctcaccctccctgtgtgaagatcccctgggactgcgatgcggcgttgaggctgggactgcgagtgcttgacgccaccttcctgctgaggtgggactgggccctggacacatccctcagcccctctgtcctcattgtttggcctcatgggaccgaggggctggaggagaggcggagctgtgccccagctgttccagcagcttgtctggcgtcaactggctttcagagtgctgacccctcatcactgtggggatcattctctctgagggcagatgacggcgcaggaaaatagtcttggaaan

SEQ ID NO: 647406 - DNA, 225 bp, Homo sapiens
gaatgtagtgttctattgaaggtatacgttcccttatttatctatattgcttgtcatcctatgctagtaaatacgcaagcgtctagtgacacattgcctcttctgatatcataggagtagctttcatagtgaaaaatgtagaactgtatatgtgtacgtgtcagaaatattctagtagggtcaggtgctttggcttagttacagtatgggggcagagatagtagt

SEQ ID NO: 647407 - DNA, 145 bp, Homo sapiens
gaaaaaaagatttttacaaagtaataaaatttaaactgagctgtttaatgtagctgttttgacctgtctgttcttgtccaaagtggaacattcccaggagaagaggaaggttccactcggttctttaagtcgccaaaagaccaag

SEQ ID NO: 647408 - DNA, 700 bp, Homo sapiens
  misc_feature (24)..(24): n is a, c, g, or t
  misc_feature (62)..(62): n is a, c, g, or t
  misc_feature (64)..(64): n is a, c, g, or t
  misc_feature (124)..(124): n is a, c, g, or t
  misc_feature (139)..(139): n is a, c, g, or t
  misc_feature (150)..(150): n is a, c, g, or t
  misc_feature (175)..(175): n is a, c, g, or t
  misc_feature (199)..(199): n is a, c, g, or t
  misc_feature (238)..(238): n is a, c, g, or t
  misc_feature (270)..(270): n is a, c, g, or t
  misc_feature (274)..(274): n is a, c, g, or t
  misc_feature (292)..(292): n is a, c, g, or t
  misc_feature (299)..(299): n is a, c, g, or t
  misc_feature (321)..(322): n is a, c, g, or t
  misc_feature (327)..(327): n is a, c, g, or t
  misc_feature (331)..(331): n is a, c, g, or t
  misc_feature (333)..(333): n is a, c, g, or t
  misc_feature (478)..(478): n is a, c, g, or t
  misc_feature (568)..(568): n is a, c, g, or t
  misc_feature (571)..(571): n is a, c, g, or t
  misc_feature (606)..(606): n is a, c, g, or t
  misc_feature (663)..(663): n is a, c, g, or t
tctttcacaaatggttcccctttnggcttaatgacccatatacttcatttctgggtgaattngnggaaatattacagaacacgctttgtacaatacagccccactactgggaagggctcggggntttgtgatccagggntctggcttaangcaaaaatacacggcatagattgcnacagccaagaagtgtccaattaanactggggggttggggggcaatacgggaggcggcccaacngggcccgcaacacattcgccacccggtttggnatanagaaaacaggcttttctnagttgangcgggggatcatctgtggcggnnaattnttcntnaggggcctgggccggggtattcacgacaaaggaatgagatgtttttcttgcccagtaaaatgattttttggcctcgaaaatagctgcatcatcataaaggtcagggataccctttagcagttttctccatagttttatatctttnaaagcaacagtcattcctccaccagtaagtggatgcctcatattatatgcgtctcccaaaagaagaacacctcgtttcttcactgatganggnggaaggaagcttgctggcatggacctcagatgagnattgtcagtggcttctaagaatggttctttcaggtgatcaggtatttgtggggtaantttttcaaccatgtattctcttaaattccttggcatt

SEQ ID NO: 647409 - DNA, 601 bp, Homo sapiens
aaaaaaaattaaaaaaaaaaaaaaaaaaaaaaaaaaaaaaaaaaaaaaaaaaaaaaaaaaaaaaaaaaaaaaaaaaaaaaaaaaaaaaaaaaaaaaaaaaaaaaaaaaaaaaaaaaaacccgggggggggcccgggacccaaattgcccaaaaggggggccgaataaaaatcaaggggcgggggttaaaaaaggtggaaacgggaaaaaccggggggaacccaaataaaaggccttggaaaaaaacccccttttggcaagggggggaaaaaggaaaaaggcccaaacgaagggcctttcaaaaaaggggccaacccgaaagggaaaagggaaaatggaaagcgtaaaaattgggaaaaaatcggggtaaaattttggaaaaaaaagctaattttaaaccaaaagggccaaaaggggaaaaaccctttaaaaataaaaaaaataccccgaaaaggggtgaagggtggcccaagttggtataggggaaagggcccaaaagggaaacaataacccaaaaaaggtttttgggggaaaagggcccgaaaagcataaaagggaaacccaaaggggaacccccaattaactttgcggggcccggcagt

SEQ ID NO: 647410 - DNA, 419 bp, Homo sapiens
ccctgtcgcagacaacagcagtttcttggagaaacactaagcagcagttccagcatgcagcaactgctgtatatactcaggtggttttgccggctcagcgctccctaggccctgggcggctgtgtgctgtgcgcttcagcctcaggcttcaactctggcccctttctgaccttaagggaggcctaggagtgctgaaagatggaaccgaggaggctcatgctctgtcccacagcacagagctgggctggggcaggggcagaagggattctgctgggagcttgggctcaggaacagttcacctgcagggagtgggacgcgcatggcccagtgccctctcccatcagcccgtgtgatttccgttggaccagtgtcctctcccatcagcccatgttagttccactggaccacgtcctggctgt

SEQ ID NO: 647411 - DNA, 172 bp, Homo sapiens
ttgtggctaccctgccaagcgcaagagaaagtctaactggtacgtgccaaggcttagagcatgaaataccaccggaactgttcgaatgaggcacctaacatttgtataccgcagattcaggcattgattccgtgaaggaactacacctatacccgagagggccgctgttgca

SEQ ID NO: 647412 - DNA, 175 bp, Homo sapiens
  misc_feature (4)..(4): n is a, c, g, or t
  misc_feature (6)..(6): n is a, c, g, or t
atgngnagtgccgcctgctcacacacgtgcccatgtggagtgcccgcctgctcacgtgcccatgtggagtgcccgcctgctcacacgtgccgatgcggggtgcccgcctgctcacacgtgcccatgcggagggcccgcctgatcacacgtgcccatgcggagtgccctcctgctc

SEQ ID NO: 647413 - DNA, 1609 bp, Homo sapiens
ccttggctgagtgtgcccgggcatgacctgcatcgtctcgtcctggtagctcctagcgattagtcctgtgcctgcgttgcttcgtgcgactttgtggacagcctgccgtgtccttgcctgtgtgcgcacctgtctcggtccctgcgctcgcttgtctcgttgcttgcgtcctgggtcctccgtcctctgtggtctatctactctagtcgctccgtggtgcctgcgtgcctgttgtccgtgtggtcctgcgtccgtgctggcgttcgttccgctattcctttgtcgtccgtgtgtgtgcttgcgtttccctgattttgttgtgcttctccgttcggctgtcgtcttgtgttccctgtcttttctctctgcttttgtgtctcctgtccatcttgcgctctctctcgctgattgttgtctccttatcttgtttttgtttcgtcgtttggtctgttgcttcggcgcctgttcgctgggttgcggtgggtcccttcctcttgccctggtgtttttccgtcgcggtctcgcgtgggactgtggtgactttggattctgtgtgtgtgtgtggtgtcggtgcccgattgtggtgtgcccgtcttgccgtttgactgggtctgtctctgctgtgttgtgtttctttccggctcgttctctcctcccgtttccctttcctggtgctttccatctgcgcttggcctgtgtcgtgcgtgctctttgggtcgtgcgtgtggtggggtgttgccgcttgtcgctttccctcttcggttctttgcttcggttgggccttgtccatttctgttctatggtccttgctacgatgcgctcttgttgtcgctcgcttcccttcttggttctattgctattcctggtttgtgttttcctatgggtagcgtttcgttctgttgtatatgtcgcatgtcgttgtgcttatgtggtgtctcgcctctcttgtgaggtgtcgccctccttggtgttggtctttgggtcttattctcgctggctccccctctggctgtgcctcttccccgttggtgccatctggtgttgtcccctgtgtgtatcgttttcgatctgtcgctgtgtcgtggtccattctgtcgcatcggggctgtgtgtggtgtgccgtcctagtacctcccttcgcggtcgttctgcccctatgatcgtcttgtgccagcgcgtaggcgcgtctctctggtatctgtagatcccttgaccactcccaccgggtgatcctctgtgtggtctgccagggcgcgttggttctgtggtcctcatgtcgtctgtctggtctcatggtgggtcctgtctaggtaggtgtaggagcctcctgcaagcctgcattgtaggatgtcagctgtgctactagctgtccgtctgtgaactatgaaggtacttgccctcagctggaccccctgcctgctcgtacatcctggctgaggcccagtctccgcacacatgagggcctggggcttgcatggagatccgggactgtctgattgaggacagtgacgacgaggcgggcctagagctgagcgtgatgatcgtgcttgccgggacatgcatggcagtggccacctgtacaccacataacgatgccggaatggcaagg

SEQ ID NO: 647414 - DNA, 90 bp, Homo sapiens
ctagaagattcagcaaagtacttttgtgctcttggggaattatacaagacttactgggggatacggaccttgtacaccgataaactcact

SEQ ID NO: 647415 - DNA, 392 bp, Homo sapiens
agcggggaatcacttgaggtcagggtctctctctgttgcccaggctggagtgcagtgacaccatcttatctcactgaaacctctacctcctgggttttagtgattcttctgcttcacctcgcaagtagctgggattacaggcacacctgtaaattatgccaacatgcctggctaatttctgtaattttagtagagatggggtttggccatgttggccaggctggtctcgagctcctgacctcaagtgatccacccaccttggcctcccaaagtgctgggattacaggcgtgagccactgcgcccggcctgcacatatatttctaattctattgggtatatacctgagagtagaattgctgagtcatatggtcacttaatgtttaatcttttg

SEQ ID NO: 647416 - DNA, 549 bp, Homo sapiens
  misc_feature (506)..(506): n is a, c, g, or t
  misc_feature (548)..(548): n is a, c, g, or t
tcagagtctggcccaaagaggcagtctggccacagtctgccacagttgctatgctgctgttgggaattcctcctaggtcctaactatccagtctccccagcactggcaggggtcaaacagcagactggagcctcagtgatggtggctgcccctccctcaggaagctcagttgtcttaggcagcagacagccacagtgattatggccacccctgcccctggaaacttggtagtcttaggcagtctccagccaagtggctgcttgggaagtctgcacagctccctgcttggtacccaaggccctggtggcattgggctcacaagggataaagggccaagatggcttgacttagaaacagcttgcaagtttggaaggcttcccaccttgaaaggaaaattggtaagtgaatccttgcaccagcaacttgaaagcatccaggttctcttcacttgggacttgactaaggtggtccccacaacccatggagaacaaaggaaaagcacagtngtgtgaccgcctaccttgggagccacattgggggaaagaggng

SEQ ID NO: 647417 - DNA, 798 bp, Homo sapiens
  misc_feature (12)..(12): n is a, c, g, or t
  misc_feature (46)..(46): n is a, c, g, or t
  misc_feature (84)..(84): n is a, c, g, or t
  misc_feature (105)..(105): n is a, c, g, or t
  misc_feature (110)..(110): n is a, c, g, or t
  misc_feature (122)..(122): n is a, c, g, or t
  misc_feature (137)..(137): n is a, c, g, or t
  misc_feature (149)..(149): n is a, c, g, or t
  misc_feature (153)..(153): n is a, c, g, or t
  misc_feature (162)..(163): n is a, c, g, or t
  misc_feature (174)..(174): n is a, c, g, or t
  misc_feature (182)..(182): n is a, c, g, or t
  misc_feature (186)..(186): n is a, c, g, or t
  misc_feature (191)..(191): n is a, c, g, or t
  misc_feature (234)..(234): n is a, c, g, or t
  misc_feature (242)..(242): n is a, c, g, or t
  misc_feature (254)..(254): n is a, c, g, or t
  misc_feature (263)..(263): n is a, c, g, or t
  misc_feature (290)..(290): n is a, c, g, or t
  misc_feature (305)..(305): n is a, c, g, or t
  misc_feature (364)..(364): n is a, c, g, or t
  misc_feature (366)..(366): n is a, c, g, or t
  misc_feature (368)..(368): n is a, c, g, or t
  misc_feature (382)..(382): n is a, c, g, or t
  misc_feature (392)..(392): n is a, c, g, or t
  misc_feature (396)..(397): n is a, c, g, or t
  misc_feature (427)..(427): n is a, c, g, or t
  misc_feature (480)..(480): n is a, c, g, or t
  misc_feature (613)..(613): n is a, c, g, or t
  misc_feature (662)..(662): n is a, c, g, or t
  misc_feature (684)..(684): n is a, c, g, or t
  misc_feature (772)..(772): n is a, c, g, or t
aacgggcgagtncccaggctcctccagctccttccgtcctcttccncctcctcctccacctccggcttttgggggatcactgtnctctctcggcagcagaatganccggnaggtggtccgcnccagcaagtcccgcnacgtgtctgganagcnggccaaggnngaccgagtgcnatgaagangtgngcgtntcgacagatccacctggagacgagtggcttctgtgcggtcaancctaagtntgtggccctganctgtgaggncagcgggggaggggcctgcctggtgcngcccctgggcaagantggagcgtgtggacaagaatgcgcccacggtctgtggccacacagcccccgtgcaaganancncctggggcccgcanaatgacaaantcanngccagtggctccgaggactgcacagtcatngagtgggagaacccagacagggggactgaagctgcccctgacgggagcacgtngtcaccctggagggccacaccaagcgtgtgggacattgtggcctggcacaccacagcccagaacgtgctgctcagtgcaggttgtgacaacgtgatcatggtgtgggacgtgggcactggggcggccatgctnacactgggcccagaggtgcacccagacacgatctacagtgtggactggngccgagagggaggcctcaattntacctcctgccgttacaagcgcgtgcgcctcatcgagccccgcaaaggcactgtcgtagctgagaaggaccgtccccacgaggggacncggcccgtgcgtacagtgttcgtgtc

SEQ ID NO: 647418 - DNA, 214 bp, Homo sapiens
catgcgccacctctgttgccccagttctctcctgattgaccctctgcgactgtgcctgtcttaggttgttccttccctgaggaatcttacccgtctctggctatacagcatccaccgggtgcaaacagggtgacgtgcagtgtgtgagtgagggagaggaagcgcccccgagggggtcaggatactctgtctccttggtaagacttattaccac

SEQ ID NO: 647419 - DNA, 758 bp, Homo sapiens
ctccagtcgaggacctctcctagtaccactgacgagcggtggacaccatgcctgctgtatctcccccaaaccgagtccttgccctgctgcctcctcatacccacacggctggcagagaccttcaccatagcgtatctgctcaactccagaaccttcctgacctccgctagttcctgcgggccttatgccctgcttcccaggtgcaccctctcccgtggatggacagcctcagacccccgacagcactgcggcagtgctcggtgcctgctggggtgctgttccatgaatcacaccgatacaaacattctagaccacatataccaacacacatcaaatacacagtaccaagttactccggaggagtatgaagggattagcatattacatgcaacaagtacatgtacacggattacagcagctcacaccgtcatgatcaaagaccatcaattatggagaatcgtcgaacaccaagacacaaaaacaagcaggcaggcagacacaagcaagtcgagcgatattgcaagatcgaagacaccacgcgatagcagcttgctgcgaagcagcgtggaatatgtacattccaaattgactaaatctttgatttataacacgagcatataatgcgtcgagatatggaggaagatcccgaccagaagacgaccatggggcccaatgtagaagagcaagaacaaagagagtgatagacacattacgaggaatagagagtacaacgagcgacgtgaagaaaggcaagtcag

SEQ ID NO: 647420 - DNA, 215 bp, Homo sapiens
  misc_feature (1)..(1): n is a, c, g, or t
natctagaggatcccagtgctactccacaacaggcagcgtaactacacaacaccaagcattatttgaggtgcatgagaataggtgaacacagcctaacaccatttaggtttttgggtttttttcagggttgcctctaatttaattttattagatgagagagtctcttagacttcttctttgtaaggaaaggttattgggaagtgtgaaaaaagat

SEQ ID NO: 647421 - DNA, 1101 bp, Homo sapiens
  misc_feature (363)..(363): n is a, c, g, or t
  misc_feature (572)..(573): n is a, c, g, or t
  misc_feature (586)..(586): n is a, c, g, or t
  misc_feature (671)..(671): n is a, c, g, or t
  misc_feature (742)..(742): n is a, c, g, or t
  misc_feature (773)..(773): n is a, c, g, or t
  misc_feature (874)..(874): n is a, c, g, or t
  misc_feature (878)..(878): n is a, c, g, or t
  misc_feature (930)..(930): n is a, c, g, or t
  misc_feature (973)..(973): n is a, c, g, or t
  misc_feature (1010)..(1010): n is a, c, g, or t
ggaggagaatcccggaggcatttcgggtctttgccaaggatgcaatggttatatcagggcggcggaattacgtcacgtcatggcaactttaggagaaaaactaccggatggggaattagatgaaatgatcagagaagcagatatggatggagacggacaagtcaactatgaagaattcgtacagatgatgactgcaaaatgaagacctactttcaattcgtttttcccccctctagaagaacccccccccccctttttttttttttttttattaaaaagaaaaaagaaaaaagttcatttattcattctgtttgtggatggggaaaaaaaaaaacaaaagtaccttctgtccacacacacaanatctgcatgtattggttggtggtcctgtcccctaaagatcaagctacacatcagttttacaatataaatacttgtactaccttaatgataaggactccttaaagttccatttgctaatgattaatacactgtttgggctggccagtttttcatgcatgcagcttgacgattgagcacagtcaggcctttgtattaaaaatgaaaaatgnnaaaacaaattcanaacctattcaaatgggttctagttcaatgttgtctagtataaattgtctatagctggtttactgaaaacaaacacatttaaaatnggtttatccttcacccatttttctgcacgtcatcctgaggtaaaccaattttaaatgtgtttgttttcagnatgacgtgcagaaaaatgggtgaaggataanccgttgagacgtggccccactggtaggatggtcctcttgtacttcgtgtgctccgacccatggtgacgatgacacaccctggtggcatgcccgtgtatgtnggtntagcgttgtctgcattgttctagagtgaaacaggtgtcaggctgtcactgtncacacaaatttttaataagaaacatttaccaagggagcatctntggactctctgttttaaaaccttctgaaccatgactnggagccggcagagtaggctgtggctgtggacttcagcacaaaccatcaacattgctgtcaaagaaattacagttacgtccattccagttgt

SEQ ID NO: 647422 - DNA, 1038 bp, Homo sapiens
  misc_feature (363)..(363): n is a, c, g, or t
  misc_feature (572)..(573): n is a, c, g, or t
  misc_feature (586)..(586): n is a, c, g, or t
  misc_feature (671)..(671): n is a, c, g, or t
  misc_feature (679)..(679): n is a, c, g, or t
  misc_feature (710)..(710): n is a, c, g, or t
  misc_feature (811)..(811): n is a, c, g, or t
  misc_feature (815)..(815): n is a, c, g, or t
  misc_feature (867)..(867): n is a, c, g, or t
  misc_feature (910)..(910): n is a, c, g, or t
  misc_feature (947)..(947): n is a, c, g, or t
ggaggagaatcccggaggcatttcgggtctttgccaaggatgcaatggttatatcagggcggcggaattacgtcacgtcatggcaactttaggagaaaaactaccggatggggaattagatgaaatgatcagagaagcagatatggatggagacggacaagtcaactatgaagaattcgtacagatgatgactgcaaaatgaagacctactttcaattcgtttttcccccctctagaagaacccccccccccctttttttttttttttttattaaaaagaaaaaagaaaaaagttcatttattcattctgtttgtggatggggaaaaaaaaaaacaaaagtaccttctgtccacacacacaanatctgcatgtattggttggtggtcctgtcccctaaagatcaagctacacatcagttttacaatataaatacttgtactaccttaatgataaggactccttaaagttccatttgctaatgattaatacactgtttgggctggccagtttttcatgcatgcagcttgacgattgagcacagtcaggcctttgtattaaaaatgaaaaatgnnaaaacaaattcanaacctattcaaatgggttctagttcaatgttgtctagtataaattgtctatagctggtttactgaaaacaaacacatttaaaatnggttcagnatgacgtgcagaaaaatgggtgaaggataanccgttgagacgtggccccactggtaggatggtcctcttgtacttcgtgtgctccgacccatggtgacgatgacacaccctggtggcatgcccgtgtatgtnggtntagcgttgtctgcattgttctagagtgaaacaggtgtcaggctgtcactgtncacacaaatttttaataagaaacatttaccaagggagcatctntggactctctgttttaaaaccttctgaaccatgactnggagccggcagagtaggctgtggctgtggacttcagcacaaaccatcaacattgctgtcaaagaaattacagttacgtccattccagttgt

SEQ ID NO: 647423 - DNA, 268 bp, Homo sapiens
cgcaagattaaccccctaataaaattaattaaccactcattcatcgatcctccccgccccatgccaacatctccgcatgatgaaactacggctcgctccttgagcgcctgcctgaatcctccaaatcaccacaggactatctcctagccatgcagtactgcaccagactgcctcaaccgctcttttcatctaatctgctccacactcacgtctgtaggactgtaataagttatggctgaatcaatccgctaccgttcagcgccgaatt

SEQ ID NO: 647424 - DNA, 330 bp, Homo sapiens
gtgtgtgttgtacctgtgtgtgttggatgtgatttctgtttagtaggagattgagatgactgtaaatagtttatgctgattccttcggtctgcaaacatacatttgtgttggtgctgatggttctcgactaatccggttccaattacaaataggttatgtttttcaaataaaacttctggcacttatattcaggtctcataagtcacatgcatctcacacatacacacacacacacacacacacaccagaacacacacattaaagcctatccctactacactatttaatactccatactgagatgtcacactttctagacacattctctc

SEQ ID NO: 647425 - DNA, 613 bp, Homo sapiens
  misc_feature (22)..(22): n is a, c, g, or t
  misc_feature (133)..(133): n is a, c, g, or t
  misc_feature (162)..(162): n is a, c, g, or t
  misc_feature (240)..(240): n is a, c, g, or t
  misc_feature (301)..(301): n is a, c, g, or t
  misc_feature (372)..(372): n is a, c, g, or t
  misc_feature (378)..(378): n is a, c, g, or t
  misc_feature (385)..(385): n is a, c, g, or t
  misc_feature (390)..(390): n is a, c, g, or t
  misc_feature (434)..(434): n is a, c, g, or t
  misc_feature (496)..(496): n is a, c, g, or t
  misc_feature (498)..(498): n is a, c, g, or t
  misc_feature (503)..(503): n is a, c, g, or t
  misc_feature (507)..(507): n is a, c, g, or t
  misc_feature (512)..(512): n is a, c, g, or t
  misc_feature (515)..(515): n is a, c, g, or t
  misc_feature (540)..(540): n is a, c, g, or t
  misc_feature (548)..(548): n is a, c, g, or t
  misc_feature (589)..(589): n is a, c, g, or t
caggagacacgtgaggcatgantcggcgggggtcattaattatcccggcgaccaccagcctctgtccgggtgggcccgaggggtggggcagcgggcttccctgaccaccagcgtcaggggtgacccagccgcngcagagccagggaagggggcggtgccgancctccttgaggacctccactttgagggccctgtcagggacaggcctcaagtgaaaccgcatccaaagaaggccaagcnagaaggagccccggggttctcctggcggaggtcccggtataaagaactccgctctgctggnagagggtgggtgaggccgagagttgccctgacttggtctccaaagtcggggaggacacaccgaggggtganaaaatngggagtngaganggatggggactaccaggcgggtggccaggatgggaggggctgtnaggtcctggaggggcagggacgtctcttggggcaggctcggagcctccagaagccggcagcnanaaganaatngtctncanggcggggccgggcttccggtgaaangaggacanaaccccggagaagggcccggggccggactccgccggctgcnaaacttaaagtagtgcggccgcgc

SEQ ID NO: 647426 - DNA, 1283 bp, Homo sapiens
  misc_feature (447)..(447): n is a, c, g, or t
  misc_feature (565)..(565): n is a, c, g, or t
  misc_feature (625)..(625): n is a, c, g, or t
  misc_feature (866)..(866): n is a, c, g, or t
ggagacatgagttggtggtaatatgtgccacgttcttctaagaagggggagtcctgaatcttgtcatgatagcccttgatccgtagatgccttgaactacgtttctataatagtctgatgaaggtcgagtggatccttattcgctgtcgttttagtagcgtgacttcatttcctgtgcttcctagcaatcatgagtgcttttgcttgatgtgatacgccggatctctcgtatctctcgtttctgttcaactttacttctgcagtttgggcgctttgtgaatacgcgctgtaaaccgagtaaaggttgtagataattcgatacgtttccatctcaagggagatgacccaagtattcaatactagcacaaatgcagactagatgaagcctagagagagcagctggcactttatgtaattgtttagagtcgctatcataattgaaaacgngccttactctctaaagataaagcgggacaggtctactccgtttactttttacaatcatactctaacgttccatcgatatagcgaattataacaaaatggggtccaacgtcgcccattntttagggcttttgaaccccctggggcgtcgaattcacctaggagaggtggcgtccttccnaaaagtgctttcgtgggaccccctagggagcttttgtagaaacgagacattgcttgctgagtagagaacgcagtaatagatgaaacaggctcaactcagtttccctgctcttgtcatcttggagacttacgtgtgcaaacacacgtacacggccagaaagagttaagatagttactctccctagtaagaagctgacgacttgtaatactttttatatctaatttgacttcatctcgtgtgnaggagtatcgagactatgcgtaacccaaagaaatccccattggatatttcattccccaagcgaaaaatggggaagtcgtttcaccattgaatgtacttgaggatatacatcgtccttaaaaggactgcaagtggtgtacaaagacactaagttgctaaccacgcgacagggaagatattgggacaaaatatctagttgcgtttgcccgtgttggctgatacatgcacaaggttcagttcaggtgtaatgtcctttggagaatggggagcgggatagattctcttctgacattaacaggaaagacttgaattgacgcaaagaatgaggttctatgatcttgcccagagaaggaaatttttatcattatttagaaccacagaatggaagtatattaaggaggatagtcatgtgtaaacc

SEQ ID NO: 647427 - DNA, 557 bp, Homo sapiens
  misc_feature (39)..(39): n is a, c, g, or t
  misc_feature (52)..(52): n is a, c, g, or t
  misc_feature (91)..(91): n is a, c, g, or t
  misc_feature (168)..(168): n is a, c, g, or t
  misc_feature (172)..(172): n is a, c, g, or t
  misc_feature (220)..(220): n is a, c, g, or t
  misc_feature (224)..(224): n is a, c, g, or t
cgttgccacaggcaactcagggagagtccttctgactcncacatgtgtgttnccctggcttcacagactccacttctccactagaaagaanctggtgtcaatatggaagctatggagcagagagagaacaagatattccaaactctaagtgattcttctttgacatcnatanaatatttgagtctggcttgggagaagaatgagaggcttacaactgatnacgngaagcatgtgatgtgagagagcaatcaaggagtgtggctacagtaaggctagatgtaagagggaaagtcggactgtagtctctcagtgtgtttgaagagaggggttggctggcttcttctcctggagaagcagaaatctggtccttgtttactgaacttctgtggatcagctactaccttcagctcagtgacagggcctgaggctaagatctaggtcactggctgggatccagaaggctagaacctaagggggaaatacgaattgcctaatacacaaataaagatggccacaggaacctcagacagacacagttgcttcttgtccaaggtgac

SEQ ID NO: 647428 - DNA, 1047 bp, Homo sapiens
ggcgtactaacggcttccgtaaggggactacgtcggtcgagtgggaactgataattccggtcggtgcaccatggcggataccactggtggaccctcggcacttcgatagtaatatgggcgcctatgcctcatcattcctagggatctggaccgccaagtcccgacttatgggatcttgaggccctcaagtctcatatagtggtcagtgaaggttgtatcaatatacatattgaggaatgatctagctatgagaccagaattgtggcttgataaggatgatggttgggagtaagggactggtgagactggggaactgatgatctggatgtgtagggaacctgtatcattgatggttggatgtgctgttcggactaattgagattgggcaaggtggatgtatgtgtgtgtgaaagtcatataggagattgaaattgcagatgggatgtgggacgatgattgtgcaaggtcttgcgcgacctggtggacgaaaacagcgtgacctagtgtgcttgtcaggtcggaagcatatacagccaatctacgaatatagccgagtgcgcggatagagcaaggcggctctgcgttttgcggcttgtgacatcgaccttggacagagatcagcggattagccgtgccgttgttttgcatactcaagggcaccaccgcaacccgcttgagttatagaacctgtttcaaaaacagtgctggggcatgccaaacagggggtacacaacacgtttgtgcatccggagcacgcatcgaggtgacaagtggtgtggagatggccgggctctgagtagcagatctggaggccggagagaccgttgcactttgacgcttatcgaacgtgtcaaggccatgttgggcggcatgttgggtggcagaactctggattggaggcttcatgtggggccaatggtttccgtcgccgacacggtgcgagcaaatggggagagcgcgactggtggccatgccagggaacccgaaacaaacaagaagtggcaaccttggagacgacctaccttggcaggatggaggaacgacaag

SEQ ID NO: 647429 - DNA, 434 bp, Homo sapiens
tttaaaacgcgccgtggttttcgctcatgaatgacgcagttcctgttctcttgttaactaagagaggcataatatgcagcatgagtagtagacttctgtagaataattagagaccttgagggctttagtgcttactccaagaagcggagcatgtattcaaccatggctattccttcagaagacttcagcttttttgaatcatcttattaaaggggtggataaagtttgcttgtcctagatctattgagcatgggacttggacgcggggatcttcagccagtcctagttactgtgttttgcaaagcactttaactatgtaaaaggaatcttgctttatgtaatcaaccttaggaagaaccacacctttctgcactcaagcacagcgagaagtacgtaatgcgtgaaaacaaaacaactttgcattaaaatccatc

SEQ ID NO: 647430 - DNA, 340 bp, Homo sapiens
cgagcggggaaccggctgattgtgtgcaggtgcagtggaacaaaccactccatggcatgttgataaacagccacatggtgaaggaatagggggccttctccagcatgttcttctataggttaccccacagaaattcacaccataggctgggcgccatggcgcatgcctgtaatcccagcactttgggaggctacagctggaaagattgtttgagcccaggagttgaagaccagcctaagcaacgtggtgagagaccccctctctacaaacattttttttttttaattagccggccatggtggcacttgcctgtagtcctagctacgggggaggctaaggc

SEQ ID NO: 647431 - DNA, 463 bp, Homo sapiens
  misc_feature (413)..(413): n is a, c, g, or t
  misc_feature (426)..(426): n is a, c, g, or t
  misc_feature (429)..(429): n is a, c, g, or t
  misc_feature (431)..(433): n is a, c, g, or t
  misc_feature (437)..(437): n is a, c, g, or t
  misc_feature (440)..(441): n is a, c, g, or t
  misc_feature (445)..(445): n is a, c, g, or t
tatgttggccaggctggtttcaaactcctcacctcaagtgatctgcctgccttggcttcccaaagtgctgggattacaggtgtgagccactgcacccagccaatatggcagttcttatgttttagtttatgaattagatttagaaaatctcaacattttagtgatttccttgaccaagaactgtcttgctcaaaaagacatctctgaactgacttgtatccaagttgctattaccggaagcttaacatgcctagcccctgagctttccttttaaaggtggttcatcctcttctaatgtttcctgcttcagtgaattgtcagcattcccctttcagttatacaagttagaaatacagaagtcttccttgacatttttccttttcctcctccataactacctgttcccagttggnttttttccctccngancnnnctgntannctgnttttcactgctgccaccc

SEQ ID NO: 647432 - DNA, 439 bp, Homo sapiens
  misc_feature (389)..(389): n is a, c, g, or t
  misc_feature (402)..(402): n is a, c, g, or t
  misc_feature (405)..(405): n is a, c, g, or t
  misc_feature (407)..(409): n is a, c, g, or t
  misc_feature (413)..(413): n is a, c, g, or t
  misc_feature (416)..(417): n is a, c, g, or t
  misc_feature (421)..(421): n is a, c, g, or t
atgggttgcttggtttggtgtggcagcagtgaaaagcagaatagcagacagatcaggagggaaaaaaacccaactgggaacaggcagttcttatgttttagtttatgaattagatttagaaaatctcaacattttagtgatttccttgaccaagaactgtcttgctcaaaaagacatctctgaactgacttgtatccaagttgctattaccggaagcttaacatgcctagcccctgagctttccttttaaaggtggttcatcctcttctaatgtttcctgcttcagtgaattgtcagcattcccctttcagttatacaagttagaaatacagaagtcttccttgacatttttccttttcctcctccataactacctgttcccagttggnttttttccctccngancnnnctgntannctgnttttcactgctgccaccc

SEQ ID NO: 647433 - DNA, 750 bp, Homo sapiens
tatgtcgacccacggccgtcgccagatgcacccagtcgtggctgcatctgggccctccctggaagttgcccattctctgtcctcgtgtgtctccgccctcagcaaacaccacaggactctcccagacagcaacccacgtgcagcagccatgaccggcacttcccagcactgccgggccactgcctggagtacacacctggccccaaggggctgttccgtggcaaggagcacgccctgggaggcgccagccgttgggaaatcagacagagtctgctccacctgggaaagccacacggagctcagctggactcaggctctgggggaggaagctcaggcgcctgatcgctggggcaaagcagctggagtgccggagagaagggcaggccctgacagcaggcaagggttggcctgcacccaccaggctggtctcctcaccggactgagggcctctcttccccaggcacccaccatgctggtctcacaggactgaggccctctcttccccaggcacccaccaggctggtctcaccagactgagtgccctctcttccccaggtccctggccggcctccatgtcctggtcccgggccggcctccatgttctccacactcagcctcagtggatcactggacagactgcagggagtctttgccagccttggggtttttcctccccaggttccagttctcccacaaatgccctctgtcacctctgagaagtacaggaagagccgtgctcagaggtccaat

SEQ ID NO: 647434 - DNA, 348 bp, Homo sapiens
atgggaatttcgatcaagttttcaaccccccccaaattaggggcctggatgccagcagctgaatcaactgggttttcatccctaatgattaagagaatatgagtgacatagaacttcattttcttaccatatatggtggcttgtgaggttatttttccccctaatattctagaagaatagaagaatattctagaaaaagagttaagcattctaaaattacaaatctctttttttaatgattttgaaaagctgatgaaatcatatatattattgcctctgtttcatattaaatgaatatttttattttaaaggcataaataaaaaaatgattgtgtactaaaaacaaaa

SEQ ID NO: 647435 - DNA, 523 bp, Homo sapiens
  misc_feature (31)..(31): n is a, c, g, or t
  misc_feature (34)..(34): n is a, c, g, or t
  misc_feature (60)..(60): n is a, c, g, or t
  misc_feature (76)..(76): n is a, c, g, or t
  misc_feature (110)..(110): n is a, c, g, or t
  misc_feature (117)..(117): n is a, c, g, or t
  misc_feature (221)..(221): n is a, c, g, or t
  misc_feature (223)..(223): n is a, c, g, or t
  misc_feature (497)..(497): n is a, c, g, or t
taacagatttgggtggcaattcttcaaccanttnttttggctgtagattccctgtcaccnattttttcttcaaagntcagcttagatgtgttagaatgaatgaaataggntgggcgntatggctcacgcctgtaatcccagcactttgggaggccgaggcaggtggatcacctgaggtcgggagttccagaccagcctgaccaacatggagaaatcccgtntntactaaaaatgcaaaattaggctgggcgcggtggctcacgcctgtaatcccagcactttgggaggccgaggtgggcggaacacgatgtcaggagatcgagaccatcctggctaacacggtgtaaccccgtttttactaaaaatacaaaaaattagtcaggcgtggtggcgggcacctatagttccagctactcgggaggctgaggcaggagaatggcatgaacccgggaggcggagcttgcagtgagccgagattgcgccactgcactccagcntgggtgacagagcaagactctgtctc

SEQ ID NO: 647436 - DNA, 955 bp, Homo sapiens
gaagacggtcggctgggcaacctggctgaagatgccgggaaaatcgtagtgagctggtttggaatcagacacgaatgaaaaaggggagaactggaaagcaaacgaggagaaagagaaacaaagagaagccaaaatctgatacgactgaagagatagcagaagaggcagacactgttttccccaaagctaaacaagttacaaagaaagcagagccttctgaagttgacatgacttctcctaaatccaaaaaggcaaacacgaacgaggagccatctcacaatgacatttctcctaaaaccaaacgtttgagacagaacaaggagcccattgacaccgccagtggttcttctaaaaccaaaaaagtgacaaaacaatgaggagccttctgaggaagacatagatgctcctaagcccaagaagatgaagaaccgacacaggacactgactggagacacctagagacgaaacagccccaaactgagaatggatttctcctctgaacggactgtaaccccagtgaagctgcccctgaagaacgtaaccagtgagatagagcaggaacatacctgtggaacaccgagaagggctttctctaatttccatattgaagaaactaattaaattctcacaggcgaggagtgaccttcctatttcctataaagcaagacattccatatgttaaggggaaggtaattgacaggacgacacgacctggagacatctctttgcctccttttgctgaacctatgggactgagaaaggacaaagcgtgcctcagagttggacaacgagagttgaatagaatattcttttcaacgtgacgtgtatggacccatggcatgagcaaatagtagtcgtggcacgagacaccataatggacataaataggagagacagaatgattagagataaggctaaaaactgtacaaaaatcacaacggagtttattatcctc

SEQ ID NO: 647437 - DNA, 1521 bp, Homo sapiens
  misc_feature (521)..(521): n is a, c, g, or t
agcggacttgccgctgctctcggcagcccgatcggtcggcctggcgccgccttctgtcctgctagcgcggcgcgacgcgatagagcgtggcggcgcgcaggggagcccagcgcagagggccgcgacgcggcgagcgagcgcgtcagcggaacggccacgaaggaagtgaccgcgtcacgcatggcacggggccgtccggcagctcatgagtagggagaaaaggtgcgtcgcgggatacctccgctggtgcgccgtccgtggactcccgggaagctccggccggtattggccggcaggttcgatcgcgggaatcaggatcggacagtcctgtccggagctatgacggactgagccgccaaacggccccgagcgtccattgcagaatggctcggagtgaagcaattgaagcatttgccggccattctttcgtggcccacagactcaatgcaacgaagagaaaccagggacctctatggtttggcccccaaattccacccaacaagcctttggacccctcaagngacgcataaatcatgaacgggtatttgcccacctttttccccattggcacccgaaggtcttctccggaagttgcgtggaaacccagagacaaagaggcgcctattttgtgggaacaccaacgtcttaggagccaaccatgggagagctcggttagcagttggggcgcaacaatcctttttccaggggcccccgaatacaaggctaagctgggacattcgctgttggccatcaccaatattttagcaccagtgttccgacaccgtgtccagaaagtccgatggtcaaagttggcgcacacttatggcggagagatgtttgtctcggcgccaacgtaattatcgcaaagagactttatggcctggtgtggagcggtaatagagtcgatctcatatccccggcatttggtgtagcactacaccgagatgtggatacaacgcctttttccataaccgggttggaaaacccgtttctttaagcaccccgtggaagctatactagtccctttcggactatcaaagaccctatgtgcccaatttcccgtccagaaccccttgggtttcccaaaggatagcccgttacaacatgattggacacgagggtcacatagccacactcgcaggatgatgatacattatttgacacgcgtaacacaggcttaaccaaggggtgtcattcaaattcctcgggacttgtgcaagggtaagtccctctcacttccaggttgggggcccccccaattttcgaaagtaagtttaccaaacatatatcacagggccgtttgaaaaaattccccagttacgagagtatccccccagattcggagcattccttgagacgagaaagctcggacgagccaccccttttgtcttcaacacgggtacagaacgttacactgccgatagcgccgggggagaaatttccacgcgaagttaattctttatcgcgagaatagtgccaaggcgcaacacgtataattgaggcgggaccaaaggaatgtcg

SEQ ID NO: 647438 - DNA, 241 bp, Homo sapiens
tgggccagaaatcgacactacggtgagattaggttcaatgaaagtgagcagtagtagaagctactggatggctttaagacattctatgatgaaatgactagcgatagtaggtaagtacagtagttctaagttacttaattgaagccctcagaagttgctaagaatttatctgataaatctgcctttgcacaaatgtgatactgatgcatggacggctcaccggaatgacctttttggggtg

SEQ ID NO: 647439 - DNA, 146 bp, Homo sapiens
tagaaaacatttgagagttaaaacatttagttttaacacagaagtatatatacataggttgtattaaaactaaatgttttaatacaacctatgtatattacttctgtgttaaattttgctttgtcattaataacaatttaacaaat

SEQ ID NO: 647440 - DNA, 282 bp, Homo sapiens
caacgcacaaacacaggggattggccggcttttcggagccggcggagcaggttactcgcacgcggatttggctggcgtcccgctaactggtatgaaccctctgtctccttatataaatgtggatcacgagaatacactgcgagtaggatacacattgtgtacttgtacgcataccgtaactattacacaccgggtcatatttcacctgaccttctgcacgatggactgatttagtgtgacaatgcctgcgttagattgcatagttgctgttctgcttaggga

SEQ ID NO: 647441 - DNA, 127 bp, Homo sapiens
tatgcctctccccaatggctgaccatttatatgtgacctttctggggtcaactgtgtgcccactgaccagcctggtgctagccccaaattcagtgctgtttggccctggatctagactctggtgact

SEQ ID NO: 647442 - DNA, 178 bp, Homo sapiens
cgcgcttggggaggaaaaagagaaagaaactccttggccacaatgatggaaggatgaatcacgtgcaaataaaaaggccaatcaatggtgtggcagcccccatcatcctttccatcctgcccctacgagccactcatgagagccccgcaacgagccacgccaggagccccaccatgcg

SEQ ID NO: 647443 - DNA, 590 bp, Homo sapiens
ctgatctgctcgtcccggaatacacgcgggagagaaggaagaagaaaatccatctgaagcggtgcgtcttccttctgtgacttgatgttggtaactgggtgccattgaatagagctgaagccaaagtgggatgttttaaaggtgctataattttgtttgtttccttttaaaatagggtcagaccgaagtcagaattgctgaagcagggtgcctgaattaaccctatatgtcctgctgttaattttacctaattacgttttctaaataaggaaagataaagaactcatgagcaggtttctggaaccaggatccatgaataattttggttgagttttggatttggaatttttctgccttatttgcacagacagtttgtacactgtttctcagacctaaaaaataggtagttatgtaaaattccttgacattgtagtttagaacaaaattctaattttgatgtatgtagctcaagcgaagctttaggaagaaattgttatatatactcttaggtgtgagcataacagcccaacccatttttttttttgggatggagtatctgggctcccagtcgcttttcatgcaatcccatt

SEQ ID NO: 647444 - DNA, 249 bp, Homo sapiens
cggttgactctaaggatccccttccccggtcatctcattagattaggtgagaaattacacaggtcactacatgtaaagcatctttagcagggccgggtaactaacaacacttcaccggtgttacgaactactctaagtaaggggccaagtcatgagctgcacaaaggcccccaagacccagaggggtttaatgttaagcaaaaggccgccgggtctcaggtagacactcagccacggctagccccagtc

SEQ ID NO: 647445 - DNA, 202 bp, Homo sapiens
  misc_feature (8)..(8): n is a, c, g, or t
  misc_feature (142)..(142): n is a, c, g, or t
ctaattgnttcttcgatgacgttcatttaatcagtcatttgatcatgcatttgtttattaattaagcacatactttctcataaagtatatgatgtgtagaatcataaaaaaataaaaagaaaatccctggattcatggaggntagattaactctttctcataaatatgtgccatgggacagcgtcatcgaagaaccaattag

SEQ ID NO: 647446 - DNA, 102 bp, Homo sapiens
gcccggattggcgcgctgcgcaatggaggcagtgtcgtgcgttgtgctacccgatgtccgagccgacgtgctgggccgaggaccacatcgcgattactggca

SEQ ID NO: 647447 - DNA, 621 bp, Homo sapiens
ggagggtatgtgaaaaacaaaaaagaaagaagaaagaaaaaacaaaaacaaaaaaaaaaagaacaaaaaaaaaaaacaaaaaaaaaagaaaaaaaaaaaaaaaccttgtctgccgattagcccacattacttttaacctcgacaaatcttatgcttggggccgaatttaaggctcattgggcaaatggcccctatggggggtccttttacaattcatggcccgcagtttaacaactccggaattggaaaaccctggggataccccaattaaagcgcttggaatcaaatccccttttgtcaacttgtctataatgcaaaagggcctgaccggaacgcttttccaaacagtggccaaccttgaaggccaattgaacatggtagcgctgaaattttcggaaaaactggggataaatttttgtaaagtcatctaatttttgaaccatggggcgaaaaccggataatccctttataaatcaagggatttgcccgaaatgggtgtgagtgtttgtccatttgtgaacagtccacttttagagaactagcctccaagcgctaaggggagtcgttctttgaggccaagggccaattgcgggaaccatcccctttaagcccccttatctt

SEQ ID NO: 647448 - DNA, 249 bp, Homo sapiens
ggttcgccgaccgttgactattctctacaaaccacaaagacattcgcacactatatctatttatttcgggcgcatgagctgggagtcctagggcacagctctaaggctcctttatttcgagccgagctggggccagccaggcaaccttctaggttaacgaccacatctacaacgttatcgtcacagacccatgcatttgtaataatcttctgcatagtgaatacccatcataatcggggggctttggca

SEQ ID NO: 647449 - DNA, 244 bp, Homo sapiens
cgctgaccgggtgggagtacggaatactggaccacgtatagtggtgtgtctgactcacagactgtgctccacttgtcccagcacacttcacttaaaaaacacaggttcaaaggccagattgttaagaatttcaagatggcgacagcagcgcggtggtcacacccttgaagctgattctgcctgtgccatagcaggacgcatgcttcccttgtgcgtgattacggatttcttacggggatcctca

SEQ ID NO: 647450 - DNA, 927 bp, Homo sapiens
  misc_feature (124)..(124): n is a, c, g, or t
  misc_feature (305)..(305): n is a, c, g, or t
ccatgagtgagaacatgcttgcaccgccgcttctaaatgttttaaaaacaaagacaccaatgcccttcattggggaaatgaaagacttttaagtaaaacgattttgagtgaaataatatttgtngttttaaaaagttaatattaaccactctccatcatatgttgaaattatcttaagatgtgaaagttaaaattagaaaccttgtaaaggaaaaataggaaatagtttcatgaacttgacacaggaaaatatttcttagactagatactgtagcactcaccacaataagaaatcaagcgaattncacttcatttttaaaaagcttctccttattatgttgttgtttaacaacttaaacgctatctctagaccaggaataattatttgctatataatacagcaaaaaatatgtatgtataaatggactcattcaaaatatataaagaactcctattacaaagaaattgacaaacagcccagtatatcaatgaatataaaaatttgagaagatattttccataagaagatatctaaatgaacattaggcatgagaaaaccaaattttaggatatcactacacacctggtgtagtttaaaagactgaaaatattaagtgtgtgggaatgtagagcaactgaaaatggcctacatctttcatagaaatgtaaaacaatacaaatactttgcaaaactctgtccaacattttctacccattcaccaagcaactccatccctagctatagatacccaggaaaataagtatgtatcttcacagaaataattgtatgagaatattcatagttacttatgcacagtagttaccaagtaaacctgtctcccatcagaaaaatggatatcaaattgtgtgataatcatacaatcaataggatattacttggccaaaaacaagaaacaagggcggccg

SEQ ID NO: 647451 - DNA, 711 bp, Homo sapiens
cttacggcgcatgccagtaatcagtatgattggccaggctctagcagtcacatgaaccaacaacaggatccgaggcgatgacacaatgactgatatagtctcgtagcctcttaacagaacacacatatagctccctatagcggatgtcgccggcgctaccggtggaacaatagcccttgccggagtactctgacaaccaggcgagtctggtatacgaggcatcacactacatctgactctaatggcaatgctcagacccgtcagagtagttgacgtactgatatgaggcatagtaatgacacgcgacatgctgactactgcaaacagacctgaacatgatcattgcgtacttttggatcacacacatagacatcgtcggatcagtgcttcgcatacataccatctgaaccttcacagtagcagtcattcacatgttctgcagacgcactgacttactcatgactagacacgctagcacactcatgctacaaacggactcacagtgggatcataattagctagtaaggacctcagactgtacttacgctaataggactgtgacgacgtcctagtagtagtcgctaatcatcgccgtacgcccgactatcagcctaattgcagcaccgtgagctatgagccacgctcgtctgaccagtactcgactacttaccgtactcacgatactactacaggcctatgatgcctctacgt

SEQ ID NO: 647452 - DNA, 310 bp, Homo sapiens
cactataacagaagttggtatacactcaatacaaacaatacaaactgggattataaatgccggctgggcgcggtggctcacacctgtaatctcagcaccctgggaggccgaggcaggcggatcacctaatgtcaggagtttgagaacagcctggcccaaatagtgaaacctcgtctctactaaaaataccaaaaaattagccgagcatggcggcacatgcctgcaattccagccactggggagcctgaggcagcaaaatcacctgaactgggaagggggaggttacagtaagccgagattgcggtgtttg

SEQ ID NO: 647453 - DNA, 1009 bp, Homo sapiens
tgagggggtcctatcgtttactgcgttgctctccgctctagcaatccatatgaacggtgtctcttagtgcttcctccttaacgtgtgattcccacctgttcgtgtgaccgcgggccgaaccattctaaagttccgttaatccgttggtatacttttggaacccccgttcctgtttcagtgacccctctgtccaggccgcagggtgcaatttcgtccgaccgaaatggtaagtgctgtaatatccgcgctatgttttctttgttgtgttcttatagtttgggtatcctcgttggaggaactccagatggtgtgagcggtccccacttcttttccgtgccggcagtttggtgcgtcttcttcccggtgccttcatggacattcaacttgtaatgtgatggatcgacccctgggggtcaggtcgtcttacatcgtgatggggacaacagaacggcttccataggaagtcctgtcccttgtcgttctctcggtaccttgtgcgctatcatgccgcggccactacacgctcatgcattaccctgcctttcgctaggtgccaaaaggcaggggaccaacttcgatggaaagtacgtttcaccctccaggactgatgccacattgtgctggcctgcgtgtggctccatggagcggagtctattgcaacgcaaagagtgtccatgatcttttgcctccttttgcccatcagccaatttgcctatcacgccaaacaactcagcttcggggccggatgaaggggaggggcctcccccagcacaggaatgacggagcagtctgggggtaggcatgctctgtgccagtggcccccacactcccccttcccttggagggagagggtggcaggaatacttcacctgttcctctccctacaggggcaggtggtgagaggggcgcccagggttgtctttgtgtatgggggaaggcgctgggtgcctgcagcgcctcaccttgtctcagatggtgtgtaacagcactgcgattgttgtaaatgctt

SEQ ID NO: 647454 - DNA, 108 bp, Homo sapiens
  misc_feature (73)..(73): n is a, c, g, or t
tgctcgagtatgtgtgtgacagtatcttatgtggttaatacatttcagtaccacacagtgtctagcttcatantgtgttactgccacttagagatgaccagtgtgtgc

SEQ ID NO: 647455 - DNA, 188 bp, Homo sapiens
gagctcggcccgactttctaaaaggatgataaataggtgcaagtggagcactcaagtgtgatgacgtgccctcacagtggaactggagtgagaagctttctgacctcataaactgaaggctatcttcagctcattgttttatatattttaccgtgcattaataccacatataacccccaacgaggtaa

SEQ ID NO: 647456 - DNA, 661 bp, Homo sapiens
  misc_feature (138)..(138): n is a, c, g, or t
aggaaccaagaaaacttctttgtcaactttacagatatctgtaaactattacatcgtcagcccaaacatctccttgcatttttgttggctgaattgggtacaagtgggttctatagatgggtaataaaaccaacttgntaatccaaaggaagaatcccaacagaaacagatagaaaatgtctgagaagatatatcaggaatatgtcactgtcacacatgccgatcaccggacacatcctgcgaaggacccgactctattctacaggcgaactgtcatctagatgtcgttgccagtatcaaaccggttccaggctgtcacgggcaagcgagcacagctccgtgccaaagctaactaattgctaatcactgatttgcaaagctgtgtggagatgtggctggacaggttgccatcagagtggatataccgtgtattaaaaacaagataaaaaagctgccaagatttggcgagtggtggtctgaagtccttgcagacgctgatgctcaagctgtgacatactcatgctactttaacaccgtcgagaaacgtgatatggggtaaggaggtgcttttttaaaatcgttcatagacttctgtaaaatgcaagataaattaaagttattataacagtgaacaaaacacaccacaccaccaacaaaaagg

SEQ ID NO: 647457 - DNA, 541 bp, Homo sapiens
  misc_feature (6)..(6): n is a, c, g, or t
tcctcncctgtttcaacagagctgtcaaaaaatggggaaggtgcttttaggtatttgggaatgggagatagtcatatccccccccagtgccaagtgaattcaatgatgtttcccagaacacacatttgagacaggcccataattattgtagcccccccaagaaaaatccatgtgaagttcagccagactttttgccaaataatgcctgcgttaaaacattaaacttggaaagtccgatgaagactgatattttcgatgagtttttttcctccccagcattaaatgctttagcaaatgacccattagacccccctcatttcgatgaatatttgtttgagaattattgaattaaagcctgttaacttttttcaaaaaaaatttattattattaaaaaaacttccaatgtgttcaggtagtgtttataccctgggcttgtgtaattacttgtgtaataaccatgaacaaaatgcaaggtttaacctttggttttgcccataaagcatgtaattttttttacccattaaaatccctgaatgttta

SEQ ID NO: 647458 - DNA, 900 bp, Homo sapiens
  misc_feature (65)..(65): n is a, c, g, or t
  misc_feature (76)..(76): n is a, c, g, or t
  misc_feature (81)..(81): n is a, c, g, or t
  misc_feature (93)..(93): n is a, c, g, or t
  misc_feature (130)..(130): n is a, c, g, or t
  misc_feature (163)..(163): n is a, c, g, or t
  misc_feature (758)..(758): n is a, c, g, or t
gtagacggtagagggggaagagttagagaaggggggaaggaagggggggggcctcgttggtgacngggcgcgaggncctcnggggggaggacnactgcagtcctccatgatgttgcccttgggcattttncactaggggggtggggggagtcaaagcattctncaaagcatggcaagacatagccatgtaaaacactcaccagattttcatgataaatatgggaatgctgtgctagccaggggaactggtttctgtgtggctacatgggggggtacagccactcatttttttatagggggggggctatcccctgggggccagttacccaaaaagagtggagacatcagtaaccagcacaggtgctggaatgacagaattgggtaaaaaaccaacttggggtgtggagcgctctactggttgattaaatatagcacatttgaaaaaataagaaggggggtgaagtctttaaagagaaagagggagggtgcggggaggggcgggggggagaggggagagaggagggggggccggggggcgctaagggtgggggctgtgggcgccggttccttttgagggggggggagtctacggaacctcgggaccgggagtcggggggggagggagtacgaggtgggggggcggggtttccccgcgcgagggggggagagcggggtggcgcagagaggaggggaggccgggggggaagacaatggcgacaaaggggcagaaaggggccgagaggccgaaaggggcgggnggggggccgtggtttctaagaggggggccgcgggaggaggtggggagaggtgagtcgggggggagaggggaagacccaggtggggatgtgggtacacgggtgtactcggggaagtcccttgtagcttgtgagggtcgccggg

SEQ ID NO: 647459 - DNA, 216 bp, Homo sapiens
cctcaactgcgcccggacgcccgggcccgcgtggttatccagtcagttcgctgctattcccatgggtcacaggagactgatgatggagtttgatgctcgctgggtaatatatttcaacaagccagatatagatgcctgggaattgcgtaaagggatcatcacacttgtgatcctatgtgatggttccagagcccaagaatcattgatgctgctttg

SEQ ID NO: 647460 - DNA, 410 bp, Homo sapiens
ggaggtggaggttgcagtgagctgagattgcaccactgcattccagcctggatgacagagcaaaaccctgtctcaaaaaaatgcagactggccaggcacagtggctcacacctgtaatccgactgtaagctcatcaccttgggaggccactgtaggaggatcaattgagcctagaagttcaagaccagcctgggcaaagtagggagaccccttctctacaaatagtaataaaatgaaccgggcatggtagcatgtgcctgcggtcccagctgctctgataagaggaggctcacttgagcccaggaggttgaggctgcagtgagcagagcgtgccgctacactccagcctgatgacagaccgagacactgtctcaaaaaaaataaaaaaattcagattgctgagaaaaaaa

SEQ ID NO: 647461 - DNA, 394 bp, Homo sapiens
  misc_feature (11)..(11): n is a, c, g, or t
  misc_feature (35)..(35): n is a, c, g, or t
  misc_feature (317)..(318): n is a, c, g, or t
  misc_feature (336)..(336): n is a, c, g, or t
  misc_feature (339)..(339): n is a, c, g, or t
  misc_feature (341)..(341): n is a, c, g, or t
  misc_feature (369)..(369): n is a, c, g, or t
  misc_feature (373)..(373): n is a, c, g, or t
ctgaaaagaanagaaaatacgtggagtaataagcnactctgagctcccttgtgaagaccctttatcttgtagagcccttagggcagctgacaccacagagtacaaaatggcagcggcttgttaagaaccaagacagacttggaaaatgatgtccaagggctaattcagctaagagtgagaggaaatccttcctctgcactgcaagttacccagagcagagaatgatgaaaactacaacggagcaggaaagagaaaggaagagaccaactcaggccaatttacctaaatctcccttcgcagattcttaaattctgatnnttccccgctccatatttntcntncctcataccacccctgtcgagagaaacntgcntacaggggtcctaggggccac

SEQ ID NO: 647462 - DNA, 369 bp, Homo sapiens
  misc_feature (71)..(71): n is a, c, g, or t
  misc_feature (92)..(92): n is a, c, g, or t
  misc_feature (120)..(120): n is a, c, g, or t
  misc_feature (309)..(309): n is a, c, g, or t
  misc_feature (322)..(322): n is a, c, g, or t
gaaaaggaccattagatcaggggttggcaaactatggcccacgaatcaaacctggcctgccacctgttttnatacaacctgtgagctaagantggtttatatgttttcaaatgattgggnagaaaatcaaaagaagaacaatatttcatgacacctgaaaattctatgaaattcagatttcagtgtccataaacaaaatgttattagagcatagccacacccattcatttatggtattgtctgggactgctttcttggcagagttgaatagttgggacagggacagtatagcctgcaaagcctaaaagntttactacttgtntccttaaggaaaaagtttgccagtcctgatctaggccaggggggggt

SEQ ID NO: 647463 - DNA, 231 bp, Homo sapiens
caagttccatagtggataattgtctgttgtagagtgaggctgtgtattgttagggagatttttgcattatggaacttatctgtgggttatagggcatgtcctggtgtgagtatgagcaatacagggcaagtcagtttcttgtaggttcactgtaggcattgtgaggaatatgtgtagtactctggtacatgactggctcttcaggcaactttaggtgttacggtaatattg

SEQ ID NO: 647464 - DNA, 181 bp, Homo sapiens
tgcagtgatctacaggatccgcagagggcgacccgagagggaactacaacagaggtggaatgcccaacagagggaactatcaaccagaacttcggaggacgaggaaacaatcgtggctactaaaatcattctgagggctacaaccagtggcagcagggtcaattctggggtcagaagccat

SEQ ID NO: 647465 - DNA, 128 bp, Homo sapiens
  misc_feature (7)..(7): n is a, c, g, or t
  misc_feature (21)..(21): n is a, c, g, or t
  misc_feature (32)..(32): n is a, c, g, or t
caaacanccccttcaggcccntccaccggttnttgccggtttcttttttttttcgctcaagaatgtgtctttattgaagaaggcggcttcccagaagccggtgtttccggcatgactggcttccgtga

SEQ ID NO: 647466 - DNA, 160 bp, Homo sapiens
aggcgaggagagcccccaggagcaggctggccattaagggcttgtgagccaagctgattagcccaaagtcaagctgcagtggcagcagggcacctgatatgactgccagttcataaccaacctgcccgggcggctcgctcgagccccttatagtggagta

SEQ ID NO: 647467 - DNA, 637 bp, Homo sapiens
cgtaatgtatacatacgttcaatacatcatgttgtacaccctcttgtacatgatttctagtcaattcaatagattcaacaactccaaaaaacaagacattctctttacaaagaataattattaaaaataaaattcagaattccattttatttattcgtttatttttgaaacagagtgtcgctctgtcacccaggctggctgaagtgcagtggtgtgatctcagctgactgcaacctcgctttccccgcttcaaacgattctcctgcctcagcttcccaagtagctgggattacaggtgcgtgccatcactcctggctaatttctgtatttttagtagagacagtttcgccatgttggccagcctggtctcgaactcctgaccccaggtgatccgccagcctcgacctgccaaagtgctgggattacaggtgcccaccaccacacccagctaatttttgtattcttagtaaagatgggtttcaccacattggccaggatgatctcaaactcctgacctaaggtgatccgcctgcctcggcctcccaaggtgctgagaacacaggtgtcagccaccacgctgggctgggcatagcattgtatcacagacaaagcacaaaatacttgggcaatcaagctt

SEQ ID NO: 647468 - DNA, 245 bp, Homo sapiens
  misc_feature (135)..(135): n is a, c, g, or t
gtggtgttaccgttggctgtggatataggtttgatcctcagcctggtgcagctgggtttaaaaggatcctgtcttaccacagctgtggagtagatcacagccgtggtttgccatggtcccacggcacttctatantgtctagtgggtaacaacacaaacaaacaaacaaacaaaacaaaacaaaacaaaaaaacagaaaacaacaaaaaaacctgcagtggctcagttggctgtggaggtatagg

SEQ ID NO: 647469 - DNA, 138 bp, Homo sapiens
gtgctgggcaagagcagaggtatgcagattcaggagcggtgagagaataccaagcaaggcagagggaagcacagctcactaggcctctggaatctcaagagggactgccaggagctggtttcctgggtctccatcctg

SEQ ID NO: 647470 - DNA, 254 bp, Homo sapiens
  misc_feature (23)..(23): n is a, c, g, or t
  misc_feature (81)..(81): n is a, c, g, or t
  misc_feature (105)..(105): n is a, c, g, or t
  misc_feature (164)..(164): n is a, c, g, or t
  misc_feature (176)..(176): n is a, c, g, or t
aacccttaaagataacttggatncttgtacacataaattaactatcaattgctaactgataagatgtatgttaaagtgtancctgaaagagcaataagcctgtancccgtaagttaggaaattgaacattgaacctgactgattaaattggggaaggagtcatntgggggagggcntatatatattatatttgtaaatttatatatgtttatatgtgtatatcttttctcaatatatacataaagtgtatatgt

SEQ ID NO: 647471 - DNA, 737 bp, Homo sapiens
tacatgaagggaatttattaacagaaaatatttggaggaatctgggttcacagacggggaccacgggcgaccccccttcctgtcgagggtctgtcagaaggggatgggggtgacatcctcaatccgcccgatcttcatacccgagcgggcaagggctctgagtggccgacggggccccaggtccaggggtctgggtcctatttcctccgtggttggcccggagttggatgtgtagggcggggatacccagctccttgacacctctgggccacatcctggggcagccaacatagcagcactatgggggggatctcatctcgggtcgggctttaccttcatcccaccagtcacagcggcagagtggtttccttggccagaaagatcagctgactgtggtacaacaagtgtcattgaaggatgcaacagatttgggagacaccaaataaattctctccttcagccacctgaggtccgaggctgatgaccggggctaccttcattttaccttcccctttcgaggtgggcattctggcgacgtgcgtctccagaatccacccccagaacctcctaaggtggtcaacgataagcccccacaaattccaagatcacttctctcaagaagcccaagtgctgtgatgtctgtgcccggttgatgtgtctccacaacaagtggggttcggtgtgagactgtggaccactcctgaactgcgggcctgtgggatgggaatgttggaaac

SEQ ID NO: 647472 - DNA, 350 bp, Homo sapiens
ctccacccgacggggtggggggttggaggggaagacagcaatcactgtcctctgcaaaccaaagttctttttttttttgggggaggttttttaactctgccgcccagcctggggtgcagtgccacaatttaagttaactacaacctcttcaaccaaagttcgaacttttttcctgcctaagcctccttagaaacgggaaccacaggcgggcaccaccaggcggggttaattttggtattttaactagagacacggtttcaccatgtgggccaggctggttttgaactcttgacttaaggggatccacccgcttgggcctcccaaagggctgggattacaggcatgagcca

SEQ ID NO: 647473 - DNA, 214 bp, Homo sapiens
cttacgttagaagaatgggatattggtcaatggtcagtctgtttctgcattagtaagactcaggatgtcaataatgggaatgatggattaagtagagttaaaaaggtcatagatgaagcacacagcctgcacactgaggtttggattgcatcatttatgtggcagtcaaagacttagagaatcgtgcggtgcagtgaatgcacagggacatcgg

SEQ ID NO: 647474 - DNA, 173 bp, Homo sapiens
ttgtgaggtagcacacatccgcagcccagcccagccgggagaccacgtggtcgtatgcggacccctgacctatggcaagtgaacctgccagccttccaggacaggcggccggaagagctgccccgtgaaggacagtcctctcgtctatgcagacgtggtgcaccttctcattc

SEQ ID NO: 647475 - DNA, 925 bp, Homo sapiens
gctcggccactcggtgcatcgcgggggctttctagccgctgtcccaagggttggtctcgcgctttcgtgctgcgagctctctgtggtgctggcagcggaatgtggcgcctcccgggatcctgggcctgagctcttccccgtacactgggacctagcctctggagggtgactcctaagtaccaccagcccagatgtggcctcagactactcctccactttgcttggttcctgtgcctaactcgacaggtcatggtccccatggcccaggcactgagctgtggtggtccaaggtcccatggatggaaggatgcttccaatggatgtcttcccgtgtctccccgaacaccctatgggatgcatatcttggggcactctggcctgtgctggcctgaagctggcaaggagataccaattccaggcatcctctgcagcatggacctcagagggtagaacacttgatacctggacagtccccctggaacggatcttctcatctcccttgtggcagccatgctacctcacttgtgacaaacatccttacctcagccctgatggacagctaccagggacactggcctcatggaaccccaggcttggcaggagaagcctacagctcagcccggaactttaaacacaacacatgagaaggcgctcgacctcaggacccctctgaggaaggcccggggaaataggcgtactgatggcagtagtagcacacgagcaccgaggcaaaacaagccagcatcaggccaactggtgaaagggccagaaaccaaaatctaccatgacggagtcggatcaacaggagaaacaggaaagtacacacataactcgagaccgacaagatgggccaacggagacaacacgaacgccggaaacaaagaaaacgcgctaagaagagccagaaagcgctaaggccggaatg

SEQ ID NO: 647476 - DNA, 245 bp, Homo sapiens
agactctctgcacacacgtgtaaagatctccacgatacagtgacgtgaataaagcaaagcatagaacattgtttattccacactctctatttcagattttcgtttaatatatggtggggatattaagtatctgctgttctggctctcgtttatctctagaaaccactgaaccagatacattactgttcagggtctaagttgggtcaggtagtgacggggtggcgggacgcatacactgtgatact

SEQ ID NO: 647477 - DNA, 340 bp, Homo sapiens
gagcctgtacgctaaaccttgggcgatttcgtacttaactattgttccaacgcatgtacgatgccatgggacaagcagtttgttgcttgcacgagccatatgacattcctccttgatggtatgactgatgaggtatgattagtatggacgatctaacaaagagatatggttgggaattacaggaggaattttacattaaaacagattgcaaataagatacgctttgccgacgcgcaaatcggtcgctgcggcactaggatttgacaaagatccgctgcgtgcactgctttgtcgctggcgcctcgtatgcaactgtatggcaaaacggaacgaacttgcc

SEQ ID NO: 647478 - DNA, 129 bp, Homo sapiens
ccaactaccatgagggtaaaagcaaagtcaacaaacccctattatcccttcccccaaattttttatcattgtcttttttaggaaacagacaaactcattcatttgatttaataaagttttatttttcca

SEQ ID NO: 647479 - DNA, 620 bp, Homo sapiens
  misc_feature (40)..(40): n is a, c, g, or t
  misc_feature (229)..(229): n is a, c, g, or t
  misc_feature (498)..(498): n is a, c, g, or t
agctgcagcagctggaccagttcaagaaggccacaggganaacagctttcggctcaggcacccgggcccctgagcaaagccctggagaaaacggaaggccaacatcaggtgggtgaaggagaacaaggaggtggtgctccagtggttcccagaaaacagcaataagtccccagcccttgaagtcacccggcccccaagcaaggtgcccacatgtgtccatcccaacggntggtgcagggcctccattccttgagccccaggcaccagtgtcctcccctcaaggacaaagtttccagcccacggtctctctgcctgtaagacagtctagttcctgatgacccaggctgcctgagcacctcccagcccctgcccctcatgccaaccccgccctaggcctggcatggcacctgtcgcccagtgccctggggctgatttcagggaagcccagctccagggccaaattagcaaaagctctcgatggacaatgaacggccttgntgggggccgccctggaccctctttcacccttccctaaaaaccctaaatttgaggaatccacagggcagcagatctgtatatttttttttaaaagaaaatgtaaataaaggatttttagatga

SEQ ID NO: 647480 - DNA, 577 bp, Homo sapiens
gccattcagggctctggctccaatcaggggtgggatgcagatcttcgtgaagactctgactggtaagaccatcaccctcgaggttgagcccagtgacaccatcgagaatgtcaaggcaaagatccaagataaggaaggcatccctcctgaccagcagaggttgatctttgctggaaaacagctggaagatgggcgcaccctgtctgactacaacatccagaaagagtccaccctgcacctggtgctccgtctcagaggtgggatgcaaatcttcgtgaagacgcgtctactggctaagaccatcgcccttgacgtggagcccagtgagcacgcatctgagaactgtcaaggcaaagatccaggacaaggaaggcattcctcctgagcagcagaggttgatctgtgtgccgggaaacagctggaagatggacgcaccctgtctgactacaacatccagaaagagtccaccctgcacctggtgctccgtctcagaggtgggatgcagatcttcgcgagagaccctgactggtagctcactttcaatggcatcgataacacgggatccttagagtgacct

SEQ ID NO: 647481 - DNA, 414 bp, Homo sapiens
  misc_feature (8)..(8): n is a, c, g, or t
ttctgtcnctaaagtaatttctgatgttaaaactttaagccaggaataaacaatacagatatttccactttgctaatagatggaaataccttctatgtatttgtacaatgcttatcatgccacaaatgtttagcaattattaagtatgggagaaaaaataaaacaccataaataggaattatggccttcttttaaatgcagaaattggttctaaaaatttcagtgcctagattaagctactgttgagttcttaaaagggaaaagaataactcaatctttattaaaatatttattttgggccgggtgtggtgtcacgcctgtagtcccagcactttgggaggccgaggcgggcagatcacgaggtcaggagattgagaccatcctggctaacatggtgaaaccccatctgtactt

SEQ ID NO: 647482 - DNA, 258 bp, Homo sapiens
cacaacaggatagttttagatgagactggtctcttgactaagaattaaaccatctacaggtttacaggaaaggtatcagtaagtggtgttaaaataccaaattcagagcagcagatacgcttttaagggacaggatctcaccatgttgcccaggctggagcacagcagtgcaatcatagttcactgcagcctcaatttcctgggctcaagctatcctctcacctcagccaccagagtatctgggactataggcataca

SEQ ID NO: 647483 - DNA, 840 bp, Homo sapiens
  misc_feature (23)..(24): n is a, c, g, or t
  misc_feature (253)..(253): n is a, c, g, or t
  misc_feature (622)..(622): n is a, c, g, or t
  misc_feature (632)..(632): n is a, c, g, or t
  misc_feature (694)..(694): n is a, c, g, or t
  misc_feature (705)..(705): n is a, c, g, or t
  misc_feature (719)..(720): n is a, c, g, or t
  misc_feature (729)..(729): n is a, c, g, or t
  misc_feature (741)..(741): n is a, c, g, or t
  misc_feature (745)..(745): n is a, c, g, or t
  misc_feature (747)..(747): n is a, c, g, or t
  misc_feature (754)..(754): n is a, c, g, or t
  misc_feature (764)..(764): n is a, c, g, or t
  misc_feature (767)..(767): n is a, c, g, or t
aaagttaggctaggtacgaggcnnggtggtgtccctgtgggtggacgtggttggtgattggcaggatcctggtatccgctaacaggtcaaaatgcagatcttcgtgaaaacccttaccggcaagaccatcacccttgaggtggagcccagtgacaccatcgaaaatgtgaaggccaagatccaggataaggaaggcattccccccgaccagcagaggctcatctttgcaggcaagcagctggaagatggccgnactctttctgactacaacatccagaaggagtcgaccctgcacctggtcctgcgtctgagaggtggtatgcagatcttcgtgaagaccctgaccggcaagaccatcacctgcctggaaggtggagcccagtgacaccatcgaaaatgtgaaggccaagatccaggattaacagaaggcatccctcccgaccagcagaggctcatctttgcaggcaagcagctggaagatggccgcactctttctgactacaacatccagaaagagtcgaccctgcacctggtcctgcgtctgagaggtggtatgcagatcttacgtgaagagcctgaccggtgagaccatcagtctggagggtggagcccagtgacaccngtcgaaaatngtgaaggccaagatccaagatacaagaaggaatccgcccccgaccagcagaggctcatctgngccggcaggcngtggaagatggccnntctttctgnctacaacatccngaangngtgaccngacctggtcngcnctgaggggtggctgtaattctggaagcaggcattcgaagtgccagggatggttggtctgctataggcatttgc

SEQ ID NO: 647484 - DNA, 440 bp, Homo sapiens
tatccgtgtcggggttgcaaagaagacggtcgtccacatattgaatatgactgggagacaggtttaaggaagctagaggtttcgggctagagcttgtccaaagaaatgagggctatccctgaagccctgagggaggacagtccatgtgagttgttgtgactggagggtgtcagggtcagtccaggtgaaagcaaataggttttgggaatcagggtgtagggaaatggtaaagaaggcatccttcaggtcaattgcagtgtagagggtggtgttggtagcgacgagagagagaagtggataggggttatggactatgggatgaatagggaggacagcttgactgatggcttggaggttgtgaacgagtcggtatgagccatcagactttttaacagggaggataggggtgttatatggagagtgtgtaggtctaagaagat

SEQ ID NO: 647485 - DNA, 825 bp, Homo sapiens
  misc_feature (413)..(413): n is a, c, g, or t
  misc_feature (429)..(429): n is a, c, g, or t
  misc_feature (446)..(447): n is a, c, g, or t
  misc_feature (642)..(642): n is a, c, g, or t
atcctcacctgtgtgctccagccccatctgtgtgctcatctccacctgtgtgctcatcctcacctgtgtgctccatccccacctgtgtgctcatccccacctgtgtgctcatccccacctgtgtgctcatccccacctgtgtgctcatccccacctgtgtgctccgtctcagaggtgggatgcagatcttcgtgaagactctgactggtaagaccatcaccctcgaggttgagcccagtgacaccatcgagaatgtcaaggcaaagatccaagataaggaaggcatccctcctgaccagcagaggttgatctttgctggaaaacagctggaagatgggcgcaccctgtctgactacaacatccagaaagagtccaccctgcacctggtgctccgtctcagaggtgggatgctnatcttcgtgaagaccntgactggtaagaccatnncctctcgaggtggagcccagtgacaccattgagaatgtcaaggcaaagatccaagacaaggaaggcatccctcctgaccagcagaggttgatctttgctgggaaacagctggaagatggacgcaccctgtctgactacaacatccagaaagagtccaccctgcacctggtgctccgtctcagaggtgggatgcanatcttcgtgaagaccctgactggtaagaccatcacccttgaggtggtgaagcccattgaccctttggagaacgtcaaatgtaaggatccacgaaatggaaggctttcttttgaccagcagaggttgatctttgccggaaagcaacttgggaaaagggcccaccctggttgattacaaacatcc

SEQ ID NO: 647486 - DNA, 524 bp, Homo sapiens
acttgaaccgattctggatggctgtcctgatgttcctcattttcactttgggctgtgggatgcagatcttcgtgaagactctgactggtaagaccatcaccctcgaggttgagcccagtgacaccatcgagaatgtcaaggcaaagatccaagataaggaaggcatccctcctgaccagcagaggttgatctttgctggaaaacagctggaagatgggcgcaccctgtctgactacaacatccagaaagagtccaccctgcacctggtgctcccttcgcctcagaggtggcatgcagatctttgtgaagaccctgacaggcaagaccatcaccctggacgtcgagcccagtgttaccaccaagaaggtcaaacaggaagacagacgtaccttcctcaccacagtatctaaaaagagccctccttgtgcttgttcttgggtgtgatgggggaggtgtcttagttttccctatcttttaagctgttaacaagtttcattgcactttgaataaagttcttgcattcc

SEQ ID NO: 647487 - DNA, 1104 bp, Homo sapiens
  misc_feature (8)..(8): n is a, c, g, or t
  misc_feature (45)..(45): n is a, c, g, or t
  misc_feature (114)..(114): n is a, c, g, or t
  misc_feature (128)..(128): n is a, c, g, or t
  misc_feature (138)..(138): n is a, c, g, or t
  misc_feature (143)..(143): n is a, c, g, or t
  misc_feature (299)..(299): n is a, c, g, or t
  misc_feature (526)..(527): n is a, c, g, or t
  misc_feature (531)..(531): n is a, c, g, or t
  misc_feature (534)..(534): n is a, c, g, or t
  misc_feature (538)..(538): n is a, c, g, or t
  misc_feature (540)..(540): n is a, c, g, or t
  misc_feature (542)..(542): n is a, c, g, or t
cccaggcncatgaaatgtaagccaagtccagataagaggcatccntccggaccacaaggctatcgagcaacagctgaaagcccgactctttctgactcaccatccagaagagtntccgtgacctggtntgcgtttaanagtgnatcaagcgtaaagccctgaccggcaagaccatcacccttgaggtggagcccagtgacaccatcgaaaatgtgaaggccaagatccaggataaggaaggcattccccccgaccagcagaggctcatctttgcaggcaagcagctggaagatggccgnactctttctgactacaacatccagaaggagtcgaccctgcacctggtcctgcgcctgaggggtggctgttaattcttcagtcatggcattcgcagtgcccagtgatggcattactctgcactatagccatttgccccaacttaagtttagaaattacaagtttcagtaatagctgaacctctgttcaaaatgttaataaaggtttcgttgcatggtaagcataaaanncagnaanaaanananaaaaaaaaaaaaaaatgggggggggcgtcaaaaggccccaggggggccgcaataggaccgccgttgtttgttgacaatgggtgcggaccacaacaagcggaggggtgagataaaagggcaatgggcagggcgacggtgtaaaccccaccatcgagggccggcgggggaacaatcggcgactggcgaaagctgggcgaacgagcgaccgatgactgcgggggggcggcaaactatggggaataagccctccatcctaaaagatgaaggctttagcgaaaatactagcaaaagtcttctgcgcgcgtgaatacagggcgtggtgccaccaaacgccggcctataagacatggggctgcagaaacatgcggacaaccacggccaggtcatccgaggacatttgccccccgcgcgagatagaaaatccctgtcccaaaagaaaggccaccctgatggagatcacgtgaacggaggactgtggccgaggaagcttggactggcccgccgagaggccttgaagcagcagtactgtgaacaacgtgtcgcgcgcgatgacatgaccgac

SEQ ID NO: 647488 - DNA, 248 bp, Homo sapiens
  misc_feature (199)..(199): n is a, c, g, or t
cacaaaacaccggggatctatgcctgtggccacccggagatgacacgatggctcacatgtactctatgacacttaggtggaaagtgcggcgaagaaaaacaagtgacttgtggccaattacacgacctgcaaaggctagacgctgccaacatgggctccagtggagcttgagcttcgtgtagacagttctaacggaagncggtacgcaactcacacgagcggtgcgggaggagtaccgagctcggaat

SEQ ID NO: 647489 - DNA, 647 bp, Homo sapiens
ttttgttaaaggtacattttcaccatacccttttttatatctcggtattattagtatccccctgttaccctataggttggtctcttccccacccccctttgagcttttgctcttaaatacattcacggttccacagcctgaccatccttgtttaatctatcatactcttccaggtttttttctttttggtctaaggctggaacttttttcttttttttcagctgaagtcttatgacttttcatgagtccaaattgttcggatttcagcaagtcaaatcttgcaaaggcctgcatattgttgttttaacagattataatgaagtactgtgctaaagagctcttataaacaaaatgccatcatgcacttagcctcgcaataccatgcaatgtatgttaacttagtctctcttctcagacactgttggtagcttaatttctgtgttttcctttttttaaaaaaaaatatggacttattgtggttatctgagaggttctaacattcacatgcaatttggtgtggccatttagctattaatgagttaatggcgcagaacttgttgatatatgaagtgttctctccccttttgcccatgacgtaaatacataggtgtgttgccaggactttgtatccaggttttttcccccct

SEQ ID NO: 647490 - DNA, 581 bp, Homo sapiens
  misc_feature (369)..(369): n is a, c, g, or t
tcgccctctgaccgcaggtgatcttgctgtaaacgtgacagctcccgtctgattacaacattcataatgagtccctgtcctctggtccgtcttacatgtggcatgcttatttcgtgtataccctgtactggtcacatactcactctcgtaattggtccgagatgcactccatagtcaatgtcaaggcatagatcctatgacactgaacgctactccctcctgagccagcagaggttgatctttgccggaaagcagctggaagatgggcgcaccctgtctgactacaacatccagaaagagtctaccctgcacctggtgctccgtctcagaggtgggatgcaaatcttcgtgaagaccctgactggtaanaccatcactctctgaagtggagccgagatgacacccattgagaatgtcaaggcaaagatccaagacaaggaaggcatccctcctgaccagcagaggttgatctttgctgggaaacagctggaagatggacgcaccctgtctgactacaacatccagaaagagtccaccctgcacctggttaggatgcttcggtaccgagctcgagtctatca

SEQ ID NO: 647491 - DNA, 478 bp, Homo sapiens
ggttgtataattccagttatgtgaaatatacagaatagtaaatctgtaaaaacagaaagtctattgctagttgccaggaactgtggggaggagggaatgggaagttaactgcttaatggacatgaggttttattctggagtgacaaaaatgttttgaaagtaataaaggtggcagttttataacattgtaaatgtactaaatgctaccaatttgttcactttaaaatggttcattttatgtcatatgaattttacctcaatctttaaaaatatgcatttgcacccatttatagttataagaactttgataagttgctcccctcaggtctcagtgtcttcattcaaaagtgagcccttttgcttggacagtgaaaatggagaagtaagaatctttaaaatttcctccacgaaagcaacaagaacactggcaaaaatggtcagaatcaagttttccagaattctgggaattaaaaaaaaa

SEQ ID NO: 647492 - DNA, 1329 bp, Homo sapiens
  misc_feature (35)..(35): n is a, c, g, or t
  misc_feature (64)..(64): n is a, c, g, or t
  misc_feature (84)..(84): n is a, c, g, or t
  misc_feature (87)..(87): n is a, c, g, or t
  misc_feature (96)..(97): n is a, c, g, or t
  misc_feature (106)..(106): n is a, c, g, or t
  misc_feature (112)..(112): n is a, c, g, or t
  misc_feature (136)..(136): n is a, c, g, or t
  misc_feature (143)..(143): n is a, c, g, or t
  misc_feature (150)..(150): n is a, c, g, or t
  misc_feature (152)..(152): n is a, c, g, or t
  misc_feature (154)..(154): n is a, c, g, or t
  misc_feature (176)..(176): n is a, c, g, or t
  misc_feature (232)..(232): n is a, c, g, or t
  misc_feature (494)..(497): n is a, c, g, or t
  misc_feature (501)..(502): n is a, c, g, or t
  misc_feature (504)..(504): n is a, c, g, or t
  misc_feature (508)..(508): n is a, c, g, or t
  misc_feature (510)..(510): n is a, c, g, or t
  misc_feature (764)..(764): n is a, c, g, or t
gaaggggagccgagggacaccagggagaaggggangcaaatagccaatttatatgttatgtagntccgccggaccatcagaggnggngtggggtgnntaatttttngttatngggtttttcctgggttggatgacnactgctngaaagtngncncccggcgccgggggcgctcggngcagaggggggaggcagagtggcgggaagacccggacggggaagaccagcacccgntctcgaggtggagcccagtgacaccattgagaatgtcaaggcaaagatccaagacaaggaaggcatccctcctgaccagcagaggttgatctttgctgggaaacagctggaagatggacgcaccctgtctgactacaacatccagaaagagtccaccctgcacttggtcctgcgcttgagggggggtgtctaagtttccccttttaaggtttcaacaaatttcattgcactttcctttcaataaagttgttgcattccccannnnaaannanaaananccaagaataaaggaaaggcaattccgtccgtgatcagcagagtgtttgctcttgggcgcgcaaacagctggcaagactggtcgtaccctgtactgagctacgcaccatccagaaagagtccatttttgcacctggtactccgctctcatgatggtggcgatgcaaaatcttgcgatagaagacgcgtcaactgggcaattgactcagtcagcccctctgacgtgtcggaagccgcgaggttgagcacacaatcngcggacactgtcaaaacggctaaaagagtcccttttgacagatcggacaggggcatttacccttccacttgaacccctttcaaggaagggttttgaactcctgtgtggtctgagaaaaaataccaggccgtggtaaaggactggggcccgcatactcccgttgattccttggagcgtaccataacggtccctatgtacacatgtcagttcctaacacccctttgtctatcctcttggcgctggcgtcccggctcctttccatacaaaacaggtcggggggacaacttgcccaagaaatttttattcagggttgtaagtagaaacccgccttggaaccttgtggggtttcgaaatggaaaccccaatgtttcatgaacgattccgtgccggaacacgagtattgggtgaaagccccacagatagtgttggaatcctatcgtccaaattttttgcacaggaaaaactttggttcccacaacgcggcgcgacacaaaagagaacttcctcccaaggacactcacaactggggcaaacagcgggcgcaatcttctccccattatacccg

SEQ ID NO: 647493 - DNA, 241 bp, Homo sapiens
atcctcacctgtgtgctccagccccatctgtgtgctcatctccacctgtgtgctcatcctcacctgtgtgctccatccccacctgtgtgctcatccccacctgtgtgctcatccccacctgtgtgctcatccccacctgtgtgctcatccccacctgtgtgctccgtctcagaggtgggcacacacagcacacagatgagcacacagcacacacacaaacgcacagcacacacacgcacac

SEQ ID NO: 647494 - DNA, 1886 bp, Homo sapiens
  misc_feature (1051)..(1054): n is a, c, g, or t
  misc_feature (1058)..(1059): n is a, c, g, or t
  misc_feature (1061)..(1061): n is a, c, g, or t
  misc_feature (1065)..(1065): n is a, c, g, or t
  misc_feature (1067)..(1067): n is a, c, g, or t
  misc_feature (1321)..(1321): n is a, c, g, or t
gatatggagtcgcagttcttgtttgtggattgctgtgatcgtcacttgacaatgcagatcttcgtgaagactctgactggtaagaccatcaccctcgaggttgagcccagtgacaccatcgagaatgtcaaggcaaagatccaagataaggaaggcatccctcctgaccagcagaggttgatctttgctggaaaacagctggaagatgggcgcaccctgtctgactacaacatccagaaagagtccaccctgcacctggtgctccgcctcagaggtgggagtgcaaatcttcgtgaagacgcgtcactggtaagtaccatcgcccttgacgtggagcccagtgagcacgcatctgagaatgtcaaaggcaaagatccaggacaaggaaggcatccctcctgaccagcagaggttgatctttgccggagaaacagctggaaggatggacgcaccctgtctgactacaacatccagaaaagagtccaccctgcacctggtgctccgtctcagaggtgggatgcagatcttcgtgaagaccctgactggtaagaccatcaccctcgaggtggaagcccagtgacaccattgagaatgtcaaggcaaagatccaagacaaggaaggcattcctcctggaccagcagaggttgatctttggccgggaaacagctggaagatggacgcaccctgtctgactacaacatccagaaagagtccaccctgcacctggtgctccgtctcagaggtgggatgcagatcttcgtgaagaccctgactggtaagaccatcaccctcgaggtggagcccagtgacaccatcgagaatgtcaaggcaaagatccaagataaggaaggcatccctcctgatcagcagaggttgatctttgctgggaaacagctggaagatggacgcaccctgtctgactacaacatccagaaagagtccactctgcacttggtcctgcgcttgagggggggtgtctaagtttccccttttaaggtttcaacaaatttcattgcactttcctttcaataaagttgttgcattccccannnnaaannanaaananccaagaataaaggaaaggcaattccgtccgtgatcagcagagtgtttgctcttgggcgcgcaaacagctggcaagactggtcgtaccctgtactgagctacgcaccatccagaaagagtccatttttgcacctggtactccgctctcatgatggtggcgatgcaaaatcttgcgatagaagacgcgtcaactgggcaattgactcagtcagcccctctgacgtgtcggaagccgcgaggttgagcacacaatcngcggacactgtcaaaacggctaaaagagtcccttttgacagatcggacaggggcatttacccttccacttgaacccctttcaaggaagggttttgaactcctgtgtggtctgagaaaaaataccaggccgtggtaaaggactggggcccgcatactcccgttgattccttggagcgtaccataacggtccctatgtacacatgtcagttcctaacacccctttgtctatcctcttggcgctggcgtcccggctcctttccatacaaaacaggtcggggggacaacttgcccaagaaatttttattcagggttgtaagtagaaacccgccttggaaccttgtggggtttcgaaatggaaaccccaatgtttcatgaacgattccgtgccggaacacgagtattgggtgaaagccccacagatagtgttggaatcctatcgtccaaattttttgcacaggaaaaactttggttcccacaacgcggcgcgacacaaaagagaacttcctcccaaggacactcacaactggggcaaacagcgggcgcaatcttctccccattatacccg

SEQ ID NO: 647495 - DNA, 1721 bp, Homo sapiens
  misc_feature (1143)..(1144): n is a, c, g, or t
  misc_feature (1148)..(1148): n is a, c, g, or t
  misc_feature (1151)..(1151): n is a, c, g, or t
  misc_feature (1155)..(1155): n is a, c, g, or t
  misc_feature (1157)..(1157): n is a, c, g, or t
  misc_feature (1159)..(1159): n is a, c, g, or t
gatatggagtcgcagttcttgtttgtggattgctgtgatcgtcacttgacaatgcagatcttcgtgaagactctgactggtaagaccatcaccctcgaggttgagcccagtgacaccatcgagaatgtcaaggcaaagatccaagataaggaaggcatccctcctgaccagcagaggttgatctttgctggaaaacagctggaagatgggcgcaccctgtctgactacaacatccagaaagagtccaccctgcacctggtgctccgcctcagaggtgggagtgcaaatcttcgtgaagacgcgtcactggtaagtaccatcgcccttgacgtggagcccagtgagcacgcatctgagaatgtcaaaggcaaagatccaggacaaggaaggcatccctcctgaccagcagaggttgatctttgccggagaaacagctggaaggatggacgcaccctgtctgactacaacatccagaaaagagtccaccctgcacctggtgctccgtctcagaggtgggatgcagatcttcgtgaagaccctgactggtaagaccatcaccctcgaggtggaagcccagtgacaccattgagaatgtcaaggcaaagatccaagacaaggaaggcattcctcctggaccagcagaggttgatctttggccgggaaacagctggaagatggacgcaccctgtctgactacaacatccagaaagagtccaccctgcacctggtgctccgtctcagaggtgggatgcagatcttcgtgaagaccctgactggtaagaccatcaccctcgaggtggagcccagtgacaccatcgagaatgtgaaggccaagatccaggataaagaaggcatcccccccgaccagcagaggctcatctttgcaggcaagcagctggaagatggccgcactctttctgactacaacatccagaaagagtcgaccctgcacctggtcctgcgtctgagcctgaggggtggctgttaattcttcagtcatggcattcgcagtgcccagtgatggcattactctgcactatagccatttgccccaacttaagtttagaaattacaagtttcagtaatagctgaacctctgttcaaaatgttaataaaggtttcgttgcatggtaagcataaaanncagnaanaaanananaaaaaaaaaaaaaaatgggggggggcgtcaaaaggccccaggggggccgcaataggaccgccgttgtttgttgacaatgggtgcggaccacaacaagcggaggggtgagataaaagggcaatgggcagggcgacggtgtaaaccccaccatcgagggccggcgggggaacaatcggcgactggcgaaagctgggcgaacgagcgaccgatgactgcgggggggcggcaaactatggggaataagccctccatcctaaaagatgaaggctttagcgaaaatactagcaaaagtcttctgcgcgcgtgaatacagggcgtggtgccaccaaacgccggcctataagacatggggctgcagaaacatgcggacaaccacggccaggtcatccgaggacatttgccccccgcgcgagatagaaaatccctgtcccaaaagaaaggccaccctgatggagatcacgtgaacggaggactgtggccgaggaagcttggactggcccgccgagaggccttgaagcagcagtactgtgaacaacgtgtcgcgcgcgatgacatgaccgac

SEQ ID NO: 647496 - DNA, 449 bp, Homo sapiens
caaacaaatgtggcgactgtgggtcacgtaaaaagttggatgacattcaatatagtcccactggggaatttttaacagtatgtataatacctacttccttttcattgcattaccaaatagttaaaataacttaatcaaccagctgtatggtttccctctggtaaaattaccatcagggtggggaaaatgtttgtggaaggggagagtgagttggtatgactaagggataatcggtacatggggaagggggcaacagtggataggatgactttaaagaaaatgactaccttgggaaaaaagaatttaattttggtccacatatcctaccttttcccatggtgcatatcccaggtgtcatatttaaacctagggttccttaaaacagaatccgggaatatcagggctcgggggctgggaatttcagagggataggactaataaaggggact

SEQ ID NO: 647497 - DNA, 573 bp, Homo sapiens
  misc_feature (205)..(206): n is a, c, g, or t
ttttcccaggggcccccctctttcctccatacgtgttattggcccccgggccttatccccggcactccccttgtgggcttcctcctttggcggggcattccgggttatgttccccttttcccccgggggtacgggttttgccggccacccatgggggggggaacgggtgtttcttcccggggttttccagtttcccccccccttnnggccatggggggttttttttggcccccaaaaaccggggcttttccaaaattttttaacaccccccccccctttccccaaaagggggggggggggggcggggggggggtttttttaaccaagccccttttttttacccccccattccccggggggcccccccccccttttttttccccccttaaaaaacccgggggcggttcccccccccggttttttttttgggcgggggggggggtaaattttttccccggggacccctttttccccttgggccctttttggggcccctttaaacccgttttttcccaaaaaccggggggggccggggcgggttttcccggggtttttttcccccccgggccccca

SEQ ID NO: 647498 - DNA, 348 bp, Homo sapiens
acgctctctctgtggggtatgatatcaccatgcccagctaattttttggtattttttagtagatacagggtttcactggtgttagccaggatcgtctccatctccggacctcgtgatcctcccacctgggcctcccaaagtgctgggattacagacgtgagccaccgcgccgggcctactgacttatttaaatgcttattctgaaaggatcagggttcctcagatgcccggcccagaggtccctaggctccccgcttcagcggattatcggtttggggatctttaccgtgctacagctaaggactactctgccttttcttttccccccacagagagagcgtcgggtac

SEQ ID NO: 647499 - DNA, 322 bp, Homo sapiens
ggccgcgtcgacgaaataaagtgccccgccctctggttgctcgaatcatgtcagcgacccggaaatcttcccagactacaacaggctggccatcatagccttcaaaagaaacattctcaccaccaattttaaagtaaggtagcttagtttccggcgctagtgaacgagcgagcgccttagcaaggagatcctttccggtaccgccagggccgcaaatgtagaagttaattacttgttctggagcgggtaagtgcgaaagatagtctccgcgcagcttctcgaagtgtcgacccggccgcgaatttagtagtagtagtcgacc

SEQ ID NO: 647500 - DNA, 111 bp, Homo sapiens
ctgatcactcatacagacagagcaatctatagtaactaaagctagccagacctggctcatctatatcctgacaacgtgcatctcctggccctgtggctcacctattgtagc

SEQ ID NO: 647501 - DNA, 171 bp, Homo sapiens
ttgttagagatctggaaaaaaaatcttctagacaaatcaagttgatcttggccaagtgcagtggctcatgctgtaatcccagcactttgggaggccaaggtgggcggatcacttgaggccaggagttcaagaccagcatggccaacatgacaaaaccccatctctattaat

SEQ ID NO: 647502 - DNA, 319 bp, Homo sapiens
caaaacttatatatgtgttagccacaattattctacaaagagacatttctcctccaattcatttaccactggtagaggttacataagcaaagcacagagttataccttggacacaccttaaaggactctttgtgtccatcattcatttgaaattcttagacacttatataatggaatggcttgagattatagcacttgccaaaggtgcttggttccaacctttttcactttgagtgttcattttacacactgtgcttcctaattcggtgaaggcgcctttccagacttttttggaaactcttctttttcatactcatat

SEQ ID NO: 647503 - DNA, 87 bp, Homo sapiens
  misc_feature (6)..(6): n is a, c, g, or t
  misc_feature (10)..(10): n is a, c, g, or t
  misc_feature (66)..(66): n is a, c, g, or t
  misc_feature (68)..(68): n is a, c, g, or t
  misc_feature (72)..(72): n is a, c, g, or t
  misc_feature (74)..(74): n is a, c, g, or t
  misc_feature (79)..(79): n is a, c, g, or t
gtatcntatntctgtcaggaatgatatttccaaatgaaaatgtaaagaacattgggaaataataancnaccnancaaanaaacacaa

SEQ ID NO: 647504 - DNA, 659 bp, Homo sapiens
  misc_feature (498)..(498): n is a, c, g, or t
agcggagggggctggttcgatctgtggccgggcccctcccccgtcccgggagcttggcggttccgataccgcgagttagtactctgcacttctggatgaagatgcagacaacaggagatcctgaggatactgtgactgctgaactaggtgacttgggacagttgttgccgcagatctctcggtcacaacctcgactgtggcggggcacggcgatctgtgattgggtctggccctcagctacttacccactactatgatgatgcccggaccatgtaccaggtgttccgccgtgggcttagtcatctcagggaatgggccctgtcttggtttcaggaagcctaagcaggcttaccagtggctgtcctaccaggaggtgggcgagcagggctgaatttctgggggtccggactatctgcagcacaatggtaaagcatgcactgatcagtttattggtgttattgggagaaaatcggccagagtggatcattgtggagctgngctggtatcacatattccatggtgcgtggtcccgctctatgacaccctgggaccctggggctaatcctgtacatcgatcaatacagcggacatcagcaccgtgattgtggacaaagctcagaaggctgtgcttctgctagagcatgtggaagaggacggag

SEQ ID NO: 647505 - DNA, 356 bp, Homo sapiens
catttagtatctacttggagttgtaatgatttcgtgtgtagacggacaacatgattatgtgagagagagaagaggctgcgccaggcaagacagttatttaggtcgccatgacatctctaatgtcgcagagatggtaccttttgtggctgaagcacagggtctgtgagagtgtaacacagatgacattggagaagaggtagaggtgagcctagggacactgggtgccacggtatagccgagaatgggacagagtcaggaagggtaagggcaactaatatatacaaagagcatcttatctttagaaagaccattccagcaacagtaagagaataaatgatagagccagaggctgctaa

SEQ ID NO: 647506 - DNA, 929 bp, Homo sapiens
gagcagcgcaggacagcagatgacttagacccagcgtgttcgttgaaaccgtgctgttggccacgggctgtgcttatcccatctatcagaagttcactctggtccgcacgcaggggctttacacttgtaatccactagctattttggaaggctcgaggctggtgtggatcacatgtagagtcaggagtttgagcaccagtgcggacaacatggcgaatgcctgttctccatgtaaacatatcacaaaacattagcccgggatgtgtgctaggcccggccatgctgataatcttgcagactgagctcacgtggaggccttgagtggcaggagggatcgctggaaccccaggatgcggctgttcgcagttgagccgatgcattgagaaatctgcgagctccagcctgctgtcaacatgacgcataggatctccgttctcgcaatcatatgatcatatcatgtaatagtcaaaatacctgagaagaaagctttgatcattttgggggagaggagtgcgcacatgtaaactttgcccccaccggaataattgtctatacccacgggccgtgcgtataagggtgctctagtttgggtgtgaccacactacggggcgaacccgtgaaatgtgaaataaacatgtacaaactccgtggtgtactggttactgtggctaaatacatagccggaagactactaggtctttagggtgaacttcacgcgggagggcatctagccatgaccaagcgacgaggtgccttttttagaaggacataataccgaccctgtggcttttgtttgccctgaattaatcgcttgtccgacccggtaacggggttttcccaccatgaaaagcgtggaaaagtggtttagacttttaattggccgctctaatgagcattccggtctaccaaaacaagggttccacaccagg

SEQ ID NO: 647507 - DNA, 826 bp, Homo sapiens
aaaagaaggaaaaaaagaagaaacaaaaaaaaacgacacacttagcatcagtacgatgctggtggttacttatatccatctgtgactgcacgaactgtaccggcaagtcctactgggataccagccccggggtaacccaggatagaatatgtaacggtgacgtccagagggattccggtaccggggccagatcttcccaaccgatgaatggacatgtattagatggttataaggatcactaccaggatcctgtaccaggcatcacccctagcagcagcagcaggacccggacaccatgccatctatcaattgctaacaccagcacaacatcaaccttgcagatctgacacgggctgtagaatgccactgcctcagaacatgacttcacagatgttcagtgccattgctgcggtgacaggccaatggacagaaccctaatgccaccccagacccagtgggcctccagaccagtacggctatggcggacagatggaggcggcagacagtgcttaccaacgtattccacaacgccagcccagacagccagtggccacaccacataatgaccccatacgacataatccctacacgacccaaagccaagcccatcaccacacccatcagaaacaccaagctccaggccagcaccaacccacagtcggccaggcccagccccagccatctaccagctcccggcacggcacagcagcaaagcccacagacatgcgctcgctgggacaagggggagagagtgagaaaggagagaaggggcaagacaggggaaaccggcaccagccagaagagcccagcaggacaaaccaaggaa

SEQ ID NO: 647508 - DNA, 267 bp, Homo sapiens
acaattcgccccgggcaatatggtgaaaccctgtctgtactaaaaatacaaaaattagccgggcatagtggtggtcacctgtaggcctagctactcaggaggctgaggcaggagaatcgcgtgaacccaggaggcggaggctgcagtgagctgagatggtaccactgcactccagcctgggtgacagagtgagactccatctccacacaaaaaaaagaaatataaatgttttaaagttatttgataaatactgccattttccatgag

SEQ ID NO: 647509 - DNA, 1357 bp, Homo sapiens
  misc_feature (344)..(344): n is a, c, g, or t
cctcgctgcatacgtgacatcgtctttaaaccctgcgtggcaatccctgagcgcaccgccgtgatgcccaggaaagacagggcgacctggaagtccaacttacttccttaagatcatccaactattgcatgattatccgaacatgtttcagttgtgggacgcagacaatgtgggctccaagcaagactgtcccgcagactccagcatgctccctttcgactgtggaaagtgctgtagagctgtcgtgattgagtgcaatgaacgaccattgactgccgcaagggtcctagtcctgaaggcgtcgaccttgaggaagacacctagacgccaaggcgtacttgagnagtaaaaacttgcctttgactcgtccaagtattcactggcgaggcaatagttgttgcgtggctattagttgattgcatcgcaaacgagatgtgacccgtgcaccattggaaggagtcgacgtgggaacaagtgggtatcgcttcgtggcacgacactaagacgggttgtcccaggacctagtcgtggcacctcggttggtctgggggtggtgccagtttagacacccaccaattgggttgcaaacgctcaggcctgcttgggcccgaggtcccccaagaaaaacacacttgggagtccttcgggggttccccctgcaggaaaagcaactccttctcctgttatttgtccccagggggctcttttgaagggctaattccaaccccaaacttaaaaagaatttcttccgaggggggtcaaacccaatattgcacaattaccccttgagcggattgtttccccggcaatatggctctcgcgcccagagtgattatcttggtctcttgtcgagaaatttgtgtacttgagcccccaataacttggcttgggccattgctagattaaaccccccaatttggcttatgccattcgaaactcgaggggtcaccataagagccagaaaggttcccgtagggggcccttttgtgatcaatctggcttgtcgcatgcacccgggggaattttcacgcagcccttttacccgccatcgttgttggtgctttgggaacaacacacactgtggttcccgaaaagcggccgccgtttcccttttggcgcgctcttggaattcccccattgcctttggccccttctttcggatacggcggcttggccattggcaccccctctctggcttgtgggctttggacttggccccgagcccggaaccaaggtcttgggccttccccatttagccttcggcactttgggctttggtgcagaggaccccccctaagggcgcttcaacaccgcgggtactttggaaaggccgtcccaacagtgggcaacacaggca

SEQ ID NO: 647510 - DNA, 256 bp, Homo sapiens
cacaaattcgctgtcatcctaaaggcctgacactgcagtgcaagaggcgatgctacagtctacgcacacggtcctggcacgcaggaaggagacagagcctctcccagtgcacacatccccttctctgatttctggaagaagactaagaaaggagtgggaaaacgcagggaggtccaggcccaggactaataggtggatggatctcctgggttcagttccttctctgagatggctcccaatcctctatctgggatgg

SEQ ID NO: 647511 - DNA, 116 bp, Homo sapiens
cgggcgccacagcttgtcacgtttaaacttacatcgaatcgctttctggaggacgcgagcgggacgccgctgcgcgattgacacggcatacttgcctatcaggcgtactctccctc

SEQ ID NO: 647512 - DNA, 273 bp, Homo sapiens
acacacaatgaaaaatgttgaggtgctaactcagagctgaaacactgcagtactagactctgatagagtgaggtagattgtggccagcgtgcaggtaaccgtctgcagttgcaataacagaattagaaggtgggggtgtcatggaatcttaggagccctgattccaattgcccaggctttgttgaaacacaggcaccctagtctcacctgagggcaccaccaatggggatcattccttcagcattcactctcagtattcgtgtacccttgtga

SEQ ID NO: 647513 - DNA, 845 bp, Homo sapiens
gcctgcgtagtgaactgtgcgagtcccatccgggagtgtgccggcgtcctggcatcccagtcctgacttaatgagctctagcttactctcggtaggcgctagaccccatgatcggtgctccctcgtacgagcgtgcctggatcggctgaaagctcaggtgtagtgagcgtcatacatcaacaccaggcacgtggtggtccgtgccttggatggcttggtggcatgctgaccttctggggttaatgattgtctcccattctcgagtggcagcacttgtgagaggtactccagtcttgcagtgtcttcaagttggaatgtttggcagatacgactagagcagggcccctatacgggaatgcagttccatgagcaaatgattaagttctattccaaaagacttaaaattgtttcctatttcaaatatttacctttcaaaataatggaaagtacattcgaatgtagttacacaaaacttaatgaaagacagagaagatcttgtttcagcacgacagactcccagtccggatatccgcacaaacgctgagaccgcaaccaccccgagtccgcctggatagcaggcgaaggtgtctccagacttttaaatggttactgacaagcaaaaagtccgctggggagttaaagttgctctatgtggactagtacttcacgtgaagaagttgtggtcagtggtacccagaataatgaaaccattggcaggagttgaacctccgggacctcataaggattcattggccgcccacctccgagggacggcgtgtgctccccatacacccctgtacagtgacaccgccaagctgagcactggcctccctttccccgcggac

SEQ ID NO: 647514 - DNA, 146 bp, Homo sapiens
cgaatagtcatgtgcctacgtctgcctcgcaattgagggagcatgtaccccaggtacatccatgaactgcggcagaagtttgacttatggctgtttcagcttataaggttgttgtgtattggttattgattatgtggcttgttaat

SEQ ID NO: 647515 - DNA, 116 bp, Homo sapiens
tcaaaaatcatcatacatagccatttctgctatatagccaggacttgatacctaaagatatttatttctacagagggcactttgtttcatagcaaggcatttatgacactagaact

SEQ ID NO: 647516 - DNA, 1500 bp, Homo sapiens
gatttaatgaggtagcatggaatgggctgagagtggtgttagcttctcgtccaccagaagggcacactttcatctaatttaggggtcatcactgacgctgatagcactaacacgcagaagggggatgaaatacctatccagaccaccatgtgctaatagggaagtgtagcacgatgcaatcggacattctctggtggggctcggcctcctgtgcatcgcggctaatatctttggctcttgactttacccaatcggggaacacaaatgtcagtggcctgccgagacaagcatcgtcagccggttccgtggtggtctcttgtgctgagcatcgtactgagcgtggcccgtgtctgaatgcctacctggctcactcatgtggcttcttctccatgtgggggctggtgaacagtgcatgctactgactgtggatgtgactgatgcgcccatagaaatactgatgagataatacgtatctgcgcatgcgttgtcctatcgtgctagtaggcctagacttcttcgatttgggaacttcgtcagggactctgtggctactgggtgttccttcgggcaggccaaggccacctcgtgactctaagctagcacaggacccaactcactgttcctaggaaagattactcctaccgggccacaaggcaggagaagacttatacagccccttagtgcgccaagcgcgagcccggaagggggcctacgggtaacccctttccttggagaattatgcattcccaacaaatggggtcgcagaatggtggaagcttggaaaagcaccataaaggcaccgacttttggttggcacacctggggagaaatcgctgaattccttccgtgggaatcaggtaccataatatcccttacattagaggcatccgctggggtgcgaaactctggaagcatctccagtcttcggggggctcctaaacatttcccgggatatatcaaacctggcgacactcgtctttgggcaagcaccaactaactagtcgcggacatataataggacacgagctatgctatacacccaagcgaagccaacaccactcaggaccatgaggctaaaaaagcgaaccaggaactcaacgagaactacgcacccccaaaactgacacagtcgcgcacgcaacagcagcacatcgacaaaagagcaaccaatagatatgcgcacacccggccccatcccacgccgcagacaccacgacgctctggacagtcaggccgcggaacccagagacagccaccaacagaggccacagcgactaagacgacccgggccggcgactagcaaaacgcgaggcacacaccaccagggcacgtacacagcgcctacacacccgccagaaccaggcacgctcccctggccgcgactgcacccaaccaccggctcccgctcatacgataactggagagaagagcacacgaacaccaaacgacaccaccagacagccacacagaaagaacagcaagacgaaattcacccacaag

SEQ ID NO: 647517 - DNA, 453 bp, Homo sapiens
ggctccttaattcctagccactatgcgtgagtgcatctccatccacgttggcaggctggtgttcagattggaatgcctgctgggagctctactgctggaacacggcatccagcccgatggcagatgcaagtgacagacagtgaggagatgatcttcaaacttcttcagtgaagggctggacacgtgcccgtgtgtgtattgtgacccgcttgatgaagtcgcactggctacgcagtcttcaccctgagcagtcatcacaggcaaggaacgatgctgttccaataactatgcccgaggcactacaccattggcagagggaggcaccttcattgaccttgtgtttgtgagcccgcattctgccaagcttggctgatccagtgcagccgcgtcttccagggcgttctctggttgttcccaccacgctgttggtcggcgggaacatggtgtctcggg

SEQ ID NO: 647518 - DNA, 433 bp, Homo sapiens
ggtcccggtagggctagcaccgttcaccctgtacatttcgctgcctcagtgacccccgcctcacggcttgggccctaaggacgtgcattcccagcctgagggccccgatctgccccctcccccggtctgcctgtgtggcgcctctctcacgccctatcttccggtcaacttctcctgccttccccgggggcacgtgtgaagggaagtcggaggccgggcaggagcctctgtttccgaagcttctcgaaagcccagaaaacccctcccaagagcccagcctaacctgggtggaagagcccccaggtcaccccaaatatttgcgctggggcgcgtgtgagggtgggaaataggtccctctctcttctacagttcacagctctgggaactacatcccttcaaaaaacattaataaagaactaaagtcatgtgcaaa

SEQ ID NO: 647519 - DNA, 213 bp, Homo sapiens
gcgtcgactaaaaattacatccaacttctcagaaatcatgcaagcaagaagagaatagtgaaatatttagtgttgagagaaagaagcccaccacctagaattttatatcctgccatgttgtgttacccttccaaagtaaaggaagaataaagacttactcaaagtgaaaattgagggaatttcttacaaatcggatttgcaacaaattccgtc

SEQ ID NO: 647520 - DNA, 369 bp, Homo sapiens
  misc_feature (71)..(71): n is a, c, g, or t
  misc_feature (315)..(315): n is a, c, g, or t
ccccgtgggctgcagggtcaacaaagttgggtttcctcttttggctcagaaatttaaaagaaaggaagggnccctggtgtagtggctcatgcctgtaatctcagcatttggggaggtttaggcgggcagatcgcctgaacctaggagttcgagacccgcctgggcaacgtggtgaaacctcatctctacaaaaattagctgagcatggttgtgtgcacgtgtggtcccagctgctcgggaggctgaagtgggaggatggtgtgagcccaggagtggaaggttgcagtgagccatgattgtgtcattggactccancctggatgacagaatgagatcctgtcataaataaataaataaatataccaaaaa

SEQ ID NO: 647521 - DNA, 108 bp, Homo sapiens
ttaggtctgcgtcccatcagtctcatagtgttaaaaatatatgcacttaacacgagacccctataatatatcaagcaaaaacatacagaactgatgggagaagatgcg

SEQ ID NO: 647522 - DNA, 750 bp, Homo sapiens
  misc_feature (596)..(596): n is a, c, g, or t
ggtcactgaagagggaaaaggagtgagaagacaaagccgtccgaaagccccagacagcttcgtattgctccagcccggtgcataccccgggagactcccgaggcgctccctccatcttcggaacacggccaggaattgattgagtaatcaggaagctatgagggaccctgtgacgtagtcgcagattaccatgtgtcctttcttttctggaggatgccgcatcccacgtaggactggatcgggtcggacgtctggaaggcctgggctctgtcgagatacaggccacctagcaaggtcgaagacagcagcgttggcaaaatgatcgggcaagcagctgcagcgagaccagggatgaaagaagacctgaaggtgatggcctccgttgaggtacagtgcctgtcaacttctggagagctccgcatgggccaggctagtccagttcgcttcgaatctggaacttgctctgataggacaagacttcatctactcccaatcacactggccctcattggtacttgcccgtcttcaagtcccctttcctgttccatctccatttacccatttataatcttgttactctccctgagggttttggntgggtgctgagtgaatctgccaagagttgagtgcctatgtatttaggatctaatcgtgtctactccatttcgtctcaaaaggccctcagggtcgcaaaggtaaatgggtcaaggcaatggaatactggctcaaagggattctcctttgccccca

SEQ ID NO: 647523 - DNA, 480 bp, Homo sapiens
  misc_feature (54)..(54): n is a, c, g, or t
  misc_feature (102)..(102): n is a, c, g, or t
  misc_feature (250)..(250): n is a, c, g, or t
  misc_feature (254)..(254): n is a, c, g, or t
  misc_feature (271)..(271): n is a, c, g, or t
aaaaaaaaaacccccagttgtgtgaagggtggccaacacttccagaactgggancccgccacatcctgatgtgtaaaatccccacgaatagggcaaaagcangcccactcccacactaatgccgcccctctcactaaattaaacccttggaaaaataagatgtggccttggcctttaaaactcagtgaactatcctttatggtacagttggtttcccatagcctgtaaacacaaaagatcctatggtttnctgncctaccccaggatagtncttgtcctcctagacaatgtattgatgatgcaaatgttctggaactaaatagtggtgatggtggcacaacactgtgaatgtactaaatgtcactgatttgtacgtatttaatatgaattaaatgttaaaatggtgaattatatttatgtatattttaccataataaaaatatgcattggaagatgcattttttgtgaccaaaaaaaaaa

SEQ ID NO: 647524 - DNA, 559 bp, Homo sapiens
aggggcttacagacagaactctgatctccctggggagcccctggtgggaggggcagctgtggtctctgcccatcagcagacttagtatttcctgcctgctggctctgaggagtctgggcagtccagacgaggaggattccccccagcacagtgcacccactccaccaaggggcagccagactgttgctttaagcaggttcctgattccgtgcctcctgactgggtgacaccttccaacaggagtcaccagacactgtatacagaaatgtttcagctggcatcaggtcagtgtgcctctgggacggagctcccagaggaaggagcagcccatctttgctgttctgcagtctccagtggtgatgcctacaggtgccgggttggggggtgacccaggcgaatagggtctcaggtggaccccaagcaaaccacagcagccactatggaagaagggcctgactgttaaaagaaaaacaaatagcatcaacgccaacatcaacaaaaaacttcatccatagatcaacagcctcaaaaattgaaggtagataaacccacacataac

SEQ ID NO: 647525 - DNA, 611 bp, Homo sapiens
gtggctaatgcctgcaatcccagcactttcggaggccaaggcgggaagatcaccagaggtcgggagttcgagaccagcctgaccaacatggtgaaaccctgtctctactaaaaatacaaaaaattagccaggcgtgtggtgcatgcctgaaatcctagttactcgggtggctgaggcaggagaatcacttgaaactgggaggcggaggttgaagtaagcgaagatcgcaccactgcactccagcctggtgacagagcaagatccatctcaaaaaaaaaaaaggaaaggaaaagaaaaaagaaaagaaaattgcaagtttttagccaggggtggtgtcagggtaccttatatttcccagatattcaggaactctgagggcaggaaaacgggtttgaaacctgggaggtggaggcggcagtaagctgagatcacgccagtgacttcaagccggggtcacagagtaaggacttctattcccaaaagagaggaccatttgtgagcccaagagagctaggtgtggaaagtgccacccaaatttccagcctggggcaaccaagagatccgtgtcttgacgaacacacacaaccatagcacccgcatacacaacacca

SEQ ID NO: 647526 - DNA, 228 bp, Homo sapiens
gggttagaacttcagttgttgaatgtgagtggctgcatttgttcaagttcaagactgttagtaattgtttagttagtactgtgttgacaaatcattttaaacagaattgtgaaatgatttgtactgagttgtcaagtagtttgaacttctttggcaagtggttaaaattgcgttgtgaatttgttggactgttgtcaatttattttaaccgcataacaccacacaatt

SEQ ID NO: 647527 - DNA, 265 bp, Homo sapiens
  misc_feature (102)..(102): n is a, c, g, or t
  misc_feature (128)..(128): n is a, c, g, or t
  misc_feature (186)..(186): n is a, c, g, or t
  misc_feature (196)..(196): n is a, c, g, or t
aggtcacacgagatatccccagttctgagtcgtcaacgaaatcgtaagatgtgcataaggtttccattttgcacttgttaaaaatgtgcttgcggccaggtncggtggctcatgcttgtaatcccagnactttgagaggccgaggccggtggatcacttgaggtcaggaatttgagaccagcctgnccaacatggnaaaaccccgtctctactaaaaatacaaaaattagctggacattgtggtgggtgcctgtaatcccagcta

SEQ ID NO: 647528 - DNA, 463 bp, Homo sapiens
gctctcggctcgcttggacctctgtctcctgggttcaagtgattctcatgcctcagctcccaagtggctgggattacagtgcatgtcaactttgcctggtatttttgtatatttggtggagatacggttttgccgtgttggccaggctggtctcgaactgtcttcgggtggtccaccaacctcggcctctcaaagtgctgggataacagtcgtgagccaccgagactggctatgtgcagatcttgaggcacgctgatcctacacaagcaggtagccctttcagcactccagctcttctctgacattaggttacactcaagttctctggaacctctcctgtgcagccacttgaatgtatagaggtactcctttcttatcctcactttgaacagcaaccaaaagctcatctctggtcataacatttgaaacatttttgctgcatctcatctctccatacacatcc

SEQ ID NO: 647529 - DNA, 429 bp, Homo sapiens
agcacacctgtcatcgtaggaccaactgaagagatccgcgcccctcatgcagccattgggaaatccccttgctggctggggagtacatcatccggtgctaagaaatcacaaactcccacgcattctcactcctcatgtggggggctctggtttaatctcacggcccaggattacgtcatccagtttgctcagggtgacgtccgcctctgcttgtcggcttccgggccttggacatacgtcgcctccagtacctgtgtggatcctcggcgacgttttcttgggggagtatgtgacctcttcgaccgcggggacatgaagagcggcgcacgagtgggactggcgcgcgctcgccctccggagcggacctgggaagccggagacacgcaggcgcagtaacccgggtgccgcccaaggtgatgcatgcgcacc

SEQ ID NO: 647530 - DNA, 688 bp, Homo sapiens
  misc_feature (394)..(394): n is a, c, g, or t
  misc_feature (688)..(688): n is a, c, g, or t
gaggaagctaaggctgcgttggggtgaggcctctattcatccggctgactatcaaccggtcggcagcgccagcccgtacactcgcccgggcgactgggctctgtctccgacgctcgcttgcatctactcgagtccatcattctgcacgacgatgaggtgagcagctcacggagcgataagatcgagagtgccactacattaaaggcgagccagggtgtacaagtgttgaggccttttaggcactggcgtatgtttgcagaaggccctgtgccaacggtcaacatggggacgcctcatcgtgcagatgtaaggggccgcgtggagcgctgctccgagacagactgggtgctgctagcacagacacgcgacggttccatgcctcgcgccctctcancggtgcgtggcttggcgtccacgccttgaggcgatgacagacaaccgtgcggagagcaaagaggagagacgaacgagagtctccgagggacgtcgtggaagtgacatgaacctgtggggccttattgagtcttgtttttgagctaagacgcctctttgtaataacgagtgttacaactaaaagagctgaagctttagaaccatgaggataggagaaaggctaaaaagaaaaaagaggcgttgggcaaggagggagtcgaaaggcctgggagggcaaatggaggaagctgtgagn

SEQ ID NO: 647531 - DNA, 205 bp, Homo sapiens
cggaagactcggcgtcgggtcttcggcgtgtgcatgcacacgccgagggttcatactgagcaaagcgaactcgccgatcttcacgtgcacacgccgaataaccatactgcacacgccgaagatccacacacttcttgaggtcaacgcgtaatcgccgatctagatcggcgatatcgggttcgcggcggtctggtggctcggcgtg

SEQ ID NO: 647532 - DNA, 494 bp, Homo sapiens
tacgacttctagactgtccacagtctggagcatagtcatagcactagctgggatgctactagtatgctgaacattatatttgagaaatgtacttggtcccatgtgttagggaccccctcttattcccttgtctccttgtgtcctaagtgctgatagcttcatcattgttctactactgctgtgatcactgatgacatgttcccattttgtacatatactctgctttattcactccttttatagtgtagtcgtcctgatacatgtggttgcccagtgccatgaggcaggataggagagccacttgaggtcatatgttaaggtatgtaacacacactgttctgatcacttacatctgtggctctccagttttccttctaaggacttatttcttcacaagcctggtaatttgaggctgtgcttctaacgtatgctttctcttctatatctcatagcctaggcttgtaccttaataggggaggtacgaagagggacag

SEQ ID NO: 647533 - DNA, 762 bp, Homo sapiens
tcgcgcccgggagtcgcctgctgcgccaggatggagtgtcgtgaaatgccttgggaccccgagagagttctacaacctggtgcgctgccggatcgggggcagcggaaggtgagtgcccaagatggaccaggagctcgcgtcagcagcagactgggaaacttgcctacaagtatctcaatcagaccagtcgcagattgcgcaagtcttgtgatccaggcgctggatggggaaatgcgcaacgcaagacgtgcgatattgtatatcggggattctccgagtctctggacacaccgtggaatgatgacatgaacgctatcagctgtggaaaagaaggtcgccgcatgttaacaccaactttcagcctcgtttccattataccaatccaatggactggacggttacattggaagagcaaggagaaggagttcgacaggtgctggaggatattccccaatgatctccctggagtttagaaatctggtgtgagaaataccataagagggattgccgaggatttgcaccggagaatgggcattgggatggcagagtatcggataatgcatgtgactcttgaacaggagtgggacaagtactgtcactatgttgctgggttggtcggaattggctttctactgtgtgttctcagcctcagagtttgaagaccacttagttggtgaggatacagaacgtgccattctatggggctgtttctggagaaaagaaaattatcggtgatattggaaggacaagaaggaggagaga

SEQ ID NO: 647534 - DNA, 646 bp, Homo sapiens
ggaggcacccatggtgcatgtgcgctgtttccaccgcccatcctccagtccctctccagcactgaggcacgctctgcactccgtaactcaacatggcagcctttctcgccgtaaactatttagtgagattttagggactatttttcagtatctctgtacctgttaaagggggtgcttttcgatctaaaactgaattgttatatttattgacttatttttctagactaaaattgtatatgctgtttggtaattaggaactcgttgagaatattggcttctgattgttgccatcacgttcctacaaaattgttttgtctaggggatgttctggcagctgtggtcatggaaatggctgctgggttcatgcagtcagtccataagagactttataccagcataggcattagaatcccgtgccagttaccattaactgtaacctatttagcttttggttagggatctttcatgatggtcttttatgacgcaatcttagttctaagtcatggttcccatcccttttttgtgtgtttcagaaaatatgtgtatttgattcccctgcttccactaaatccagttgtgactaaatctacgtgacattagatgtaaggttataccaatggaacttatgagatccccgcgaacagga

SEQ ID NO: 647535 - DNA, 1406 bp, Homo sapiens
agaactacctggaggaggccgccgagcggctgaattcctgtggagcctggtcaggttcaccatctccagccgcacggacgcctggggtccacgccctgagcaacgcggcgcacctggacgtccagacgccgctcaggccggacgaccttcccgacccgcaggtcctaggcctgaggacccatacaaacacaacagcctgactggcaccctggccaatcacgggtcctagcgggcacttcacgagtgcccagaagactatccacgcaacgtcacgcagccactgtcccggacctacctgtaccgactggcccattggctgtcacctggcgtgatgagctgcacggtgtatgaactgcaacctatgctggactctcccggcagagaagccgcccaggacctcctcggaacacaagaattcagcgccattccagtacggttggcagacacggtgcctgaagacccacggtgccgacaccggctagcagaccgcggtcctccggataacccccaaggacacaagccacgacccattgggtcaacacgcggacggagtacgccagagaagacctagcaggttctttggacacctgggacgctccggagacgcccagctactatcacccgtgatactaaggacccagggaaccgagcgacgcgcatgcaccgcgcatcggccctggggtcgcgcaggagcgcgcgatagagagcgagatatagagcacaacatgccaccagagcgacaacgcaccgaaacccgtgagcaacgccacacagcacacaccagagacaacgccacaccaactacagatgtaggcacacaacagcacccacaggcaactaacatcccaccaccgctcgagatgcataggaaccggaaaacagccaacacgcaagcccagcccagcacccccctgcacagaccaacaacagataacgaggaatcccacgagatagacccgcgcacaacacccaacgcaacagcagaagacgaaccacagagacagcaaacaccgaacgaaccgcaccacgcaggcggaagaccaagaggcgagagcgcacacacacgaacagcggcccggcgcaaacagaaacaacaccaaaacagaggtcacaaaaacgccacggccaacacgccaccagcggcgcgcgaggaggacacgagagacacgagcaccaacccagcagaccacacacaaaaagaacaaaacagcaacaaaaagcagcaacaacagaccaaagcagaacagaccacgaaaggcgcagagaccgcccagagacgaccgcacggcgagaggaagccagaaacgcgagcgcaaagacgagcgccaggcagcaccaacgacccacgacgggcgccagcacacaacgaacaccgccaccgccccccgggtcacggacgacccaac

SEQ ID NO: 647536 - DNA, 112 bp, Homo sapiens
gtgaacagggagcggggcttttgtctgttggtctccctcgactacgagaggagattagaagcccaagactaagattctcaaaatggtttattacccagacctcttgtctggt

SEQ ID NO: 647537 - DNA, 559 bp, Homo sapiens
acgtactatggcatagctgttcctagagtatactggtactccggaaggcccgtctcaatggtcgctgtctcttcggactgttgggtacacctgcagactaacaacagacaaaacaggcacacagggattaatatgagatttataatcgtagtacttccaatggtcttaacccaagtgacagggttaagatttgcgaggccatcagcaactcctgcaattgcctcagttcctggcaccaaatttaaatgggcttttgatgcttcgaaaatttgttcttttaatttggaaatgtctaaagtgagattatcttctcttccctgtagatggcgtctaaccatgtcccagtgatgctcagactcattataaatttggggtgtaatacaaaaatctgacgtattccagtcacattgtaactggaaacgatgttctaagctcatgagtctgtctcccatccaaatgacagtttgtctaagatcattaatttgatttgccaatttttgatcaatactagattgtgaattccacaatcttgtagaattcttttgccaatcattaacaa

SEQ ID NO: 647538 - DNA, 610 bp, Homo sapiens
cattttctgtacataaaaaaaaaaaaagaaccactaaacgcagccgggttacgaccgggggcgcctcagtcgcctcatttgatgttctcggggtttggttcgggggaggctggggagcggggatggggggctgggggggggtcccccttttcccctttgggccctgaagagactgggtgggttgagcacctcgtccacaccacaccttggggcccaggtgaccggatccggggtcccaaggagagaagccccaggtccccgcaccttccgggctcttcctggcccggcctgtggaagccaggcccatctctcggggggtccgtctggtcgcgttggcggagaaggctgggtgtggatggtgacccagagcaccggggtgggggtgagtgtccgaggagtacccaggtccagaggcccctcttgcggggaaggtgacccacagccccgtggcagcgggcacggcagcttggcacaggataaggccagatggggcagcagggagaaccggctggcgcgagttgtcagcagaatccagggctgggccctggggcaccactgggctgcaaggcatttcccgaggtcccagggcggcgtagcatcacatggtgga

SEQ ID NO: 647539 - DNA, 385 bp, Homo sapiens
  misc_feature (11)..(12): n is a, c, g, or t
  misc_feature (29)..(29): n is a, c, g, or t
  misc_feature (51)..(51): n is a, c, g, or t
  misc_feature (59)..(59): n is a, c, g, or t
  misc_feature (76)..(76): n is a, c, g, or t
  misc_feature (114)..(114): n is a, c, g, or t
  misc_feature (172)..(172): n is a, c, g, or t
  misc_feature (191)..(191): n is a, c, g, or t
  misc_feature (209)..(209): n is a, c, g, or t
  misc_feature (211)..(211): n is a, c, g, or t
  misc_feature (221)..(221): n is a, c, g, or t
  misc_feature (229)..(229): n is a, c, g, or t
  misc_feature (267)..(267): n is a, c, g, or t
  misc_feature (318)..(318): n is a, c, g, or t
  misc_feature (338)..(338): n is a, c, g, or t
  misc_feature (341)..(341): n is a, c, g, or t
gcacagcaccnngggcctcgccagtcagngggaccagctggaccagctggngcatgcgnatgcagcacaacctggngcagcagatccaggccaggaacacaacaggtgtgactnaggtaggccctcaaagaattcagcatgatgtttaaacactttgacaaggacaagtctngcaggctgaaccatcaggngttcaaatcttgcctgcncntccctgggcntatgaccngcccatgggtggaggaaggggaacctgaccctgagttngaggcaatcctggacacggtggatccgaacagagatggccatgtctccttncaagaatacatggctttcangancagccgggaaactgagaacgtcaagtccagcgaggagatttaga

SEQ ID NO: 647540 - DNA, 317 bp, Homo sapiens
ggttcctgtcaaagaaaactactagtacaaataacgctggcactgtgaaaaatccaccgtcaacgctcaccagaaacacattgtgtagcgctatgcagagttttatcatgtccccgtcacagtgatcctctagaatagactgattgaggatactgaagactggcgtccatcgactaacaacagactcagttctcgctcatttccgcaatccttgcccagatcactgggactgaacatttgaaagaatctgaagccgataatacaaagaaggcaaaggaaaagataccccttcacgtctttagtcccaaatacacaaa

SEQ ID NO: 647541 - DNA, 355 bp, Homo sapiens
aagcgctgtccggtcgattcgggattgccggcggtcttcgccgggcgtcggcggtcagccgggcggcgctggtgtgaggtggattcccggccagtctgaccatcttcctccagtttttccacttcgttcggaacttctcataactatgtccaccctctacgtctccctcacccagatgccttccccagctccgagccctcatagccgtcgctatggggaggctggggagggtccggatggggaggagccaccgattgttcaggccgaaaggagcaagtggtgggccgaagggcggccggctccagtgtggggccaggtggtgacaggtggtgggccagcagacggggaggccaaa

SEQ ID NO: 647542 - DNA, 240 bp, Homo sapiens
cccctcacgtagtacagtaatgcccagtgacagaggtattgaccccgtgtaagatgctatgatacaaatgtatacatgtagtactctttacttgtatactacttttctattattcttttatgagacactgtcgcactgttgccctgggatagggtgccagtggtacaaatcttggctcacttggaacctcctgcctccgtgggttccaatgctgattctccttacctcagcctccttgag

SEQ ID NO: 647543 - DNA, 1106 bp, Homo sapiens
agacgttcttcgccgagagtcgtcggggtttcctgcttcaacagtgcttggacggaacccggcgctcgttccccaccccggccggccggccatagccagaccctccgtcaccgtcttcaccgcacccgtcgtgactgcccaagggcccccggcgcacgctccagacgccgcgtcagacaccggacggcgacgcacgccatcatccttaagtcgcacgccaatgaacgaaccggagtcacaacctccgcagggttgcgccagaaactaccaccaaggactcagaaggccgccatcaacgcgcagactccaacctgggagctctaccgccatccctacgtttaccatgtcccatgtcttactacttatgaccggagatagatgtggctttgaagaactttgcaaatactttcttcacaattctcatgaggagagggaacatgctgagaaactgatgaagcgtgaagaaccaagaggtgggccgaatcttccttcaggatatcacagaacaccagaatgtgatggactggcaagagacgggttgaatgccaattggagttgtgcataacatgtggaacaaaaatggtgaatcaggtacattattggaattggaaaaactgggccatgaaaaatattgagcccattgtgttgattcattgagacaattacatgaatgagcaggtgaagcatcaagattgggtgacagtgaaccaactggcgccagcatggggaagcgcacgaacctggagtgcgcggaacacgaccttgggcaaggcaaccctgggaagacacagcaaaggaaagcaacagaccggactaataaccaagaccgcgggggagacaggaggcaacaaggcagacgaaacaggcacacgaacaatacaaaaatgcgcacaacaacagagacgaccaggagagaacaacctccaaacgacagggacccgaacagaaaagagaaaaaagtacgccccgcacacagacaaaccacgcagcgcaaaagagaagccaggaaaaagaaactaaagaacgaaaaggcgaggaccaaacaagagagaggaaacgcacaacccacaccctgcaccgagaacgagaagacaccccaacggcta

SEQ ID NO: 647544 - DNA, 684 bp, Homo sapiens
  misc_feature (78)..(78): n is a, c, g, or t
  misc_feature (162)..(162): n is a, c, g, or t
  misc_feature (212)..(212): n is a, c, g, or t
  misc_feature (218)..(218): n is a, c, g, or t
  misc_feature (239)..(239): n is a, c, g, or t
  misc_feature (245)..(245): n is a, c, g, or t
  misc_feature (263)..(263): n is a, c, g, or t
  misc_feature (277)..(277): n is a, c, g, or t
  misc_feature (297)..(297): n is a, c, g, or t
  misc_feature (309)..(309): n is a, c, g, or t
  misc_feature (375)..(375): n is a, c, g, or t
  misc_feature (415)..(415): n is a, c, g, or t
  misc_feature (419)..(419): n is a, c, g, or t
  misc_feature (436)..(436): n is a, c, g, or t
  misc_feature (462)..(462): n is a, c, g, or t
gagctgagcagtcaagatgtgtgacttcaccgaagaccaaaaccgacagagttcaaggaggcctatccagctagtttnaccgaacaggtagatagcaaagatcctgtacagaccaaataataggggatatgatgaaggccctgggccagaaccctaccaacnccgaagtgctcaaagtcctggggaaccccaagagtgatgagatgaatgtnaaagtnctggactttgagcactttctncccatnctgcagacagtagccaanaacaaagaccaaancacctatgaggattatgtcnaaggacttcggntatttaacaaagaaggaaataacaccaatcataagtgctgaaatccggcatattcttgtcacactnggtgagaaaatgacagaggaagaagtaaagatgctggtancagnacatgaggacagcaatngttgtatcaactatgaagcgtttgtnaggcatatcctgtcggggtgacgggcccatggggcagactcgtccgcatggtgctgaatgactgaggaccttcccaatctccccaaagtccgtgcctttccctagtgtaaattttgtatctagcctaaagtttccctaggctttcttgtctcagcaactttcccatcttgtctctcttggatgatgtttgccgtcagcattcaccaaataaacttgctctct

SEQ ID NO: 647545 - DNA, 273 bp, Homo sapiens
  misc_feature (190)..(190): n is a, c, g, or t
  misc_feature (243)..(243): n is a, c, g, or t
aaactgttgtttatccaaactcctccaagctaaaggagcatgttttaacccaatgcaaggaagctaagaaccttgaaaaaaggttagaggaattgctaactagaataaccagtttagagacgaacataaatgacctgatggagccgaaaaacacagcatgagaacttcatgaagcatacataagtatcantagcgaatcgatcaagcagaagaaaggatatcagagactggagatcaatttantgaaataaagcatgaaaacaagattagact

SEQ ID NO: 647546 - DNA, 260 bp, Homo sapiens
cgtcgactgcgcgcacacatacatgcactggcacatacacacagttcactgtaagctgtgcctcacagggtcagtgatatttaggtaataatgtaacattatgaaacttactaggaggattttttgtgcaaatttagagtagttaggaaatacagccttactataaaggctaaagatagcaaacggctgggaaaggcagtcaccagtgttatctgtactctaataaattccagaaggtgggaagtgacaaaggtcgacgc

SEQ ID NO: 647547 - DNA, 81 bp, Homo sapiens
tgcattccgcagcccccacccccaaggttctccaacatcacagcccagcccacccactgggtaataaaagtggtttgtgga

SEQ ID NO: 647548 - DNA, 126 bp, Homo sapiens
cctaatacaggtcggggagacgtatcacgctaagatttctacaggcggttaggaaatccttcacacatcgtcgtcatcggatgtatcacggctactggtctctgtgtcatcacgacattgtgattg

SEQ ID NO: 647549 - DNA, 170 bp, Homo sapiens
cctctcacgttacctcaaatagacacatttcttttaagtttacattttttccatttcaatttctcatatactatattgtttatttgtcatcctatatttcacctctggtaatcactaaactttgtctcattttttttctcttccatcaaatatcaattttggattcagat

SEQ ID NO: 647550 - DNA, 173 bp, Homo sapiens
tcacagcacaaagcagtcatcagatatcagtagatcaaggggaaatgggctggcacgtcagtcagcgttggtcaggttcatctgtccagtggcatcagagaccttatacagagctgcgggctgggattggccttgtcagcggtgaggtcttcctcagggttgccctccttcag

SEQ ID NO: 647551 - DNA, 293 bp, Homo sapiens
cggtgcagtgcgccagcccgtacgagggcaccgacggcaaccagttctacgaccaggtcgacatgttcaacggcgcgcttgaccgctacaactggaagctggtgggcaagaaggaattttacctgccgtacaactccgacaagatcgccggcaacaccgtcaagtacaaggacatcatccgtccgaagcacctgaaccaggacctgccgcgctacgagctgcatcgttactgggtggtcgaggccgatctcaagcccggcaccaaccacaccttcaagacgcgccgcttaaac

SEQ ID NO: 647552 - DNA, 717 bp, Homo sapiens
gaaggcctagttctccatccacagaaggctgctcatggaaggggtggcccagaacctgcaagagaggctctgtgagatggagaatagggctactaaagtcaaggaaaaataaagtaacagtcatcaaccagagccatacatatacgtagcataagcagcattagcgaggagggcggataacagagaggactcaagcaccggaacgtccgggaaccaaacactcataaaaaaaaagggggaacaagagggccatgaacgcccaaggaacaatcacttctaactgaacttaataaacgacataaacaaaactacatccgcacatcacaggatagcacaagcatacacgagactaaacaacagacacacgagactagccagaattagtcacacaagacaatctcaaccatacacgatactacacaagcgaaggagagaatgatacaacgaaagagcgagataaaacaacatccagatagcggacgggcaagaacccagactgacacacccaaacgcgtatactaactaaaaccctacgaacacaatccacacaccacacttcacagcctagaccaacagaacaagcagatgaatcagcatgaaagcaacaccaaaagatgacagaagagaagtaaacaacgtcgacggagacaccacaacacacacacatcataatccacactatgcacaactcacccagaagtaaaacacacaacacac

SEQ ID NO: 647553 - DNA, 443 bp, Homo sapiens
ccacgagaaagcctcttcccatgtaaataaaataaatccgtagaatttattaaatattgtcatattataagtcgggaaaggccttctgaatgcacgtatattgaccaaatagagttagattcaaattatttattacattttttcaacatcgaagttaagtagaatggataaacatacagcagctattccaacattaactatcaaagtagtcttactcggagaatctgctgtcgggaagtcctcaatagccctcaggtttgtatctgacgattttaaagagagcaaagaacctactattggtgccgcatttttaacaaagagaattacaagggatggcaaggtcattaaatttgaaatatgggatacggcaggccaggagagatttgctcctttagcgcctatgtactacagaaatgctcaagctgctttggtagtttttgatg

SEQ ID NO: 647554 - DNA, 117 bp, Homo sapiens
actgttgctagatttcactttgatccccctaaaagaagtcaataaaaatgtattcacccgtgaaatgtgaataacacatcccataatgctgttttagacttgtcctgatatgtgcta

SEQ ID NO: 647555 - DNA, 410 bp, Homo sapiens
  misc_feature (40)..(40): n is a, c, g, or t
  misc_feature (109)..(109): n is a, c, g, or t
  misc_feature (405)..(405): n is a, c, g, or t
ctttggatcatacttccccccagaaggactccctctcctnaccctcaaattctgatccccaacaatgagtttaggcttttgaaaagtaaaagacagggccgggtgcggncaagtaacgccctgtaatccccagcactttgggaggcccaaggtgagtggatcatttgaggtcaggagttcgagaccagccctggcccaacatggtgaaaccccgtctctactaaaaatacaaaaattagctgggcgtggtggcggacacctgtaatcccaactacttgggaagctgcagcaggagaattgcttgaacctggggggcggagattgcagtgagccaatatcgtgccacttcactccgtcctgggcaatagagcgagactcagtctcaaaaaaaacaaaactaaaaanaaaca

SEQ ID NO: 647556 - DNA, 899 bp, Homo sapiens
tccatttttataagggtgggccctttatttccaaggggtctcaagtcagggtccgggtaaccccgggttgcccccccccacccccgagggaaaccaaaacccttcatactcctcagagtgtggggggacacaaaaagaggggggaaagggggggcacgaagaggctcatctatctcaaaataaacacaacaataaaaaagttattaagagggcaaaaatattaaaaaatattgtgtgctttcactatattttcaccacgaaacagcatgtgtctcatccactctctcccctgtgtgtgtgtgagaccttgtgcgaaaagaagagacgtgtggcgcccaatctctctccttataagaagaacgaacgtgtggggggtgcgcttctaaagagatgtgagcaagagagaagactctctcctgtgtgtaaaccaaaccccgctatctcttctatatatatgtgagagacatgtagacactatatcttctaaacacagaaaccacaccaagagtgttgtgtgccctctctacagagtctctcgctgcgcgcgccccacctgtgtgtgttgaaccactcttgtggaggggaggaagtgtctctcgcctctccaaaacacgccgaacgcgttgggtgtcgtcccctctttctccagccgcgtgtctcaccaagtgtattctcttcaagacctctcgccgtggagtactcaacggccccacagaataaacaaaaatagaagcaaaccacccccacaaaacaaccaaatagcaacaacagaaaaaacaacacaaatataaataaaccaccgagtgtgccaaaaaaactcactaactctgggttgaggttactctgtgggcccccacacaattttaaagagcagttttgtgtgccccaacacaaaaggg

SEQ ID NO: 647557 - DNA, 104 bp, Homo sapiens
ggactcatcacatggaggatgaggcaggtagatcacataggtcaggagtataagaccggcctggccaacgtggttaaaccccgtctctacattaaaatacaaaa

SEQ ID NO: 647558 - DNA, 291 bp, Homo sapiens
aaaacacccgtttgggaaggccccaaggtcagtttattaaggaccccccttgcccccccccccaaccatggaaaaacaactggagggtggatggggaggccaaagggaacaattaagggtggtcccaactttgctatttactcggtatgcctttaggacatttttttaccgctcatgggccccagtttcctaaagtgtgaaaagtcaggcccttccctctaactggcatgcaacagccccccctgcctgaaagccctgaggtggcaataaaacatttatgctcaaggggga

SEQ ID NO: 647559 - DNA, 322 bp, Homo sapiens
acttgagctcctggcctcaagctatcctcccagtgcttgggagcctgaggcaggagtatcactcgaagctaggagttcaagaccagtcttggcaacatagcaaaaccccgtctctacaaaaaatatatttttttaattagctgggcatggtggtgcacacctgtcattccagctactcaggaggctgaggtgggaggattgcctgagcccagaagttcaaggctacagtgagctatgatcacaccactgcaactgcactctagcctgggcaacagagcaagaccctgtctctaaaaacgaaacaaaaaaaaaaagtcgacgc

SEQ ID NO: 647560 - DNA, 101 bp, Homo sapiens
aattcaagcttctaacgatgtacggggacatggaacaaatgggatcaatttgtgagttttttcctttaatgataactaaaatccctctaatttcacaaaaa

SEQ ID NO: 647561 - DNA, 1924 bp, Homo sapiens
  misc_feature (387)..(387): n is a, c, g, or t
ttcagtgggtgtagtcgtggaggagagatcgaataagtagggtggtgtgtcatctgtccactagagtacacaccctctcgtgtggtgggtgagttctgttgtcattagtttagtctctctgtgtgtttgttcgtgagcattagtatagtatgtctgtgtttggagcggacacacactagctggggttagatactccagagaggcgccttttttattaaaagaagtgtgtgggacaatatattttatttagagtcaggcggcgctctttctttactcaactgtggtccggcagaaaatagttgccgtaccggattgttggtttgttgcccacacaatatccatcgcttgtggaatagatgggttctttttctccgcgcctctctatgngaataggtttgtctctccacaacatgataaattccccggtgatacacatatcgtacacaccgaccaaacccacgaatattggcgccgccgctgtgttgttcctgttcgtgaggcccaccacgcagtaaatgtaaggcgcccccccacaccgcttggtctgttggggagaaaagcttccacaagtgagtggataccggaggaaggacgcacatgcttgtggggccccgcagaggaaatccttttgtgagaccttgggggcgcccaccgcccgcaagagaagaggcatcgtctttgtgaagccaccagatccacctgaggtgaatacgccgtctgtggggtgaacaacgcaccacgaagattggttttttttgttgcctctccaagagggtatttagtagagaattgtatgtgttgtctggtaacactgttctctattctagggggggaggtgtgcaccaacacaaaagaggcgcctccaaatagagcgcgttcaccaaacaaaagaagggtggttctacacaccacaacggtattgttgtttgggggcgccacaacccactccaacaggatatagactttgtttctctctcctccgcgctcaggatgcccccccccctcgggaggggctcctctggtgcgccccaaaagaggtgtgtggccccacctgggttttattatttgtggagccgccaccaatatagaggcatccatactatacttgcggtttcttcggtggttgtgcaacccctggtactgtcctattgtgtggagcacaacacgcgcgtctctgttgggctctacgaaaaaaaaggagcggtttaccccacgagtcctcactccgcccaactcttgtgagagatatctctcacacacagagaagatattttataaaaaaagaatatgtggcgcccacaacgggagctgaatccctcttatttcacaacagggattctcgcgcaacacagtctcttgatttcaacacagagaccacaattatggcgctctctctctctcgcgagactctatatggagcgctctatatctctggacacacacagagagctactatcacacacccttctctctgggtgtggctcttttggtggtcccacactcattaggtgtgagaagtggagaccacacagggagacttttgtgtacacatgtctcgagaaaggcgtctgttgtgtgtgtgtgtggagacaccacacagaaagccgggtggcgtgtcaccacctctctcccacacatgtcctctggcttggtggcacagagcgaaacgcgcgcggcttctcggagaaaagatttgagcctctaaagttcacttgagcacccaccctgccacaagtgttggcaccatggccgcctttccacgagaccactcggagaggagagaaagaaaagcacactttcactggggcccactgtaagaaaagaacccgaattgcaaagagaagaaagagacgcttaaagcccgaggcaccagattttgccaggttggtggggtttccaatataaagattattttccccctgga

SEQ ID NO: 647562 - DNA, 1002 bp, Homo sapiens
cggacgcgctgggtcgacccacgtcgtcgcgagacgcgtgggtccaggacgcttgggtctgacccacgcgatcacgggtgatgtacagataagcatattatgcgtccggagacaacccagggatatctgagatgtctatgctccgtcgtgactagcacacgagatatgtcacttagtaatgagtggcgaaagtgccgcggctattagacgggggattctgaatggtctatgcgctacgtgtatgcgcctgcgagagctgcgccaagagactattgtgcagattgagaggtgtttggggccacttgggaaccaaaagttatacttgacttgacaagggccactaattttggtgacgtggtgcaccttggcgttgcatttggacacctcagcaaggtggcttgtcctacagacaatgtgctatggggtccattggcgcacgagatggaatcctttaacttgcaacatgggcctcaattatgttgggaactggctagcagctcgtgttgcaactgcaaaattactcagcactaagctttgggaacaaacgtccaattatgggaatttgcgttgccgatgccccacgtggttaagacgctgtataccgaccctcgttggctcataattgatgagcgcgactttgcgaatgcggtccacctttctcggcctccaagaaaagggctaaccccaaacattgggacttaaatctatcacagatagcggattcataacttgggggagattaggcctccgcattagaagccgggcagcaggacattttgttagggcactttgcggaagggcgagcgttatggctactttaagttcaccaccgtcaagccagattcaaaatagcgaagacacgagaagaatagcctcttagcggtgtcaatttagacatactcgctggccataagccataacaggaagagttatcgaaactggcctgcgcaacaggaattagccatttacggcggaaggagaccaaccgaagttgcattatcg

SEQ ID NO: 647563 - DNA, 373 bp, Homo sapiens
tagaggatccccgctcttaggggtagggtcttagtttgtagcgtttgccaaactgtttccagcattcatgagttcaggaagctttgcggggcgtgacaaaactgttgcctgagactcaggggagctttttctttggactctaggcctgtgattaatttctggctaatcaagttaattgacacagatctgtcacagtttctcattgcagggtcaagagttctagaattcatctattctacagttaagccttctccaaagatttgtgcctgcacatcatcatcaagttaaaagaagaaagatcatctttgtgatgtttgggaattgcttacgttaactgccggaagcacatgcgcacgcacacacacgcgaacac

SEQ ID NO: 647564 - DNA, 1074 bp, Homo sapiens
gatccatctgcatgccaagttattggttttaatagcttaagttaggaacaacacggcagtgatatctggtggactcttccccctgaacaacgttcttccaagaagaagtcttatctgatgttggtggccctgatgccttggaatatgtgccaggtcaggagtattttggacatctgcgctttgatagcggagactatcatggtcttatgttcttccaagtcctgaccaaagagcagatatgtacttggaaggcaaaagaccagctcgggggttggctttcatgtcatccttattagcaagtgtggcagctcaggaagagtagcacccttatacagacagtgataggtgtcatggatgttacccttgcgcgcattgcggggatgagacagatgtccaagtctcttgggaactgtcgtttcatcctgatgtagtcgtcttctggaggactaagatcaatagcgagagagcctccgtatggtgctagatgtcctttcggctgcctggagtaagctagattccgaatgatattcacgcgatagtttagccacttggtcccattccgatgctcaaatgtctgcacagcacggactgcatacttacgcgaaggcctataggcaattagacacttcgccatgtacttctcggcgaaacatgctgggcctggactcgtcagaccgcagcaagacccggagtttcccgcatactccgctatggtagagaccgaatttcattggtaacttgttccattcatgcacagtcaaggttacctgattggtcttacacaaccttgtcatcttggccaagtcggacttttcggggcgcgactatgcctcgaatgctaattttacacgcctgctactctcttcaaaattgcctagtcactctcaacgtttatatcggatctttcttctggggcacaccacacggttatgggataccccggagcagcttggatggtaacccaggggatctcggtcttatcaaattctactccgtctagtacgaccaaatcgaccttccatcccattatgtgtgcgtgattctaggattcttgatgccacgatataatacacc

SEQ ID NO: 647565 - DNA, 329 bp, Homo sapiens
ccctactaaaactctacagacaacactcccatccatggctaggggaagagggacacaccattgctgaagtagctctttatcaggtactcatgttgtggctaatctctaatatttaagtggttataaacacatatagaaagcagatgacataaaaatcacatcaccagtgcatttaaatgaaaaccagcatggaagagagaagggaccccttataaaaggcaaaaacgaattggtttccccaagggaagccaccattgaattggcagggaaggagaaggaaaattggttggccaaaaaacctggaggttattcttttcggtgattatttg

SEQ ID NO: 647566 - DNA, 353 bp, Homo sapiens
  misc_feature (44)..(44): n is a, c, g, or t
  misc_feature (176)..(176): n is a, c, g, or t
  misc_feature (321)..(321): n is a, c, g, or t
  misc_feature (337)..(337): n is a, c, g, or t
atcttttccttcctactgctccctgggccagccctaagattctnagcaagagagtattctggccctgtgcggtggctcatgcctgtaatcccagcactttgggagacaaaggcagaaggattgcttgagcccaggagttcaaaatcagccagggcaatatagtgacaccccatctntacaaaaaaatttaaaaatgagctggatgtgtgggcgagcacctgtagtctcagttacttgggaggctgggtgggaggattgcttgagcctgggagattgaagctgcagtgagctcttgatcacaaccactgcacttccagcctngggaaacaaagccagnttcttgtcttaaattt

SEQ ID NO: 647567 - DNA, 1165 bp, Homo sapiens
taaagaaaagttattaccaggtatttggggaggcaggtttacaacactacaagttctggagtttaagaaaggaaagaggaaaaagagaaaaaacaccaatacccagaatttaaaaaaaaaaaaaggcactcatgagttcttgagggagtccattttaacccattgaggaaactttctacagtttattttcgatgtgtgttagcggtggtaccacagtctcgaggtgagattataagtataaaaattacacaagtgtgtggtatatagggcgcttatatgtggagtataaagtgtggcgtgggtatatatgtgaacccatataataatacagaggtgtgtaattttatgtgtgtattatacccacgcgcgggggggggtcttaataaaaccgggtgaacatatgtgggtttaaacagacacacaaaatctctgggaattctccaaaaaagagacacaagtgaaagttttgggagcaattctcccacaccccgtggcccccatattggtgtggataacaccggtgagagggcgccttcttgggggaccctctttaataaaaaacacacaacatcttataaaaccctcaaaccacaaacgcgtggagaaaaagggggagaaacggggcaaccgggggtataaaaacgggggggccaagcgtgtccggaggaataacacaggcagaaatagaggccattcacatttttcgacacgcgaacgagccattggggcagaaaacaaacgggagacaaaaaaaaaaactcctgcgaaaaagtgccacagggggataacggcgagtaacaaccacatcagtaggacacacacaaaggaactttggggaaaaaaatacggtggagaaaacacctgtgggaccccaaaggtggggccactaaccaaacaagtgggacagctgctcaccccatcggagccaaaccaaaaaaagtggggcaaactaaaaaccccccggggcaaaaaacgggcggacccaaaaaaacacccgtcggtgaaaaccacccacaaaaaagcgccgcaacaaaataaaacggtggccaaaactacacccggggtcacaacacccacaccacaagaaacacaaaaaccaacacaaacaacaacaaacaaacaaaacaaacaacaaaaaaaaaacaaacagacacgaacacaacac

SEQ ID NO: 647568 - DNA, 275 bp, Homo sapiens
aggcaggttcactgttgccaggctgtagtgagtggtgcaatgatagctcactgaagtctcaaattcctgggctgaagccatcctcctacatagctgggactacaggtgcgcagcaccacacccagctaattttatttattcgtttttttgacagagtctcgctctgtcacccaggctggagtgcaatggcgcaatctctgctcgctgcaacctccatctcccaggttcaagcaattctcctgtgaaggagtaaataatgtagacaaagggaaaca

SEQ ID NO: 647569 - DNA, 410 bp, Homo sapiens
gtctatcagatttataaaagcacctagtcagaatgcccaagatcctgtcctgaagataccttccatatgcacagttcttctttatagcattaactgtaacagcaaaagactagaaatcatctacacatgcatcagtccaaactggttacccaaattatggcatatttgtacaataaatcagcatgtatcttttaaattaaattatctcctcaaaaaatatgacagctctttgggaactgatatgaaagataactgagtcatattttacttaaaaaaaggtgcaaaaataatgtgtacaggatacacgtatgtatagaaaggttacacaagaatgtagttgggtggctagaaggaatgagaaactttttttttgctggttactcccttttgcactttttgagtcttgctct

SEQ ID NO: 647570 - DNA, 289 bp, Homo sapiens
acttactatccaactgatcaataatgccttttatctgattcatcgaggcgcttcctgtccacccgcgtaatctgccaatattttcccacccataaggtcattgctgtgactgccaggacaaccactaatttgttgattttcatatagcctcctttctatttgatggtgattacattcacacaactttaataaagtagcggcctttctccatatagtcaattgaatcttattcatttccaaaaggtataaaatgaatttcactcacttaatgtaagcgctaacaaatgtt

SEQ ID NO: 647571 - DNA, 364 bp, Homo sapiens
aggcttttttcaagggcgcatggtccaacgttctcagaggcatgggtggcgcctttgtgcttgtcttgtatgatgagatcaagaaatacacataattatgtcctaggtgttctccccgagaacaggcatgttgtataatataccatatcttgaacattctggacagattctctgggcttgtctgttttatcagtggcaactatttaccagttgaaaagtgggaagcaataatattcatctgaccagttttctcttaaagccatttccataatgacaataatgatgggactcaattatattttttatttcagtcactcctgataataaaaaattgaagaaataaaaatacccaaaaccaaaaaaa

SEQ ID NO: 647572 - DNA, 751 bp, Homo sapiens
  misc_feature (369)..(369): n is a, c, g, or t
cggtttactggaattgctctggtgatcgagggatcctattacaccgtaatcattgtctattactgtccgtataactggaggggccgtgcatggccactgaatggtgtgaacgaatgtttgtgttggaccattcgttgacatacaggtcgcttcgtggatccaggcccagatggtgagtcgacggattttctcgaggaagatactatttcctcagtgtgctgaccgcgtctgtgacatcagggtctcgagtccgcgtgcctcagtcccaactggatcgtgccatatccaggttgccctatgacagccatacaacgattcgcgcgtctgaaaccgttgtacttgaggttgagacgggaatggtccggcaanggaatgccaatacccttttaatattcgctttccattgagggccgatggtgggttgggcaccataattccgtttccttttgggttaagttggaaggaaaccatcgggagttcttttgaggccccgtataaagccttataaccaaccgtggtaggccgccatggttccgatgtggttacgggcgcgattagaggacctcgcggagattaagccctatttcaacacggcgcgccttttaccaacttttgtttgcccttccctacgttaaaggcaataccctttcgaagtttcggtggcttgggctcaccccaaattggcgttgggaactcgtcggaagtgggacacgttttttgttgggggttccaggttggggtcaatcccctg

SEQ ID NO: 647573 - DNA, 430 bp, Homo sapiens
ctggcatgcagcaacacttctggccatcttgtgacgggtcacagtagtaaatgaaatgatgggacagagtcaccagtgccagccatctgcattgtggctgctgttccagtcacagctgtgacactgccagggtagatcctctgagctggcaattctaaaacggtagatgtatggcacgtaaccctaaattgaaatgactctgaacacaattaaaaagggcatacagacgagctgcaagcactggaacaaagatcattcaacccccgacaagagtcataaccacagctgactcttagcttcacaagcagccctcagaaggtggtagctatgtattaagcagcaggcatgcagacaccatgaaaccaaaggacagggccagtcagggctggagtctgaccagaaagttccatgccctctgctttctgcatgg

SEQ ID NO: 647574 - DNA, 177 bp, Homo sapiens
ggcattttccagagattaatggagatgcttgtgaatctatgtatcattgaatgattgttagctaactagcacctatggcaaagataacctttaactagagaaaatgcataaggaaatgaaaagcatttgccaaatggaattagtgtaatattttgttgaagaaagttttaaatgaat

SEQ ID NO: 647575 - DNA, 638 bp, Homo sapiens
gagactggcagccgactctggaacccagattgttgcttcccggtctagtgatccttcctccataatctgatactcccacacgggtatgtactgaaacaactacgtcagttacatgtgaattgggaggtatccgagtgcccttgtcggtggagcgacgcaggactttctggtagttggcgcgactaaaaatcgccagtagaacggacatctcaagcacctacctcaacaagtgacctgaaccaacaaagcgtacagaactttccccatctacttacatagacaaagacactccagagcctcaagagagaatggcgggactctaggcgctcgcacgctcattgcacactgcggctgccactcttccttcgctgaaccgaccatctacgagcaatccaagaggaacccaatggcctccgcgcgcgacacgcaatacgacgagcaataatccacatctacccggcaaagcgaactgctgagagttccaccaaacagtagccgaataaaagtccctcaaacgcccaacgtacacactcgccgacgaccagctttcacaccaaccgtgaccgccccacgctatcccgtcagcacggaggcacaatcgcacgaacaccagttgcaattagcgcgggcaacaacac

SEQ ID NO: 647576 - DNA, 312 bp, Homo sapiens
ggtggacggagtgacagagaacttggttaaatagtgcaaccacttcactgaactcaagggtggtttctcagtattcaaggtctgctttctccaaggagtgtaaatgcagtgatgaaagtgatggacccagccacagccaccagtgtagatcttagagatataaaaatagtaaagaagctgggggggacaatggatgacggtgagtggggggaggggcgggttctcacccaaaaggtgtcaagttcgggcataaccagagtggagaaggccaggatggggcttatccagtttggcttatcgggggtaccgagc

SEQ ID NO: 647577 - DNA, 612 bp, Homo sapiens
  misc_feature (13)..(13): n is a, c, g, or t
  misc_feature (67)..(67): n is a, c, g, or t
  misc_feature (81)..(81): n is a, c, g, or t
  misc_feature (95)..(95): n is a, c, g, or t
  misc_feature (98)..(98): n is a, c, g, or t
  misc_feature (183)..(183): n is a, c, g, or t
  misc_feature (243)..(243): n is a, c, g, or t
  misc_feature (264)..(264): n is a, c, g, or t
  misc_feature (302)..(302): n is a, c, g, or t
  misc_feature (327)..(327): n is a, c, g, or t
  misc_feature (450)..(450): n is a, c, g, or t
  misc_feature (491)..(491): n is a, c, g, or t
  misc_feature (573)..(573): n is a, c, g, or t
tccgctgccaggntatcgtcccgggaagccccccaccccctcgctttcctcctccgctttccctaanccgtctcgcggggncatctacgcctcgnccncgccctcctcctcctcgccctccccttgttcgtcggccgtggcgtcctggtactgctggtactcggccaccaggtcgttcatgtngctctcggcctcggtggcctccatctcgtccatgccctcgcccgtgtaccagtgccgggnggccttgcgccgggacatggncgtggactgctcgggggtgcgcttggccagctcctggntggccgtgctgttgccggtgacggnggccggcatcttcgggccgcggggcggggtgtcgcacacggccgtcttcacgttgttggggatccactccacggagtagctgctgttcttgttctgcgcgttgagcatctactcgtccacctncttcatggacatgcggccccgggagatgggagccgccgtcngtgtgcggggtggcgcgggtcgcaggcggccatcatgttcttggagtcgaacatctgctgggtgagctcgggcacgtgagcncccggtactgctggctgccccggctggtcaggggcgcga

SEQ ID NO: 647578 - DNA, 532 bp, Homo sapiens
gcaggtcaccctgtcaaatgcccagctgaaagcattcaaatgatgacggagaaggcgagagaagccctcagacagcagaagaggaaagcaaaggcctcaggagagcgttgccatgtggagccccacccagaagctatctctgcggggcctacccctacgtcctaccctgtccatggccagccatggtgaccacaccatgggcttcgtaggactggtcccaggtatccgctagcgcgagctccaggactggcagcaacagctggtcaacatctcgtgccatgaggaacaataacggatgcacctgtggaccatctggggactgatgcactgctatgactccagtgcccccccaaaggtacgcaggtaccaggtgctgctgtcactgatgctctcacagccaattctcaaacgaccatggtgactgagcgggcagctcatgcatgcgactgatgggcatgcggggcctgacaggtggacaagcatcctgcagacaggatgatgccactgcgtgggcaagcctcatcctaccccc

SEQ ID NO: 647579 - DNA, 469 bp, Homo sapiens
tccttgatgtatagaatctccttgtaaaataaataattgcattgtatatcagtcttcccatcaatattaattattaaatattttagaatttttaaataccaactatactattctggtgtgaggtattttcttttacattacactctatcccaaaagattaaatccagcttaaaaatgatatgtaagccaggtgtagtggctcacacctgtaatcccagcgctttgggaggacaaggcaggcggatcacctgaggtcaggactttgagaccagcctgaccgacagggagaaaccccatctctactaaaaatacaaaattagctaggcgtggtgacacatgcctgtaatcccagctactcgggaggctgaggcaggagaatcacttgaacccaagaggcggaggttgcagtgagctgagatcgcgccactgcactccagcctgggcaacaagagcaaaactccgtctcaaa

SEQ ID NO: 647580 - DNA, 446 bp, Homo sapiens
attgcaggcaagttcagtgcaattcaagctcaaatcctataaaagactatacccaagagtaccagaaaaacagaacatttccaataaagtggagatggtgcatgaataacagggggtgacgttctgcagttctggaggctggaattcctagaccagagtgtcagcacagtcaacttctgcataggagctgaatttcctacattcgaactaccactctttacttgatcttagccaaaaggcttagagatgatctctccaaaccgctcttgtcagaatctgcctgggtgagcctttttgaaatatatctcctcggctccttctctcctctagacaccaaccgtttattcttaaggcctgggcccaaagctctcatctgttctgtattctgttatttaatatccacaaggcttcattgctaaatattctacttgttccctaccatcaaa

SEQ ID NO: 647581 - DNA, 452 bp, Homo sapiens
aaactttaatttttaaacctaagtgatgatacagctcttcccttagattatcgcccagggtggagtgcagtggcatgatttcagctcactgcaagctccccctcctgggttcatgccattttcctgcctcagcctccccccgagtaactgggaaaacaggcgcccccccccatgcctggctaattttttgtatttttagtaaaaatagggtttcatcatgttagccaggatggtttcatttttattctttaatgagatcagaggggaattccccaagaaagacctttgctgttcccttgtgtcatccaaaaactgctcaaagctcaaaattataaaagggttttgagcccctaaagatttttaatttgcttttaatccctgaggggggaacatcatgagggaaaatttgattttcaaagttagttaaataaattgtatgggcttttccacca

SEQ ID NO: 647582 - DNA, 323 bp, Homo sapiens
ccctacaacttcctgtacttaattccttgttatctgatccaaattttatattctcctcccccaattttctccctttgtctctctctcctttattgattcttactactacactacatgatgtactcataggaaagaatgatgctcaaataaataaaatgttctttacatatcagaaatattattaaccagctacttccacatgccctaatctagtgttcaattcactaaaagtttcactttacagattttcaactgatttccacatcttagtatctctcttatctctatttcgagatcaaggtcattaaaatgatctaggtact

SEQ ID NO: 647583 - DNA, 166 bp, Homo sapiens
  misc_feature (20)..(20): n is a, c, g, or t
  misc_feature (134)..(134): n is a, c, g, or t
  misc_feature (146)..(146): n is a, c, g, or t
gaaactaatcaacagagacntgagtgtgggtctcccgatcagcattggtaacttttttagctgttcatagattaaggaaagacttccttgtcagtgaaaatcccaactattgtcaattctgcaataaaacgcanatcagttcttancttggtgatgttggtgtttt

SEQ ID NO: 647584 - DNA, 333 bp, Homo sapiens
tttgcccccatcctttttttccagggggggggccttttggggggggggcccccccaggtttttttttcccccgggggggggtttttttccctttggcccctccccccgggcccggaagaaccccttttggccccttaccccccccccccggggggggggacaaagtttggccccttccccttcaaaaaataccccccaaggggaaaaaagggttttcccttcccccggggtttttttttttggttttggggggggggggccccttttgttaggggaggggccccttcccccaaccctttttttgggggataaaaatttggggttgggggggga

SEQ ID NO: 647585 - DNA, 929 bp, Homo sapiens
  misc_feature (373)..(373): n is a, c, g, or t
gggcggcggcgccgcggggcaaatctgaatgcggtgcggagacatggacgtctgcttgagattcaagacattttgaatactgcttagatatggaacctctgtctatttgtgtacggctttgtgaacaaggcaattaccccagaagcttcatacatcggttataaaaggagcttcgcaaggcttcctgcacagccactgaaggcctgctgcaccaattaatgacaagctgacctttctggagaactctctgatgccgcattctgtcacgctctgcaaccaggctcccgacagactggcatttgctcggttgaacgaactgtaccacgtagaaaattcactggcattgccacgccagctgtacccaccaaacttntctaccttttttaaacacacggaattaattaaaacactcataggcttttataaacactcaggtggcaaacgttgcgcttaacaggagaaggaaccctatcagcattgtggttcccatccaccatctttattcacttttttttaaacaggctctaattgcctttggcgcattggcctactggtccatatttaattgtatcccctctatttaataaggctctgaatagacttttaatttttctaaaggcagtcgtgttcttatacaggaatgtggcaccatctgcttgttcccaatggttgcaagtataggttggaaaccccatccagtagtacttgtgtaacgtacggttattgcacttgttgaccatttcaccattaacaaacctttactttcggcacttgctattgccttactaacttgtggactaacaattggtagtggcggtgacaagttgaccagggatcgccaccacttgggcatttttattcaggatcattatggtttccgacctggctttgcaacaaaagcggaaccatttctgtgtccactcttgaca

SEQ ID NO: 647586 - DNA, 288 bp, Homo sapiens
tccctgttggaggagggcttttggggggccataaaaaacaagcaggaaggaatttagtaggggccaaagggggttttgtttggcctgtgagccccgttcctacctgggcctgaccctccggttcaggtaccacaccgaggaaaggggccggtcccaaccatggccccccttggggccacccctcaccctgacaccgaggtgttggccccccctccccctgacaccgaggggtcctggaaaaaaattaggttttatattcctaaaaaagtaaagggggagagacctgga

SEQ ID NO: 647587 - DNA, 762 bp, Homo sapiens
gagcggagggacaggcgctggtgcccatcctcgccgggcgctgtccgcccgcactgcctgttccgacggagagacccgcagcgctgaccgttgcttcccgttcatccacgcttcgccaccactcgtgtccggtgcaggtccatcaaacgatctgtggctgcatggggaacgagggggacacaattccaaccaggtacaaacctggtcagacggggcataatccgcatgtttaccctgggcgaagaagcccgtgcactgaggtcgtctcggggaaacgcagagcctgacgtgtgacggctggaagcgacggatcagtcacgtggtgcacgtccgtccgtggtgctgtgcaccgtgagaatgatcaggactgagtccacggtcttgtggagatgttcgacgtctctgagatgggatccaacggtacgtgattcccgaatcgtgggagaactatcaatggtgagacatgtggattaggctcagacgttcgtctacaaaactgagtcacatttggcgtggacgagcgtgcacaatccaattggttgtatcctaaaataccaacgatctaacatagacccaaggagtttccccaggttccacatgttgatcacgctagcaagggcactgaatttacttagtgtcgcacgaggcacttaggcaaaggaagcccatgacaaacttccgatggctaccatcaataaactcaagtgagccgtaacgtagcaccggttaaccgagaaatcaccaaacttgacgacaatgcct

SEQ ID NO: 647588 - DNA, 163 bp, Homo sapiens
gggtcatagtggatttgagcaggaagatgaaaatacggcagttacaatagttaccgggacagagaaatgcacactatgtatcaaatagcaagggaaatgaagcaagattataacacagtgtggcaacgcacgagcaagtaaccatgagagtaacatgactttg

SEQ ID NO: 647589 - DNA, 205 bp, Homo sapiens
  misc_feature (14)..(14): n is a, c, g, or t
  misc_feature (159)..(159): n is a, c, g, or t
  misc_feature (195)..(196): n is a, c, g, or t
tactgctacttgcnttgtggtcatcgataatttccataatgccttccgtggagggggctccctgcctgagagcctgcggggggtccaggagctgacaggccgctctgtggagtttgcggagatggacattttggaccagggagccctacacgcgtctcnttcaaacaagtacacgctttactggcggtcatccannctttgcggg

SEQ ID NO: 647590 - DNA, 686 bp, Homo sapiens
aggctgtctagaggatcccacagcagctatccaagtctttgctattgtgaatagtgctgcagtaaacataacgtgtgcatgtgtctttatagcagcatgatttataatcctttgggtatatacccagtaatgggatcgctgggtcaaatggtatttctagttctagatccttgaggaatcaccacactgtcttccacaatggttgaactagtttacactcccactaacagcataaaagcgttcctatttctccacatcctttccagcatatgtaggtaagttcttaaatagcaattttattttgagatggagtctcgctctgtcccccaggctggagtgcagtggctccgctcactacaagctctgcctctcaggttcacgccattctcctgcctcagcctcctgagtagctgggactacaggcgcccgccacgcccggctaattttttgtatttttagtagagatggggttcaccgtgttagccaggatggtcttgatctcctgacctcgtgacccgcccacctcggcctcccaaagtgctgggattacgggtgtgagccaccgtacccggccatagagcagcctcttccttttcctgttgggtctctgctcaaatgtcatgtcagagaggcagacctctggggcggtctatctgagggaatgcacccaatctccttcctctgac

SEQ ID NO: 647591 - DNA, 277 bp, Homo sapiens
cgattaaaatacccggggtttttaaaaaaaaaatttaagggggggccttggggaaaaaattatttttttctgaaaaagggtttccaacccaatttttttttttccccagttaaagggaaaaaggggtttttattttgggggttttaattgggtaaacccccccctcccctgggggaaaaaaggtgtcccgggcccccttcccgggacttttttttttttttaaaaggaaaaggatggggttcaaaaaagggttcccccctaaagttgggggttttta

SEQ ID NO: 647592 - DNA, 466 bp, Homo sapiens
  misc_feature (9)..(9): n is a, c, g, or t
  misc_feature (416)..(416): n is a, c, g, or t
ggcacgagncatttctcctcatccttcattggctcccacggacccccagaacatcttgacctctaccgtgcaattcacgggagctgcccgggcacgaaaagcaatatcagcttggagaaacacttctcaagcctgccgacccggttgcacgttcattcttgcattgattggttcgtaccctgtgtactgagcgcttagccctgtactccggctccttttgaggccctgtacttaagctcaatagtcccacaacagctgagagtgtgcggtctagtggggaaggaaaatgcagaaccaaccaactaggtgtgatactatgtggtttagtgaccatgcagaagaccgtcccccagaacagcataaaaagaaccttttggttagggctgggggtcagcttcacagaaggtaacaacggncggtgaacagctcaagcaaaggtcccccagcatgatcccagcctttgtca

SEQ ID NO: 647593 - DNA, 829 bp, Homo sapiens
  misc_feature (337)..(337): n is a, c, g, or t
  misc_feature (759)..(759): n is a, c, g, or t
gctgtccggtgaacgtccttcatcctgtcctgtggtgccatcttgtgttggcctctcatacactcatcagggagcacggctataacagaacttctatcatctctagtccggttaccaggtctgtccgtaactaagacacatgtgtgcatgcatgtgacttggaggttggaaggaaaggcggtcgatgttggagacgaatctgtctgtcggtttgatgaccaatgagatatggtgaacgagaggatggaggattgttgtcccaagatcgtcatattcgagctggggcaagcagtagcacgaggatagctagtgctctcatattgaatgctcacattangaccgtgactgaatttggaggggactattgtactcgtataaagttactcacattacaagtccgtgtccggctcgcttctacaactacttaattcattcctggttgtcgccttcgagtgtgtacccttgatatcctaagggatgtgaagcagggtgtttttgggcccattgcaatgatgtgaagtatacagacaactttggttgtcccatactcactatgccattgggatcgagagatgctagatgcaatacactttgtattgtgcatgtatactcttaacttgtctatcttagatggagaagagaatagtaaactggagaataaggtgtaatatacaagactgacctgtacatagagggcataggtacacaggtttaagaaatggggcagaaaggatcaagctcattttcctttaaaaaggncgttgttatgcttgtagtcttgaaatgataatatacatagagactcaattgagtggaagtgatgcggaaa

SEQ ID NO: 647594 - DNA, 113 bp, Homo sapiens
tgtgtagtaagggtggaaggtgatttatcggaatgggaggtgattcctagggctgtacaaaggagggggacccaacccctagtccagacaaaggtccctaaggcaggtgtaca

SEQ ID NO: 647595 - DNA, 364 bp, Homo sapiens
  misc_feature (364)..(364): n is a, c, g, or t
gtacgatgtcatgaacagacagaatccgtagagtcagatgaaggcctactcctctgtattatagaaacaccatcggaacgatgtatgctctcagtataatgctgatgcatgtgcatgacgcagattataaagcccaggcgtgattcaagggagagcaggccgttgatcgacgacacaatgctgtggagacagcgtggagcgatgacctgcacatttcgcatgctacctgtagcgacaaaggcaccttaacgagatacagatgcgcttagatgatttcatacccagactatagcagatcctagcagataagatgaatgcatccatacgagctaggtatcacgaacgaagtggtccggacgcattn

SEQ ID NO: 647596 - DNA, 417 bp, Homo sapiens
agtagaggtgatagagcaaccgactgagggggaaaacaatacgatcacatgcgtgaagacatcgatgactaagcatggtaagtgcagaaaatgggtcggtccttacagccaggtagatgagggtatctgacctgtgccccacacagatcagcttggcaatcagaagagcatgtgactgaagtcaccttctgaattctatggcccctcatctgtcaagtgtaccatatagttgtaatgagtcaagatctattactacttagtaaggtgagctcgggtgcagtggacaaatttgaaagtctttgactgtaataggcaatgcttagctaggatattgttatataatattccctaacactcagtataaaagcaaatctgaatgcaattaagctcttcaaatcaaatgcctggatttatttc

SEQ ID NO: 647597 - DNA, 275 bp, Homo sapiens
tacggaaagtcgagtgggcaaagctgtggcatgggaatcttctcaggtgaaccaggtcaaaagatccaggggtgccgctctcggtgggtgatcacaccaattcttcctaggttagcacctccagtcaccgtacacaggttaccagtgtcgaacttgatgaaatcagtaatctggcgagtctccaaatcaatctgaagggtatcattcacctttgatgaggggatcggggtagcggagggggcgggcatcatgagtcaccagatgagggattcctt

SEQ ID NO: 647598 - DNA, 669 bp, Homo sapiens
ggcggactcggtggctagccgatgaggaggccgggggggaacccggcccccgggccctgagagcgactgagcggagcgatctgcgcaggggccggggagtcatggtctccatcacccaactccatgcttcagagtcctgctctctgttcagagctcccctgctcggctgtctggcctggctgtctgatccctccagtacaggcctgcgtgctttggggcccagcaaatggggggatcggcctgttggaggaggccccagtgcgggtcctgtgcaaggactggagtggcttctggacaccgaggcgaatgagccctggggagctgctgcggctggctgtggccatgaagccccgaggcaaggtgcgcgcccagccatgtactcggtgtgcgttcttcgtcgtctgggccaggctcttggggtgtctcgggcacggacgccctcctgtggcattgctgtgtcgacgagctgcagggagcttgagtcgatgctccgatctatccgaagactgcgctctcctttgagcattcacggccatccacgtgtgtctggaccttgcaggcttacttggctttccatctgatggtcccctggtgtgtgccctggaacaggagcgaaggctccgtctccctccgaaggcactccccctttgcagcccttctccgaggtgg

SEQ ID NO: 647599 - DNA, 158 bp, Homo sapiens
ccctgactggtcacacgctgagctctggtcataagctgagccctgatcctggtcacacgctgagctctggtcacacgctgagccctgaccctggtcacatgctgagccctaatcctggtcacgcactgagccccaaccctggtcacacacgggtaccg

SEQ ID NO: 647600 - DNA, 298 bp, Homo sapiens
aagatctcactctgtatctcaggctggagtgcactggtgccgtcatggctctgcagcctcgacctcccgggctcaagcgatcctcccaccttagcctcccaaagtgttagggttacagacatgagccactgcacttggccgagagttatttttttacaaaaatgggatcaagcccagtgtgtgttgcgcctgtagttccagctacttgggaggttgaggtgggaggattgcttgaggctaggagtttgagaccagtctgggcaacacagcatgactctgaccagtctgggcaacacag

SEQ ID NO: 647601 - DNA, 222 bp, Homo sapiens
atccactgtttcttttaatatgaatttttagtaagatgggcgtttcaccatattggccaggctggtctcaaactgctgacctcagggtgatccactcacctcggcctcccaaagtgctggtgattacaggtgtgagccaccgcactgggcccccactgttttttttaaattgcatttttagtagagatggggtttcaccatattggccaggctggtctcgaa

SEQ ID NO: 647602 - DNA, 1021 bp, Homo sapiens
ggcgtcttctgcgcgccggggccgctctccttccgccggtgccgcggcgcctcatggaagccccggagggcggcggagtggggggctgtagctgcggggcccggatgggcagtcggcgcccgaagtcagcgctgcacttccgaggtggcgaggttcatcatggaggctggtgtctcgctcgggctgcggtccattccccaggtcgtcgcagcatgcgttgcagccatttaccactcaacagcttctctttgccgacgcatcaccctgttcgcctagtgatccttacctgattgccactgtcttcaattgtacttggccgctgcgaggtgggagagcacgcacctgcggactcgtgacatccatcaatgtgtgcgactcaggtactttaaccccaagtcggtgagccccctggaatttggactcccgccttctgggaactccgggaacagcatcgtgcagtgtgcgcttctcatgctgagagttctgcgcttccaggtctccttccagcatccacacaagtacctgctccactacctgggtctccctccaggaactggctgaaaccgccacagttggcagcggacccctgttgccgtccccgcctgggccctgctgcgggacagctaccatggggcgctgtgcctccgcttccaggcccagcgcgatcgccgtgccggtgctctacctggccctgccggtctcggagttgaggtgccgcgcaggtccacgctgcacgcgtggttggcaggtgttcactgcgccttccaagcccatcattgctactctggcgctgcctcatacggtttccctgggcggagtccctaggtctggccagctgcctaggagccaggtgcgtccgggcctgccccgtgccgggtggccccacgtgagctgtgtgcgcgcggcgcacacgtcgtcgctcccccaaacggcagtgtacgcccggcacattgtgcccgcacgtcttgcccgccgcccacctgcatgttcttttctttctttttcctcgctctcccccccc

SEQ ID NO: 647603 - DNA, 185 bp, Homo sapiens
gggaaacttagataaaattaactaacaccttgcattacagaattctcagtcatgctttcatggctcagacctgaccagagactgtttctgccaagttgagatctcccgcgagaaaacatccaaaagttttgtcattatctacctattgctcggaaatggtttattctgcctgctaaccactcaca

SEQ ID NO: 647604 - DNA, 107 bp, Homo sapiens
catcaggtgtggctatcctcctgatcctccatcccttctactctccctgcttcctccttcacttgtcatgccagcagccctttttttccagaccaagggctgtgaac

SEQ ID NO: 647605 - DNA, 1690 bp, Homo sapiens
gctctgcacccatggcggctgcctgtcaggcatggtctgctccgcatcggtcgggtctgcccgcactatgtagaggtgccattccgttggtgccatttctgcctagctgtaggcctcgaggccttgcatgtgatgatgcgaagaatctgcacgcgtttgatcaagatattactttgttgttctcgggttgccacgtacaagggacagacaagttcattccatggctactctatgctctccttcgactgcgcactgccagccttgctggtacaatcctctatgctattgtcaagcctcttactcttcttaaacgagaggttaacaagtcacggttcctgcttcgagaactgggcactggaacgctctccattgaagcaccccttaaacgtcactttagaatctgaaccttatctacaagtgggagtacaaacttactttccgagtagacttgattttcctttacgtaaatacctttaggcgtaattgtacaatcacctatcggcatggattggtacgcattaatcattggaataccacctctagcgtacagggcagtcttttcaacacgtctttggaacacgaacacaatgcgcccctcaattcccctggaaaacttatttcccaaggcaggcacgtagggtaggaacacacgttggccttgcaaacagcatttgtgttactaggcaaaggaataccattacgaacgcgtggcggaagtttcctcccacaacatctattttacgttcacccaatatcattttggccccgtaggcgcagttcagagcatttagcaaacccgcataaaaagggaacacaatggacaatctggcacgatcgaagcttatcatggccgtgccaccataatcactgtttgacataccccaatttccagcgctaacagtacacgtcgtggcatacagatggaagcacttataaggccgtaatacgcaccgacgcaacttaatatctccacgagagcgataaccattaacagagagcaatgggtagagcatattaggtctcacaagtaaacatcgggcttcccatgggaattcgcatctggacccatccttacgacggccactgggagatccttacactttacgcacatataagattttggtaacccccgcacaaagctgtaggcacggtttaccagctacataagagcccacaattatctatggaaggcaccggattccaaagcgcgaatattactatccaccccaagtgtagtagcgtcgccaagaaacatcaccggtctggcggtacaagtaatcaacacccactctacacggccaatgaggaggtggcataacagcgccgcgattacacaagacgatcatgtgaatagcacacaccacaccttttagcaagagacagacaccgggcacacaatccagcaaacagggcgacctaccccgagagattcccgccaaaagacaacaaaacgaccacgtcacacgacacgattgacccaggaacgcgcacaccgcacagaaacggggacaaacgcgtcgaaaaatgcgccactagtaatacacgagagcagccttctcaacccgtgcaagagcccaaccacacaccccggaaaccccgagcaccataaacccatccaaagagacaccacgtgcaacacagcaggcagtcaaaacaacggcatggcaaccaacaacacaacacaacaagg

SEQ ID NO: 647606 - DNA, 144 bp, Homo sapiens
gtcgattacctgcaggcccagcatcctcccccggtaagggcattcgcctgactcccgtgtactgtggtggcagcagcagtggctatgcagcagtggaggaagtgggacatggagcctgcggttgggaccccacaagaaggaaga

SEQ ID NO: 647607 - DNA, 921 bp, Homo sapiens
ctgacggtttctgagcgttggcctttggcacagcgctacccccttttgctttggttctgccatgccgatgtaccaggtaagagccctatcacgggggcggcgcgcctctccgtgtggagccttcccacctgcatgtaccggctccccaacgtgcacggaggagctacggcccagtcgccgtggccgcggtggccaacgtgcaggattacggggcgctgaagagacatcgtgatcaagcgcaaaacccggggccttccctcatcccactactccctgctaggtgctgcacaggcgtgctctgtgagcatcttcaggctcctgtccacggtgtcacacgctagctcctcggtcaaagagctgtgcctgaaaaccttctcaagttgcttgcaggaccagaatatgatacagccccgcgcgaagactatcaagttggggatccacgtttacgttccggaggatgtgtgccggataggtacgcgggcattaagatgcatgcatccagacgatgttgccccatcgaaggcgacggggaaccatggcgcgtacttggtccttctctgttgggccagaagcataagttgctgtcacggcaagccttataagatgggtgggttagattggcgactttacaggttcaacagagggaagccgtgaaagaagacagccgctgattttcggctccatgaactctgctcttggggaaagaacccttgtgctcgcttggggaatgaactcaccgttaagcagaacgtggtgctgtgggctggtacttaccggagatcggagggtgccggtgacaagtgcccccattgtgccaggtgggtgagtcctttggacccggtcctcttaaaggcgcaaagacttatgatggccgaccacatagggagataacagggggcggccacgcatagaggggggttg

SEQ ID NO: 647608 - DNA, 377 bp, Homo sapiens
gagtcacgcgctggagcatcaggaaaggcaccctaacgataaacacatgttgggggttgcacaggaaataaggtcctgtccaaacataccccagcaacattgattcctggactgtccttcctaccaaggcctgtggctcccacggtgacagacactggaaggcagacatcctgcagtgtctctgcagcaaccgaggctggagatggggcagttaatcccactgtttgccctcaatctcggcctgcaaagtgggtctctatccctaccccacggaccctaagacctaagatcagcccaagatggggggcctccttaaccaaccctgggaatgctaccctacccaggatgtgaagagacaaagagcttgggacacgaga

SEQ ID NO: 647609 - DNA, 352 bp, Homo sapiens
cgtcgactcaaggatcctattggtgcgggggctttgtatgattctgggcatcgatctagtactagttactggttgacacattgttgtgcttgagtgtatatctcgtaattgacattgctcgtggggaataggttatgtgatcaagattacggttagaaccactggaaacaacaaagagacgaactcaagttcaattatcgccttcatgggttgaggcgatgatggaggtggagatttggtgctgtgagattgttttaggtaatagcttttctagtcaggttaggtctaggaggagtaggggcaggttttggctcgtaagaaggcctagataggggattgtgcggtgtgtgat

SEQ ID NO: 647610 - DNA, 231 bp, Homo sapiens
gggaccacgggtgaaggtacagctctgggattacaggcgcccaccaccacagccggctactttttgtatttttaggagagacggggtttcaccatgttggtcaggctggtcttgaactcctgacctcatgatccacctgccttagcctcccaaagtgctgggattacaggcgtgagccaccatgcccagccctatagtagttcttcttttgccccttaatatcctcacccg

SEQ ID NO: 647611 - DNA, 113 bp, Homo sapiens
ccgtaaaattttcaggaccccccaattgttttggattttttttctttcctcttcacaaaccagggttattaaaagtgtgctttctttttaccttatattacagttccaaggta

SEQ ID NO: 647612 - DNA, 124 bp, Homo sapiens
gacgaacaaagaagtcaaccagtaactactactgaatcaagcgcccataatcatacaaagcccgcgcaccaataggatcctcccgaatcaacccgtggacccctaatcatacaaagcccccgct

SEQ ID NO: 647613 - DNA, 110 bp, Homo sapiens
  misc_feature (35)..(35): n is a, c, g, or t
  misc_feature (96)..(96): n is a, c, g, or t
  misc_feature (108)..(108): n is a, c, g, or t
catctcagtattgcctgtgggggccacccctccanccccagccccaagtgccttcgctctgtttttataccctgaattggaggtttattttttccnctatattatctnag

SEQ ID NO: 647614 - DNA, 282 bp, Homo sapiens
tgtggacaagaggctctggatctgcaggtgcccaactcaaagtcatcagcaccatgtctagtggagcatcgaccactatgagattggctgaaatcaagaagcgtgggatccgagtaggctacaccccagatagtcctgaccgatagcaccgccgaactcgcagtctccctgctaattaccacctgcctgacggttgccggaggccatacgaggcagtgaagaatggtggctggccctcgtggcagcccctctggctgtgtggctatggactacacgacagag

SEQ ID NO: 647615 - DNA, 999 bp, Homo sapiens
  misc_feature (749)..(749): n is a, c, g, or t
ggccgccgcgccgccatcatggacaccagccgtgtgcagcctatcaagctggccaggggtcaccaaggtcctgggcaggaccgggttctcagggcacgagtgcagcgcaggtggcgcgtggaattcatggacgacagcgagccgatccatcatctcgcaatgtaagaatggctcccggtgcgcgagggcagatcagatgcattcacccattttggagatcagagcgaagaatgcccggacggtttgcgcatgacgtcttggcatgtctcggcgtgggtcgttgcgagtgtcaggggttcagacgcatcgttgtggcctgatgggaaatcggtcatgtgcgagcaattgcttgctcctcttttgtattggttgcgctgccgactaccgtacatctcgagcatgcgtccttgtagaatagagaggcggtctgctgtttcgaagtcaaggaaatcagtagaaaggggccacaaaatttcctagagagggcgatgaaaagaatgccgagaggtgagcgagaggacaaaaaagggggtagttggacgacgtggggccccccgtgtgtctcctttgaggcgtgtgttcgcctttggcccccatgtgttctcgttgtgtcccacattggggtgggtgcagaatcttagcgcggggttttccctatatatagggagagggtcgggaaatttaaaggtttggcgagaaataaaaggcccaagggggttttaagcccgtttggcgaattttaagtgganttgtggtgggaggagaaaaaaaaggggaaaatagtatggggcttcaccaaaaaccaagcgctcgtgggatgttcccgccgtgtgacaggccccacaaggagaatttcaccgtctgtgcatccaccaaagcggtggggggagaaacaaagctactagccgcatggagcgtttacccccacacaatataagagcgaaagagtccagaactgttgcaaaagtttataggcgatataagagccaccgggggtaa

SEQ ID NO: 647616 - DNA, 173 bp, Homo sapiens
tctagagcagcaatattcaatacaaatatgatataagccacatatgtaatttaaaattttcaggtggtcacattaaaaaagaaaggtgaaattggccgagtgcagtggctcatgtcttgaatcccagtactttgggaggctgaggtaggaggatcatttgaggccaggagtta

SEQ ID NO: 647617 - DNA, 221 bp, Homo sapiens
  misc_feature (58)..(58): n is a, c, g, or t
  misc_feature (70)..(70): n is a, c, g, or t
  misc_feature (96)..(96): n is a, c, g, or t
aactttgaggtggtaacttatggtcctgagctccctacaggattaagtcaaggctggnacttttcctgancttgctgttgcctgacaactactgantccctgtcttgcttacctcatttccttaccaatttctcttgggagcactttcttaataaattacttgcatatgaaccttcatttcagggtctgtttcagaggagcctaagacaatccttattgcc

SEQ ID NO: 647618 - DNA, 184 bp, Homo sapiens
catggatttgctggtgcagtacaactaggcttaatagggacatggtggtgggcgcctgtaatcccagctactcgggagactgaggcaggagaatcgcttgaacttgggaggtagagattgcagtgagccaagattgcgtgttgcactccagcctgggcaacaagggcaaaaatccgtctcaaaa

SEQ ID NO: 647619 - DNA, 649 bp, Homo sapiens
gaggaactccttctctttttaacccacccttttaaaaaaaaaaatggcaccaaagaaagacgtgaagaaacctgtggctgcggctgcgtgtgccccagccctgtgcacccggcacctggcaacctgcccctgccccaagccaaaacccacaagaagaaaccaaatttgacctctcgtgccattaagatccgagttctctaaggaacagcaggatgaatctcaacggaggcatttctcctgtttgaccagaccaggtgattccaagatcaccttaagccaaggtcggtgatgtccttcgagcttcctgggccacaaaatcccaccaattgcaagaggtccggacacgtcctgggaaaccccagcatctgaagagctgaattgcaagaaaatgtgagtttgaaccaatttcggcctatgatgcaaagccatttccaaccaaccaaggtaccagggcccacctatgaacaactttggtggaaggggtcaggaggtgtctttcgcacacagggcacggcacagggccacagtacatggggtgcctggaaactccgcccaggttcatagccaccccgtgggttgtaacacgatggaaacgaggaaaacagtcgggcaaacccctgcttgcccaggtccaacaagactcaaaggc

SEQ ID NO: 647620 - DNA, 275 bp, Homo sapiens
gatactagacttcctctgataaaggcatagtggatgactactcctatagaggagagttcaacgcgtgtgggaatagaataatctcgtacgcagagtcagaggagaagagacatgtaccttgagcatcgtccttcctctcaagcaagccagaagggtgagagccataaggacgcgtgacggtaagcagatggagtactggtcacgaggataccagacaccactcccaaagctcagacgagccaggttccctttctcttcttccccaggtccttcct

SEQ ID NO: 647621 - DNA, 132 bp, Homo sapiens
gcacgacaacacataatgacccaccaatcacatgcctatcatatagggaaacccagcccatgacccggacagggcccctctcagccctccgatgactccgcctagcatgtgagtgataccactccatgacgg

SEQ ID NO: 647622 - DNA, 128 bp, Homo sapiens
ggagcacaccctctcgcctcagcctgccaagcagatgggactacaggcaatgccgccaagctctgctaattctggtcttacttttggaaaagacgggttttatgtggcccatgctagtcttgacctct

SEQ ID NO: 647623 - DNA, 244 bp, Homo sapiens
gccggcttatctagaggatcccagcgctcagcagtatacagaacgcagtgggcctctgtacaggcactgggaggtgatggtgttcttagagagaagatcactggaagaaacttctgctttattgggctttacaaagctggcaatattacaatctcttgacctcatgtgcaagcagtcatcttcagcattttcccatgcccttatagccaccccaaggggtggattttgccttcctcgagtggct

SEQ ID NO: 647624 - DNA, 130 bp, Homo sapiens
  misc_feature (48)..(48): n is a, c, g, or t
aggtctagcccccgcttatactgcgagaaggagcctccctccaggtantcctctctgtgagagctgaatggttgagctcatgggacaatctgtctccagagaggagctacccactccttctcgcatctct

SEQ ID NO: 647625 - DNA, 550 bp, Homo sapiens
  misc_feature (52)..(52): n is a, c, g, or t
  misc_feature (162)..(162): n is a, c, g, or t
  misc_feature (164)..(164): n is a, c, g, or t
  misc_feature (166)..(167): n is a, c, g, or t
  misc_feature (179)..(179): n is a, c, g, or t
  misc_feature (205)..(206): n is a, c, g, or t
  misc_feature (214)..(214): n is a, c, g, or t
  misc_feature (218)..(218): n is a, c, g, or t
  misc_feature (227)..(227): n is a, c, g, or t
  misc_feature (262)..(262): n is a, c, g, or t
  misc_feature (274)..(274): n is a, c, g, or t
  misc_feature (280)..(280): n is a, c, g, or t
  misc_feature (283)..(283): n is a, c, g, or t
  misc_feature (291)..(291): n is a, c, g, or t
  misc_feature (295)..(295): n is a, c, g, or t
  misc_feature (311)..(311): n is a, c, g, or t
  misc_feature (323)..(323): n is a, c, g, or t
  misc_feature (329)..(329): n is a, c, g, or t
  misc_feature (341)..(341): n is a, c, g, or t
  misc_feature (347)..(347): n is a, c, g, or t
  misc_feature (352)..(353): n is a, c, g, or t
  misc_feature (357)..(357): n is a, c, g, or t
  misc_feature (408)..(408): n is a, c, g, or t
  misc_feature (413)..(413): n is a, c, g, or t
  misc_feature (415)..(415): n is a, c, g, or t
  misc_feature (419)..(419): n is a, c, g, or t
  misc_feature (457)..(457): n is a, c, g, or t
  misc_feature (474)..(474): n is a, c, g, or t
  misc_feature (502)..(502): n is a, c, g, or t
  misc_feature (514)..(515): n is a, c, g, or t
  misc_feature (517)..(517): n is a, c, g, or t
  misc_feature (525)..(525): n is a, c, g, or t
  misc_feature (527)..(527): n is a, c, g, or t
  misc_feature (547)..(547): n is a, c, g, or t
tgctttatacaatatttcaacataaagtccccataacagaaatgtaacaaantgggaatgatagtggaaggattaaagtggcacaaattcaccaaacaaatattaaactacaaatttttcagaggtagattacttttgaagttgagaacaaaaaacagtatnantnnaacctagccggnttccaccaactcagtcattaatttanngggaggcntaanatgtagggntaaatgatattaatatacttagggggaggccaatntgttgtttttcntctctnttngagatgcnagtntaaaacctggtatgcnaattcatttatncttacncgtagacgtacntctgtncaggnntggnatgcgcctgtgcactggtatattgctacatagctctctgataatataatanttatnanttantgccaggttagagtctgagaggttggcgtccatttggntgttcaggcgcaacagnagagtaggcttgggggagggtccatatnggatctggtttnntntccgttgngntggcaatctacttgtgattnagg

SEQ ID NO: 647626 - DNA, 159 bp, Homo sapiens
tacgtcccagtaggcgccaccgcttctgcgacagcacctgacggcgttagtgattgtcgtagctgctgtaggcgcagattgatgaacatggttttgtgttccatgttctgctggaattccgggctggccagataatcggccttttgctgcgcctcggga

SEQ ID NO: 647627 - DNA, 330 bp, Homo sapiens
gagacagtatggtaacagatgggagcaggaatgtgtccagtgccacgcttgcagtgctcttcagtaagccagagagatgtacaatgtctaccaaaccgatttctccaaggcttttgcaagaaatgggatttggtcttgcaagatgaatgagggaagaggtcctcgatggcttctaagagagtcaagcccaatggtcttccaatactcacttgcataaagtcccatctgggtcccccaaatccaggaaggtccctggtggcaggtccccctcttgctctcagggacctggggctcttgaaggtgctggtccctgggaaggaggatcgagga

SEQ ID NO: 647628 - DNA, 3758 bp, Homo sapiens
caaacgttcccaaatcttcccagtcggcttgcagagactccttgctcccaggagataaccagaagctgcatcttattgacagatggtcatcacattggtgagctggagtcatcagattgtggggcccggagtgaggctgaagggagtggatcagagcactgcctgagagtcacctctactttcctgctaccgctgcctgtgagctgaaggggctgaaccatacactcctttttctacaaccagcttgcattttttctgcccacaatgagcggggaatcaatgaatttcagcgatgttttcgactccagtgaagattattttgtgtcagtcaatacttcatattactcagttgattctgagatgttactgtgctccttgcaggaggtcaggcagttctccaggctatttgtaccgattgcctactccttgatctgtgtctttggcctcctggggaatattctggtggtgatcacctttgctttttataagaaggccaggtctatgacagacgtctatctcttgaacatggccattgcagacatcctctttgttcttactctcccattctgggcagtgagtcatgccactggtgcgtgggttttcagcaatgccacgtgcaagttgctaaaaggcatctatgccatcaactttaactgcgggatgctgctcctgacttgcattagcatggaccggtacatcgccattgtacaggcgactaagtcattccggctccgatccagaacactaccgcgcacgaaaatcatctgccttgttgtgtgggggctgtcagtcatcatctccagctcaacttttgtcttcaaccaaaaatacaacacccaaggcagcgatgtctgtgaacccaagtaccagactgtctcggagcccatcaggtggaagctgctgatgttggggcttgagctactctttggtttctttatccctttgatgttcatgatattttgttacacgttcattgtcaaaaccttggtgcaagctcagaattctaaaaggcacaaagccatccgtgtaatcatagctgtggtgcttgtgtttctggcttgtcagattcctcataacatggtcctgcttgtgacggctgcaaatttgggtaaaatgaaccgatcctgccagagcgaaaagctaattggctatacgaaaactgtcacagaagtcctggctttcctgcactgctgcctgaaccctgtgctctacgcttttattgggcagaagttcagaaactactttctgaagatcttgaaggacctgtggtgtgtgagaaggaagtacaagtcctcaggcttctcctgtgccgggaggtactcagaaaacatttctcggcagaccagtgagaccgcagataacgacaatgcgtcgtccttcactatgtgatagaaagctgagtctccctaaggcatgtgtgaaacatactcatagatgttatgcaaaaaaaagtctatggccaggtatgcatggaaaatgtgggaattaagcaaaatcaagcaagcctctctcctgcgggacttaacgtgctcatgggctgtgtgatctcttcagggtggggtggtctctgataggtagcattttccagcactttgcaaggaatgttttgtagctctagggtatatatccgcctggcatttcacaaaacagcctttgggaaatgctgaattaaagtgaattgttgacaaatgtaaacattttcagaaatattcatgaagcggtcacagatcacagtgtcttttggttacagcacaaaatgatggcagtggtttgaaaaactaaaacagaaaaaaaaatggaagccaacacatcactcattttaggcaaatgtttaaacatttttatctatcagaatgtttattgttgctggttataagcagcaggattggccggctagtgtttcctctcatttccctttgatacagtcaacaagcctgaccctgtaaaatggaggtggaaagacaagctcaagtgttcacaacctggaagtgcttcgggaagaaggggacaatggcagaacaggtgttggtgacaattgtcaccaattggataaagcagctcaggttgtagtgggccattaggaaactgtcggtttgctttgatttccctgggagctgttctctgtcgtgagtgtctcttgtctaaacgtccattaagctgagagtgctatgaagacaggatctagaataatcttgctcacagctgtgctctgagtgcctagcggagttccagcaaacaaaatggactcaagagagatttgattaatgaatcgtaatgaagttggggtttattgtacagtttaaaatgttagatgtttttaattttttaaataaatggaatactttttttttttttaaagaaagcaactttactgagacaatgtagaaagaagttttgttccgtttctttaatgtggttgaagagcaatgtgtggctgaagacttttgttatgaggagctgcagattagctaggggacagctggaattatgctggcttctgataattattttaaaggggtctgaaatttgtgatggaatcagattttaacagctctcttcaatgacatagaaagttcatggaactcatgtttttaaagggctatgtaaatatatgaacattagaaaaatagcaacttgtgttacaaaaatacaaacacatgttaggaaggtactgtcatgggctaggcatggtggctcacacctgtaatcccagcattttgggaagctaagatgggtggatcacttgaggtcaggagtttgagaccagcctggccaacatggcgaaacccctctctactaaaaatacaaaaatttgccaggcgtggtggcgggtgcctgtaatcccagctacttgggaggctgaggcaagagaatcgcttgaacccaggaggcagaggttgcagtgagccgagatcgtgccattgcactccagcctgggtgacagagcgagactccatctcaaaaaaaaaaaaaaaaaagactccatctcaaaaaaaaaaaaaaaaaaaaaaggaaagaactgtcatgtaaacataccgacatgtttaaacctgacaatggtgttatttgaaactttatattgttcttgtaagctttaactatatctctctttaaaatgcaaaataatgtcttaagattcaaagtctgtatttttaaagcatggctttggctttgcaaaataaaaaatgtgttttgtacatgaagtaggaatcgtatttcagcttcaaggttcagattgaggggcccactgtttggagaggatggtattcaggctttctcatgtccttcaaatctgttagcgtttgactctagaaatcaaagcaaaggagtggttacccagacacttcttttggtgtgatcaatgcgctgatgtgatctatgaagatgattcatgcttgaaaactagcacagaaacatcttgcttatttgccaaagctgggagatgagcttctctgcataatttaaatgttcagataaatgaagctgacttatttaagcaataaccttttaaacattttagctaagatgtataaaaatgtttccaaaatataccacatactttatttcttcttaaatgtagtacattaggttacatcatttttcttgctgtcttgggcatcaaaacaggtgccatggtaacctgacactctcaggagacattaagatagaaggggctgttcttcagtggttcccattgattctccccatatctttttgctctcaggctctggccgtctcttcctgagccttaactgtgt

SEQ ID NO: 647629 - DNA, 783 bp, Homo sapiens
ctcgcgcttttggaggtccccatgtgtcgcctagttcatgaaaaggtccttacagtgtctatccgatatggtcaccagagcagtacagtctcgtataggcgactttacacaggaaatataaccagttgtcaatctagaacaagtatcctaacatagcctgtagatcttgccacgtggcctagagttatgtgacaagtcccaaatagtacaaatgttttctcttagaaatgtagtacaagttgtccgtgtcgtagcgttcaatctcgcggtatagtgaacgttctagaactggagaaagcgcgtgttaaaacgcatctgttaggtgttcagttagaaagtctgagagactattagtacataaattctcaatcttggcatgctgtacacgtgccagagttttaggtactgtagtgaccgttgagaagacccttgtttatttacacttgtgaagcactgtttgtgcaaagcaacctttgcattagtataagtgcctgtattccgattcatttacttcatgtccaggggtggcatatttacgctagaaccattgtctactaacgattaacagttaacatgacaaagtgtgtggattttgctttttcaaggaggttcaattaaggcaataagatgtttgatggagaaacctattgtttactgaaagcactcaatgaagtcgaaattactgaagcttttgcatacatcttggtcttttatgtaaagtatgttaaatataacatgtaaggaaaataaacaatattataattatgtgtttgccatgtttac

SEQ ID NO: 647630 - DNA, 113 bp, Homo sapiens
tgctatcatccgtacatcatagcaacatcaccctccttaacctctacttctacctacgcctattttacaccaaccccggtgccgatgaatagcgaggtgccgatcaatagcga

SEQ ID NO: 647631 - DNA, 165 bp, Homo sapiens
cagcaagaatggcatatcagtggaatcatacctttcgggttgctttttaacttatcatagttccacggttggctccatgtgtcagtcagttctgagttctttagctgaatgcagtgtaagggagaacggggttgtgaatggctggcaaattggagcaccaacatt

SEQ ID NO: 647632 - DNA, 489 bp, Homo sapiens
  misc_feature (410)..(410): n is a, c, g, or t
  misc_feature (476)..(476): n is a, c, g, or t
tggcaagtggctcctgactggggccaggcgcgtatcgagtcgatggttgctaaccgtcctgactggtgtatctcccgtcagcgcacctggggtgtaccgatgtcactgttcgtgcacaaagacacggaagagctgcatccgcgtacccttgaactgatggaagaagtggcaaaacgcgttggagtcgatggcatccaggcgtggtgggatctcgatgcgaaagagatcctcggcgacgaagctgatcagtacgtgaaagtgccggacacattggatgtatggtttgactccggatctacccactcttctgttgttgacgtgcgcccggaatttgccggtcacgcagcggacatgtatctggaaggttctgaccaacaccgcggctggttcatgtcttccctaatgatctncaccgcgatgaagggtaaagcgccgtatcgtcaggtactgacccacggctttaccgtggatggcangaaccacttgcaa

SEQ ID NO: 647633 - DNA, 222 bp, Homo sapiens
gctggcgtctgaggctcccgtccattctccaggctctcggtcgggcttgttatccacacatgccatctcatctcggtctgcctttctaccacgtcgcctcttttttttttttttttttttttgttttttttttttttttttttttttttttttttttttttttttgccccccccccgggggggccgggggggagggggggggggcccccccccccctccccc

SEQ ID NO: 647634 - DNA, 692 bp, Homo sapiens
gagactccactgatgtcgtggcgctttaggggaagaagtggtgtttcgctgggccctggtactgaagacgcggtccgggtcgcccctagctgtttcctactcacccaaagccccgacccgccttttctctcatctcctctgcaggatgaggcgtgcaggcctggttgaaggagtacctcctcgcaatctatgggaacgtatggctatgctaatagtgcgtatagtgcctgtgaaggaacgaacaatgagaggctcactgaaagttctgagaagcaagagtaaggtgctataaaatcgtctttccatttgaaataggccatgaagttaaaagccagaataaattattagctgaaatggattcacaattgtgattccacaagtggatttctaggtaaaactatgggcaaactgaagattttatccagagggagtcaaaaaagctgtgtgctatatgatgctgtttactttatttgtcttttatcattatgggattattaaacctgagggtgatgcatgtaatttgtgaatttggaattgtgttccaaattaatgggcttggagtacccacttgtgattaaaaatcaggcatcaaaacattcctagtgtgcaaaatactgtggcatttttccatgggaaaatttggtgaatttggttaatttataaatcagcattagtaataacagggtctttga

SEQ ID NO: 647635 - DNA, 484 bp, Homo sapiens
  misc_feature (29)..(29): n is a, c, g, or t
gcctggcaaggtcccatgcatttgagggntgatgataggattctgatgtgtttggagagcaacgcacattgccttactattgtgagcaatagaggagctgcggggcaagtactccatgaggcagcagcccaggtggtgcagtgggtgagctttgctgattccgatatagtgcccccaggcagtacctgggtgttccccaccttgggcatcatgcaccacaacaaacaggccactgagaatgcaaaggaggaagtgaggcgaattctggggctgctggatgcttacttgaagacgaggacttttctggtgggcgaacgagtgacattggctgacatcacagttgtctgcaccctgttgtggctctataagcaggttctagagccttctttccgcacaggactttcccaattacaagcgctgtttcctcaactgcatttaaccaagccccagttccgggctggtctgggggaagtgaaactgtgtg

SEQ ID NO: 647636 - DNA, 352 bp, Homo sapiens
  misc_feature (131)..(131): n is a, c, g, or t
  misc_feature (138)..(138): n is a, c, g, or t
  misc_feature (149)..(149): n is a, c, g, or t
  misc_feature (164)..(164): n is a, c, g, or t
  misc_feature (184)..(184): n is a, c, g, or t
  misc_feature (209)..(209): n is a, c, g, or t
  misc_feature (223)..(224): n is a, c, g, or t
  misc_feature (253)..(253): n is a, c, g, or t
  misc_feature (276)..(276): n is a, c, g, or t
  misc_feature (291)..(291): n is a, c, g, or t
  misc_feature (314)..(314): n is a, c, g, or t
  misc_feature (326)..(326): n is a, c, g, or t
tgctggtcccaggttcttggtgagggagggctacgctggaacctgggaacctactgggcacctctaatgcagatgagaaaaacttgagaatgtgaaagtagatcagtcccgctcccaccgaagtcagagangcggganattaaccagcngcgcgcgggggtgangtaactaagggcactctccnccccactgcccagggacggagtgcncgacccaagacctnntcccaggccccacacccaacgcaaagcgnaaggcagctacccacagcctgcnccatgacgcaacgangacacgcttaatacaaatatgtnagccgagggggnaggggagtgcctgggaattctccgca

SEQ ID NO: 647637 - DNA, 546 bp, Homo sapiens
aggcattgaggcagccagcgcaggggcttctgctgacgcgggtgcaggcggagccttgacgcgaaaccccgcagactaagttcttttctctctttgaacagatacgagattaatacaacctacttaaacaaatactagtcaatacggttacctacacgactacttcgcttacgcgttacacgctttcttacacccgtacccttctctaactacgcctttaacgactcttctacacgacgaacaccacttactcgaaacgaccctttaccgcacaccgcacggtaccgcccatttggaacgcggccacaaactggctcgcacaaccacgacacacaaacggcgccaaacttcccaacacacaccaacgggggccttcttccctcccgctcttcaacacactccagtcaaagccctcaattttggtcaacccggtgggcacaggcgggcgtctcgggcacacgggcaatttgccaacaaggcccccttatcacctttctcccacatttggcgcctgcctcttacgcacaaacatcagtgggttaattt

SEQ ID NO: 647638 - DNA, 239 bp, Homo sapiens
aataaaggctaagaccaaaacagcatggtactcatacaaaaaaagagatatagaccaaatggaacagaacagaggcctcagaaaataacaccacatatctacaaccaccatgatctattgacaaaccatagacaaaaatacagcaataggggaaagaattcccatatattaataaaatagcgtagtaagggcacaaacttggctcagcccatatagcagcaaaacttgcaaacttggca

SEQ ID NO: 647639 - DNA, 156 bp, Homo sapiens
ataaacctgatgtggggacgatgacaggctgaaaggagggcagggaggccatacgagagcacatcttatcctccaggcttttctctcttaccttccctcaattccttctgttaaatacctctttgatttctccccgattctcagaaattaaaatgg

SEQ ID NO: 647640 - DNA, 232 bp, Homo sapiens
tcgagtcctattgttacacactgaataagccatgataaaaactagcaaccagcttgctctgacagtgcttagtaatgcgtggacttatctcactgaatgcaaccctttgtttgcatcactaggttaaacacactgttgtcgtagcatctattcagcggacatttctgagtcaattgagacctacaatacagaaaacacactattacgtgcatacacattagaagacaagctc

SEQ ID NO: 647641 - DNA, 684 bp, Homo sapiens
ttcccttaacgtaacgggaagtgttttgaaattcccagaagagagctgttttgtaatcaaagtgatggattataagaaagccagactttggaaaaggataattggaataaagggaggtgcttgaagattttccaaactactttatgtcatttagcttctattttctgaagggctttctttggtgccatgtactcagatcagtcagttgacctgaaagatgatcatgttttcttcgtaaagatttaagcaattggcaactacaaagacattattttcttactgatctatatcatgtactgttgctgacattacaaaaagggtctggaagggaaaccgggtcactgttttatcttttttctttaaaatacaaaagtatcccaactaatcatttattatggtcagcttggtttacatgtcccctatcatgagaaatgctatcaaacatctgtgatttcttaagagctttaccccaaattgttactttaattcttggggccctggcggagggggtttttctttttaaaataccattttttattcccccctgggggcaactgggggggggtacctgcggataccaccggatgattcttggagctggggcttctttaaggaggctaaaactctggggttttatattaggtaaccagtttgggaagctttggggcatacttgtcaatcttt

SEQ ID NO: 647642 - DNA, 298 bp, Homo sapiens
cgccttttacactatctacagcaggttgtctggggtaggggggaggcgttttttttttttggaaacagggtctcactctgtcacccagggtggattgcattgcacaacttcacagctcactgcagcctcaaccgggtttcaagtaatcctctcacctcagcctcccaagtatgttgtgccctctaggcacacaccatctatccccggcaaatttttggtattgggtatttttggtaaaaccaggattacgccatgtgggccaggcggttctcgaacacctggtctcaactgatccgcc

SEQ ID NO: 647643 - DNA, 261 bp, Homo sapiens
atatgtataatgtatccttgcttgggggttgggggaatttattaaccattctctttttagaaactttcagtactccgctgaaattccctatctatacaaaatgttattcaccttttctactggaaccttaaacattatttataaaaaggcttttaccaatccttgtcctggtagtttccacaatatggctcactctgtggatcctgcatctattggactattttttccccttcagtcttattattttctggcttcttcctt

SEQ ID NO: 647644 - DNA, 1500 bp, Homo sapiens
  misc_feature (383)..(384): n is a, c, g, or t
  misc_feature (746)..(746): n is a, c, g, or t
  misc_feature (752)..(752): n is a, c, g, or t
  misc_feature (763)..(763): n is a, c, g, or t
  misc_feature (773)..(773): n is a, c, g, or t
  misc_feature (783)..(783): n is a, c, g, or t
  misc_feature (799)..(799): n is a, c, g, or t
  misc_feature (804)..(804): n is a, c, g, or t
  misc_feature (814)..(814): n is a, c, g, or t
  misc_feature (821)..(821): n is a, c, g, or t
  misc_feature (829)..(829): n is a, c, g, or t
  misc_feature (841)..(841): n is a, c, g, or t
  misc_feature (846)..(846): n is a, c, g, or t
  misc_feature (851)..(851): n is a, c, g, or t
  misc_feature (853)..(853): n is a, c, g, or t
  misc_feature (865)..(865): n is a, c, g, or t
  misc_feature (868)..(869): n is a, c, g, or t
  misc_feature (876)..(876): n is a, c, g, or t
  misc_feature (887)..(888): n is a, c, g, or t
  misc_feature (891)..(893): n is a, c, g, or t
  misc_feature (904)..(904): n is a, c, g, or t
  misc_feature (908)..(908): n is a, c, g, or t
  misc_feature (911)..(911): n is a, c, g, or t
  misc_feature (917)..(917): n is a, c, g, or t
  misc_feature (925)..(927): n is a, c, g, or t
  misc_feature (930)..(930): n is a, c, g, or t
  misc_feature (932)..(932): n is a, c, g, or t
  misc_feature (935)..(935): n is a, c, g, or t
  misc_feature (946)..(946): n is a, c, g, or t
  misc_feature (953)..(953): n is a, c, g, or t
  misc_feature (956)..(956): n is a, c, g, or t
  misc_feature (959)..(959): n is a, c, g, or t
  misc_feature (965)..(965): n is a, c, g, or t
  misc_feature (967)..(967): n is a, c, g, or t
  misc_feature (977)..(977): n is a, c, g, or t
  misc_feature (983)..(984): n is a, c, g, or t
  misc_feature (1003)..(1003): n is a, c, g, or t
  misc_feature (1011)..(1011): n is a, c, g, or t
  misc_feature (1038)..(1038): n is a, c, g, or t
  misc_feature (1128)..(1128): n is a, c, g, or t
  misc_feature (1161)..(1162): n is a, c, g, or t
  misc_feature (1191)..(1191): n is a, c, g, or t
  misc_feature (1205)..(1205): n is a, c, g, or t
  misc_feature (1462)..(1462): n is a, c, g, or t
gtcttttctttctcagggtcctctttggtggcagccactccccgagatgttgccatcagttttctgcagtccaaagagggtatggttaggtacgggtcttcctgcctcattcctcttcctctttgtgtaggtttcagccacaaaactgtcattcactctaggggacccctactaaagggtaacttcaggtgtgcagccctgagctccaaggctctgcaccatgccacacacttgctgtaaggctagaagtgaagaccttattaataggagcataattgcgagggagaatcatggttctgcagtctggtgtagacactggaataacagcacagagaaaatctatgactcccaatatcttctagaataaagaattttccctcttnnaccaagggccctccttgtcattgaccttagctaaaccatggcaattcataaatagaggaaacattaatgaattaaagcattccttattttttaactgaatattgtgtacatgtttctatagtcgtctttcacaagtctttgcctcctttttgtgcctttatgtttaatttttcctttgacagatggtaacccttcctggatcattcatttcacatttgtttcttgtttttgttgcacctgctaagtcaaataacaagtgaaagtaaacctaaagttagaaaccaaggtgaaatgaatgatccaggaagggataccatctgtcaaaggaaaaaataaaaataaagaaaaaaaagacgcaaagncttggnaagacactaanaaaatgtacnaatattagtnaaaaaataaggcatgnttttnattcattaangtttccnctatttangaattgccatgntttanctaangncaatgacaaggnggnnccttgtnttaaaggtggnnagnnntttattctagngganatngggggngatggggnnnggngngcngttattccagngtctacnccngantgcggngncatgattctncctcgnnattatgctcctattaatangggcttcncttctggccttacagcaagtgtgtggnatggggcagagccttggggctcagggctgcacacctgaagttaccctttagtaggggtcccctagagtgaatgacagttttgtggctganacctacacaaagaggaagaggaatgaggcaggnngacccgtacctaaccataccctctttggnctgcagaaaactgntggcaacatctcggggagtggctgcccaccaaagaggaccctgagaaagaaaagagcataacctgggaaatgggctacatgggggcaagggacatggtgagcgggcaaagttgagatggtgttttccttgagtgaatgtctttcaaaactaacaacatactgtgtagttgtctaacatgctgatggaggaacactgctgggccctgaaatcctagctttgaatccattttttccctttagtattgtgagtagagggngataatgaccttatgttttccccacgacacaagtcacc

SEQ ID NO: 647645 - DNA, 257 bp, Homo sapiens
gtattttcccccccaaattaaattttttccttttttttaaaaaaatccccacccaagtttttaaggtaaaatatttggctttaatggtattttagcccttgattaatgaaacagggaaatattgatttccagtttgggtcccctaaggacccaattttggttggctttgggaaaagccctttttttaaccaaatccaatattgccccaccaatgggcagaaccctttttgataaaaaaaattggtttttggccttta

SEQ ID NO: 647646 - DNA, 716 bp, Homo sapiens
  misc_feature (383)..(384): n is a, c, g, or t
  misc_feature (695)..(695): n is a, c, g, or t
gtcttttctttctcagggtcctctttggtggcagccactccccgagatgttgccatcagttttctgcagtccaaagagggtatggttaggtacgggtcttcctgcctcattcctcttcctctttgtgtaggtttcagccacaaaactgtcattcactctaggggacccctactaaagggtaacttcaggtgtgcagccctgagctccaaggctctgcaccatgccacacacttgctgtaaggctagaagtgaagaccttattaataggagcataattgcgagggagaatcatggttctgcagtctggtgtagacactggaataacagcacagagaaaatctatgactcccaatatcttctagaataaagaattttccctcttnnaccaagggccctccttgtcattgaccttagctaaaccatggcaattcataaatagaggaaacattaatgaattaaagcattctatttactaatatttgtacatttctagtctctttcagttttgctttttttttttttttttttattttttcttttgaccagatggtagtcccttactggatgattcatagtaacgcggtattctacttgagcattaactgttactgttattggagcatagcaggtgctacataaacaagtaacaaatgtcgccaccctacttcagcagtgctagacgatgtgaacagctntaagtagatacaaaaaaaatg

SEQ ID NO: 647647 - DNA, 678 bp, Homo sapiens
gccttgtttggaggcagtttaaaagcccctaaaggaattaagaggatttcctttttggtgtgtcaggtcccagcctaatgtcaggattatcccgacctttacacgacatggtatgtttagggacgtcctgtcataggggaataaactctcaaagtaatgcctttcatttgggaggagggcacaaaccggtattccccccttttggcagaccaagaccggggttcgcttgacataggagttctagaccagcctggccaactcaacgagaacttgtctctttttaaaaagaaaaaaccaatgcaattcagatctttttcttgatatatggcttagacatcacaatgtaaaaggaattcttctcttacttcaatacaatgggttttaacatacctttaagttcagtccaatatccaatattcaaacccaaaagttgactttggaatggggcctttttcaagtcataaagagtgcttgtttaaggtgatctccccaatggtagttttcacccgtctcataaacagcaagctaatcagtcagacattcttaaatgacgccaattttttcacttaaattgtgaccatgttttctgttttgacaaattttggctaaagcattgtaagagtgttttttttatagcagtaccttgtgtttccccgcctgtccattaaaccaataatt

SEQ ID NO: 647648 - DNA, 1076 bp, Homo sapiens
gctcagcgtgtcgtgtcctgtagccctaatagccaagaatgggaaaggagaaagactcatatctagattgacgtcattggacacgtagattcgggcaagtccagcagtactggaccatctgattctataattgcggatgcgcgaatcgcacggaaagaacggcattgatgaaattgagagacaggcaggctggcgtgcagcattgggagaacgggcatccattcatagatcatagcctgggcgtcttgggagtccaacgtgagcagcgtgcagcagttgaggtgtcggtatcagtcattgatcatctccgttcgtggcaaattcatgagcatccagacaagctactagtgatgactactccatctgattgcaccgcagagacagcaaatgacttataatcgaaagaaccatgagtctacggggcacatctcagtgcatgacatggtgactgctgccgtgagtccgttggcgtatacaatggccgtgggtcgaaagtttgaacgacgggttatctccgagcaatggtgcagaatgtgaaaagcatgcccttctggcttaacacactaggggtgtgaaaagcaaggtaatgcgtcgggtgtctaagctgtacaatgtgattctcgagctggagcacgaaaccctaacagactctacagcagcatatgagggacaatcagtcaaaggggacagttcgacggattgcactattgacaagacacattgcggggtatcgaaaccgcgagcttcattcacccagtatgggagcgcgaaggcattcttgagtagagatatgcgtagaccagttgagtatcccttagttaggacccacatggtggttgaagggcattcgtccgtagcgtgactcatcagaccggaggatctgcccacatgtgtcagctccggtcaaccgcggatcttggtaacataagtcgcagggcagggtaaacccatcagtcacgattaccgtgaggtgccactaggagacactggacattacataaagcaaacaaacactttccggtgccagaattgtgaacacagagcgccttttggcagacctaagcccagctgcacaa

SEQ ID NO: 647649 - DNA, 1210 bp, Homo sapiens
ggaaacccttgccaccgagcgcctggacaaaggcttcaccctggtcgagagggacctcctgctccacccccagtcaaaccacctccttcccctgtgaatatcagaacaggaccaagtggccagtctctggctcctcctcctccgccttaccgccagcctcctggggtccccaatggaccctctagccccactaatgagtcagcccctgagctgccacagagacacaattctttgcataggaagacaccaggcctgtcagaggcctagcacctcctccacccacctcggcctccccatctttactgagtaataggccacctcccccagcccgagaccctcccagtcggggagcagtcctccacgcacactgtgatccgaatggtgccagggatgctccaccgaccggcagcagcaatgagcggagggcagagaccgcgacacaccacgcagccgcacgaagcgccacacaagacccgccgcaccccgccccgcgccaaccaccccagaccaaggcaccgggcagaagagacccctggacaccgcagtggacgacacagacgacgcgaccacccgacaccgcacacaagaccgcgccccaccgccaggcagacaacgacaacaccacagaccacgacccaccacccaaccgcgccactgacgacaggcaccaaccacaaccgcacggacacccaccaccacgacacgcagcagaaacaacacacaagaagccgcaacacgaccagacgacacagaaacagccacgagccgcacaccagaggaccaacgacaaacagacaacagcagaatggaacaccaacaaggagcgcgacagcacagaccagaagcacacggacgagcaccaaccaagacacgaaccaagcacccccacgccagaccccccgcccaccaacacaccaacccaacagcaaccacaacgacgccacacacaaacaacaaccagaagaccaaaagaatacagacaacaaccaaaaacacaggcacaacacggaatcacaccaaccaaaagcacagaacacgaacgacacgccaaaacagcccccaccgacacaacgcacccacggagccacttcacctacggcaggcacgcaacgcccaacgcagacaccaacacacacaaacagacagaacgacacgaccacaaaaccaccaagacgacagccacacagaagacacacacaccacaggcgac

SEQ ID NO: 647650 - DNA, 234 bp, Homo sapiens
cacgagcgcgccaagagcaagagaaagacttgaacgtgcctcctctctttactttgcacatacaacacgcgcaaggcgcgcgcgctgacagcctgattacaatgctaccctatccttctcacataattacttgtcacctctcccctagtgcccactttgtcgctttaaatatggacgccctgtaactcctcattgtaacaagtgctgactccagaccctctcgggtcgctcgcg

SEQ ID NO: 647651 - DNA, 588 bp, Homo sapiens
  misc_feature (1)..(1): n is a, c, g, or t
ngaaggcggctttctcacaccttaattcgtgtcacccgaggtgtgtctcactattatctataagtcataaagtttgacttggacctgtagaggcctattcgtcacatctcttttcaacagtcttgttaatagcttttcaggtttcagagaccagaaaagtcccatggggtggactcccatatattcccctccaattgaaagagcttgattcgggtccacctcaccgatttcattggccatatagtgggcttgagaatatccagtgtctccgttttcttcttccagtaatgcttgaaacctctccatctaaaggtatctcaggcctgtagcttggatatgctgtgcgctcatcgccaagtgccctcacaggggtactgttcatttggatcatttttttagtgtggcacttggaatgattcttcaggattatcttcagcataccctcaacctctagcaagagatcttgcccccaaaatttcagcgtaggttctattttccttaagtgtcgctgtggtctgagatatatagagaaagagcacaaagagagacattcacagctgcgcctccgggggtgatgtcacatctcag

SEQ ID NO: 647652 - DNA, 304 bp, Homo sapiens
aaaatctttaaggaaaaaagctgaagggtacgcccatgcacatatgtgacctggaaaaagcaaatttagatcttttatgaattaaatattaattgtttcccaaagaagttccctccctttgaaattaaaatataatgtataaattttgcactgagccatggcggagctgggcagcccctaggttaaagtggaaacggaggcccaggggcaggggtcacacctcatttggtttccttcccatttcacaggttaggttgtgcttttcaacaccaagtttttaagagcaataaaaactaccccatga

SEQ ID NO: 647653 - DNA, 947 bp, Homo sapiens
ggtgacatctttcggttgctttgccccatcttatcctcgcgtcttctcagacattcttgccctcattctccaggagccaatgcgagactttggctccgagttaggcgagcggcccgagagcttggggtgcgcgaggcaggatcgagagagtggtgatggagatgcacgccttcgaggggactgatccgagtacacctgacaatgcaggaatcatgcaaggaatacttagaggggcctgagacccgtggggtattggacacgatagtatagggcacgcctgccaacgatgtctggactgtgccttgcgagaggtagctcccatccttgtgcataatgaactggagtgatgcggatgctctttctggagcaggctttgccacaggctgatgtagctctggtgcggtacacaagataggaagtcagcacggctcaggaggaaagtgcagggttgctgaacgtggtctccggatctggcgcaccgcagtctgctcgccagcggggtgctcctagtgggctcatcctcaggcccatgtgccgtcagaactccgattgccttctgggtggggggaaggctggtctgatgacacaagtcagctgggaccagacaagcgatgccgggagttccctcccttgaaagtacgccgaggagcgatgggaggtggtcttgagcttcatggttggggctccccccaagtgcacgctgtcagacagggaattgggtcaggtcctcagcagggtgggtcattgaagagtatggagcctggagagccggctggatttacttccgttgggttccagttcctgtttgtgggacacccggggtcagatctggagctcctagtgggcagcatttggaggaaagcaagaacgggagggccgggaaaaatccccttcccttcgcaggaagtttctgggaagcgaatccgggaagagagaggacatctggc

SEQ ID NO: 647654 - DNA, 217 bp, Homo sapiens
ccggggcatttggggccccccccggggggataaaaagggccccttcccccgttgggggggtttccccccaggggggggggggaccggttttctccccccggggggggttatttgtttttttttaaacccggcttttttttgggccccattttgggccggggggccccctttagttgggggttttttggggaattaggggcctttttccccctcccca

SEQ ID NO: 647655 - DNA, 1123 bp, Homo sapiens
ctgcccccaccgcccaatctaggagcctggcaccccccagcctgggggatcccggtggagcctgcctgcccatcctgggacccagcactggggcccagcaccaatgaactgagaatgtctgccaccgttgtcttgtgatgctccctggagtgtgatgtggtggtgcatggtggtgtgtgccacaccccagccatgcgagggcagtggctgcatgcatgctgtggtcacccctgctgggtgtggacccccacgccgtcagcggggcgggctggctctgcctcctagctacaccccccacccctggccctgctgggtgtgctgtgtattgtctgacgtgtggtccccaccctaggcttggcagggtggtctcacccctgtttcaaatggtggctcatgtggacccacatgtcttggacccactggatgcatgtgacctgcacctcgcacagtctgctagtccagcccttgtgggcatgcctgtgcagcacatacctgcctagtgtcagccttggagcctgcagctgacccatgcctcagtcagcctgtcggatgttggtctttgggggagcccgtccccacaggatattgctcccaccatatcctggctcctggcctctggtgatgctgcctgtgtccctgagttctctgtcgggggacccagcccatgtggcccaaggttcagtgtctccttgatcctggggagtgtgtccgggtaggcgagcctgacaccccagccagccttggtgctggtcgctggacccaggcgcattagctgcaggagctgcctcagtgctgaccctggtgacttgtccgcctgggctctgggccctgcgtcccttatggtctgtgtcctgtgtgcgtggtgagttcactggatttgacactcaaactgaggagaggggagagagagccgggacacttgtaagggggacacccttgtagacagttttccgcaaaagcccttttccgagagacaggtgcgacaaactcacgcgcagtcgagcaagggcacaaggagagcgaactcgggggttcacaccccgatcgatgaatgatcgtgacgccgacatgtcgtggacacacaaagaggagatgaactcacagactacagagaactcgataa

SEQ ID NO: 647656 - DNA, 633 bp, Homo sapiens
gctgagtcggatagctatctcatgcgaagtcagacgttccttttgactccatctcagtcactagtctttctcaatcctatccataatgatgtcagtgacgtgcagccgaggaggcagcgattacgactggacgatggacagtgagtcccctcatgagtgcaccacaggaagtctatctattctcggcttgttgaaacgtacacaggccgagtgaacatgaatttgatcatgttttaatggtggggctgtgcttgatgtgatagaaatgacgacagtgtgtgctataatcgtgttatagtaaacggagtccggatcttacgtggcgcttcgggtggggggtaggagtgagagcttggaaaattcggcttggaaagcattgaggcagattgaggttcaaacgaaggcggggccaaaattatgagtaaacaactgcgctgacttggttgatgaaatggtcttgggtaaagcaaatggtttggccatcgtggggggttccgcaagtgaaaggactaccaagtgggtctttaatggggggctcgtgttggttcatgtggccgagtgaatgttgagggtgatggagatggtaagtgacgtggtggtggaggatgcaggggtaagaagatgaggaggagg

SEQ ID NO: 647657 - DNA, 470 bp, Homo sapiens
  misc_feature (85)..(85): n is a, c, g, or t
  misc_feature (90)..(90): n is a, c, g, or t
  misc_feature (94)..(94): n is a, c, g, or t
  misc_feature (116)..(116): n is a, c, g, or t
  misc_feature (425)..(425): n is a, c, g, or t
  misc_feature (428)..(428): n is a, c, g, or t
  misc_feature (460)..(460): n is a, c, g, or t
aggctgttgctgagccgcgcgcgatcctcaaggagcgtatcatcgacacccatatggaaccccacggcctcaccgccgcgcagtncaagntgtngatcatcatggcccagttcggngtcgataccccggcggaactgtgccgcaacctatcgctggatagcggttctatgacgcgcatgctcgaccgtctggagcaaaaagacttgctcagccgcaagcgctccgagctggatcgccgccaggtgcagttggtgctgaccgccgagggccagcgcctggcggacatgctgccgcacattggcgccaaggcccttaaccagttggccggcgtgcttgagccgggcgagctggaaaccctggagcggatcctgaagaaaatgctgatcgctgcgggtgaccccatcacgatccagcgggtaggtagntcntgaacacacgcgcattcagcctggtgctgtcnggggagaaga

SEQ ID NO: 647658 - DNA, 246 bp, Homo sapiens
  misc_feature (229)..(229): n is a, c, g, or t
caggtattacgctttcagtacaggctccaaaatgtatgcctctcttgaatattcacaggattcatacaggagtggtttgggaaacctttgacagattcatttttatctactatacaggaacagactttctggaggtctgatacggatttcgtactttcaagtatactcctagtcacgcaaaggtgtcactgttgagcagttctgcgagacagatactgctttcatacgntctgcagtctgccctgt

SEQ ID NO: 647659 - DNA, 712 bp, Homo sapiens
gatgaacggccatgtttcctccatcagtttaggggctgccaagatcaggaaacctattaagtgccaccaagggagataaatgactaagtgctgttcttcctccacctgagtggtgccactcgagataggagccgcgcaagcaccgtgcatgcccccgtccgcgacagcccctcagccatcgacccgagtgaggactcacctgcgcggtcgaggacgcgcgctgacccgtgccctgtcgtccacgaggtagcgagcatgagcgaccgcccgcgacgtgtgggccgggcaaggcccttcactcatccgccgtacggcgctgttccggctgctgctgtggacgcatcctggttctgtcaaccgtcttcctgtgagcgcagtcatcgtcgctgctggcccttcatcattgctgcgccttgccgtggagtcgccagctgcggccgcaagcggcctgcttgcccggccagcttcccgcctgcggctccgctgctctcgcgaggccgacagccttgtgcgggctggaagccctcggtgtaccacgtgctgctcatcctgggcctgttcgccgtgctgctgtcctgctgcgcctcgcgcatgtacaccagcgtggagggctgggactacgtggactcgctctacttctgcttcgtcaccttcagaacacatcggcttcgggggacctggtgagcagccagcaccgccgcctaccggaacc

SEQ ID NO: 647660 - DNA, 322 bp, Homo sapiens
atcagaggagcttgtggcagtggaggagaatccaaactgttgtgctcattgcgtttgggatgctggtggacacaagtggaggtgacatgtggcagctgaggacagcgagagagaggcctgaagtggagcctggaattctccagacacatgtgccatttagggctctaggattctgtctgcaagggcagccatgagggccgggcacggagccccagacgactccccatgtagagacagggagaaacggggactcagaggaggggagtgagcaggtgcagctgtgggggcgggcagaaccacaggaactcagggtcgcctttct

SEQ ID NO: 647661 - DNA, 337 bp, Homo sapiens
tcgtcatggctgactcttgaggatccacccgcggcgtgttcatgcagccccctgcagtagggccggaagttggagatcataattgctctatgccaaatcttggctggcagcggccagaggagttctggcttgcatccatgtaggagggcctgggagatgcagattggaggcttgttctttaaaggcccagtgggggtctggcctgccctgccctctgtgctgctgctgggacgtccagccaggctgagccacatccttgagctgtcagagagtgatgatgtcctcttctctcaacctggaatgcaccttcctcaccagcagctcttccttccttccg

SEQ ID NO: 647662 - DNA, 165 bp, Homo sapiens
  misc_feature (117)..(117): n is a, c, g, or t
  misc_feature (135)..(135): n is a, c, g, or t
  misc_feature (155)..(155): n is a, c, g, or t
acatggcccctggactgaaggtgctcagttagtaagggagtgtcatgcaggtcaacacacgtcgcacatggaccacaaatgcctgccaccacaggatgcacaggacttttggggggngtggacaggtattattgngactggtgaggtgagaggtnagagggggct

SEQ ID NO: 647663 - DNA, 466 bp, Homo sapiens
tagcgatcaaacccatgccaaaaatcatcacgaagatcatcgctgccctactcccaggcgcttgcacgcaaaccccgcgctcatccccaacactccggacaccaccaccgccgactcccaatgcaggtagctcagccataccgaacacaacaacgacacggcgacgcagacgatggttggcacgtcgcgtacaacgggggtgatcagggcgataaacgtcgcggcaatcgagaattccagacccagccgatccagcccgggaatgcttttaccgagcacgatgccggcgaaggtgaagacgttccagatggtatagaacgtcaggccgacgcccagggcgtaccagcggttgaaggtctggcggtcatattggctgaccagggcgaagaattcatcggtcagcaaaaagcccaggctcatgcgccacctgggtttgagcggcgacagcgtagggcgcatgtgcatg

SEQ ID NO: 647664 - DNA, 621 bp, Homo sapiens
gccgcgcagctggaggcggcggagcgaaagccttgacttcatctcagctccagagcccgcctctcttcctgcagccgtgggaacttcagccggttgggagccccacctatggttgcaatccgaaagaagcgtggtgatcgtgcggggaatggtgccgtgtgggaagacctgcctcctcatcgtcttcagcagaggatcaagttcccgggaggtctacggtcccctacgtgtcttgggagaacctatattgcggacattgaggtggaccggcaaagcagcgtggagctgggctctgtgggacaccagcaggccaggaagactatgatcgatgcggcctctctcctaccggggacactgatgtcatcctcattgtgcttctccatcgaaagccctgacagcctggaaaaacattcctgagaagtgaccccagaggtgaagcacttctgcccaaatgtgcccatcatcctggtgggaaataagaaggacctgaggcaagacgagcacaccagggagagagctgcccaagatgaagccaggagcccgtcggtctgagaaaggccgggaacatgggaaccggatcagtgccttgggtaccttgagtgctcagcaagaccaaggcgg

SEQ ID NO: 647665 - DNA, 550 bp, Homo sapiens
  misc_feature (498)..(498): n is a, c, g, or t
cgtgccagaatcctcatatgacctgcacagtctcatcttcctgctgaaagaaactactaccgtagcgagaatctaagctatagcagggatgcagtttatgcaaatctgaactagcttctttgttcatcaagtcagttcctcccaaccaaccagtcttcacttcaagagggccacactgcaacctcagcttaacatgaataacaaagactggctcaggagcagggcttgcccaggcatggtggatcaccggaggtcagtagttcaagaccagcctggccaacatggtgaaaccccacctctactaaaaattgtgtatatctttgtgtgtcttcctgtttatgtgtgccaagggagtattttcacaaagttcaaaacagccacaataatcagagatggagcaaaccagtgccatccagtctttatgcaaatgaaatgctgcaaagggaagcagattctgtatatgttggtaactacccaccaagagcacatgggtagcanggaagaaggtaaaaaagagaaggagaatactgggagataatgcgcaaaatga

SEQ ID NO: 647666 - DNA, 553 bp, Homo sapiens
ctgatgcagagagccagaagtatgactgtatacctgtccagctatcttttttgacaaatctgagcaaagaacaagcaatggtctaaatgtattgaatggggaaaagagttgccattcaataaataatgctggtgataaccggactagtcgcgtatgccgaagtttagtactggaccccttccttacacattatagaaaaatgtactcaagatggattaaaggcttaattaccaaacccaatactataaaaacccagcatgacaacctatgactatatcattctaggaacactggcatgggcaaagatttcagtgacagagacgccaaaagcaattgctacaaaagcttaaaattgacaaatgggatctagattaagagcttctgctcttctatatgtatctatcgaacagacttagtctgtactagttccgtatgggagaaaaattttgggaatctattgcttctacaaagggctaatgttcagcatctacgaggaactttgacaatttccatgaaggaatgccccgttgtaaactggttgaggatgagccag

SEQ ID NO: 647667 - DNA, 493 bp, Homo sapiens
  misc_feature (52)..(52): n is a, c, g, or t
  misc_feature (69)..(69): n is a, c, g, or t
  misc_feature (274)..(274): n is a, c, g, or t
  misc_feature (277)..(277): n is a, c, g, or t
  misc_feature (284)..(284): n is a, c, g, or t
  misc_feature (286)..(286): n is a, c, g, or t
  misc_feature (298)..(298): n is a, c, g, or t
aattcacggtcattagaccatttccaggacttgtgattaataaccagctggntgatcagagtgagtcanaaggccccgtgatacaagaatcagctgaaccaagccagttggaagttccagccacagaagaaataaaagagactgatggaagctctcagatcagcaagaaccagaccccacgtggtagacctcttccctcctaggcttaaagtatcagtggttgagaagagcttttcggacctgttactaccccagctgtgtatatactgatacngantaccttntnatccaacctttnttttctaccttttagaatggaaattgtttaccttttttcaagcaggttcttgttgactttaaaagtaggccataagttggacttggtgggggatcttggaaaatggccatggtgggtaaccttgggggaaaagtggaccctaaattccggggaatttttaaccccggtctttggctttggcacattgccgggggt

SEQ ID NO: 647668 - DNA, 384 bp, Homo sapiens
tcgaactcgagctgataccccccgctggccaatcgcagtggtcttggcgttggaggtggcttcagttccagcagtggcacgagcatgtgggggtggctcagtctgtaggaggcggcggttccaccatcaagtacaccaacaacctacctcctccagcaggaagagctataagccactaaagtgcgtctgctagctctcggtcccacagtcctcaggcccctctctggttggcagcgccttctcctcaggttgcctgtcctctcctggcctccagtctcccctgatgtcccaggtaagacgtgggggatgaatgctttagtgccctcactactcctctctctaccttattacaatttgagcacccattgctcaccatcagaatca

SEQ ID NO: 647669 - DNA, 974 bp, Homo sapiens
cgtcctgctggggatcctctacgggaaagcaagtacgaggcggacatgtgctgtgaggagatttcctctggaataacatcccgatggatgaaacaggaacgcacggtcgtcagtggcttcataaactgtaccaggagaaggacgcgctccaggagatatataatcagaagggcatgtttccagagtgagcagtttatgcctgcccggaggccgtgggaccctcctgcaacttcctgtcctggagccaccatatctcctgtcatccgcctcttcagattctgtcttgggcgtcatttgccagcggatcaggctctcctgatcctgacttacttgggcgttagtggagagcagcttcctttggagttcgcagactgataggagtaacttgagatatgaaaaaggctccagctacggaaaccaagagtttaagacaataaggacatcacttaatgcgcgtgtgacgtgaacacacgcggccctgacggtggtatccagtttaactcaaaaccagacgacacagagtgccggacaggacaattacgtaaactatatctcttacttagctggtgactaatattaatcaaaacttgagcccaagagctaacgaattcagaatggcctgtcaggtgaaggtcttcagactcccacagcgcagaggtccaggatatccacgcgcgcccgttgggaagggtgggatccgggccggagaagggcctccccggcggatagccgtcttctccagaatctcccgcattcccaagaggggaccctttgggatgcgatatttctctcctttaaaggtagaattaaattttgtgggttaaattcaggtacttgggagacttaacgtgggccctaaagtttattggaaccccgcgccggaatggtgtctgcagaaattcggggccccttaatgggggagcacacacggaaatatgcgagcaatgtacgaatggcgtacagatcaaataaca

SEQ ID NO: 647670 - DNA, 439 bp, Homo sapiens
gggagggagtctatgcgtgaaaaataaagtgaattgagcgtgaaaaaaaaaaaaaaaaaaaaaaaaaaaaaaaaaaaaaaaaaaaaaaaaaaaaaaaaaaaaaaaaaaaaaaaaaaaaaaaaccttgtggcccgcttggccccaggggcctttagccccggccaggtttttgcttggggccgtatttcgggctcattgggccaatgccccctttggcgagtcgcctcccaatgaatgggccgccgttttccagggccgggattggaaaaccctgggcttgcccaaccttagtggcttcgaagcaaatccccttttcgccagttgcctttttgccaaaggggcccaaaccgatggcctttccaaccattggccttcccaaaagggcgacgggaatttgtggccttgatttggtttccggtttaatttttggtcttccttt

SEQ ID NO: 647671 - DNA, 103 bp, Homo sapiens
ccagaaggggcattagctggcgtggggtagggggcagagctaattgtgaaggaagagggcctgagatcacgtagccatgtcggagaacagctgtgctcgctgc

SEQ ID NO: 647672 - DNA, 1641 bp, Homo sapiens
  misc_feature (73)..(73): n is a, c, g, or t
  misc_feature (96)..(96): n is a, c, g, or t
  misc_feature (120)..(120): n is a, c, g, or t
  misc_feature (158)..(158): n is a, c, g, or t
ggcgaagagtatgctcaacgtttcagtcctgtcggatgctgaggatgatgtcctgatggatgtcctggcgcantgtaaacaatgatcacacgtagnaatatgcgtctgagtgtagacganaagtgcttggaacgattattcgtctagtgaacgtgtgntcccagatgctcgccattggattgtactaacgtgctaggagcctaggaacgaaaggaatgagggcacgaatttcatccagtagggatctctatttgagggcgagtaacgtactagaatacaatcgtccaccgtgtgtgttaacttctctaacgaaaaggacctgccaaataaacgcgaccgaacgggcatgcattcgtggcgtgagtagcgactaacacatgaactcgtgccgcaagttctgggaaggaattcacgcatgaacagttcatctgcccatgagatactgtatacttcagtcatttggatggaggactatcacggaaagtaccggtcctgattagcggtcagctggatagtaggacgcataatcggtagacaagagagaggctaaaattatcattggagtgttaggtgatagtgaggcgggaaaagttgggcgggtaaaaattggtgagtggcatctaaagaaagcgatggagatacttggttattcgatcgcaggatgtccccaatatttggtgggtaagctaacttggcttgttttgacatggacgaaagttcttccaaattgagaaactcttatggaaatttgtgcgaagaagtaacgcctcgtaggagttgcaatcctaggagctaaggcacactactgtctcgtggttctgtggggacaggggtcgcctcggtgagtatgtgacatatgaacactgaagcggaaaccttgagcggcaattcggatcgggcgtttcgtgacactttgaagcagtgctttgcgtgtggccacaggacggtttttggagagaaatatccttaactatgggaggtataagcttctcctagaaattgcggcgagagaaatcacttgggggactttaaccacatgtgggtgttgcccctactctgtttgttgaccagacgatgttctgccacattaggacacccttggtgcggtggtttgctgtccacaccggtgtggccaacggcctgtgtgtgcggaaacccgagactggtgcgttaggtggggcgcgggtctcgcaaccacaattttgtgtggggcggagaattgcggtggttaaagaaccacgaggacacctttagtgatacaagcggcgcgctcgtaggagagcaatttaatgcagcatcgacggaacactctgttgcatcatcgtgcttctgtacacacacgatgagttttatccagcgtgtgttgagatgttgagtacggagctaataaggggggtgaataaaatatattgagtgataagataatcgagggtggaatatagtgacactaatgagaggcgcagaaacggggtatatatagaggagcggggtgattgttataatgatgaaaccaacacttaggataacagaagatgagaatacgtacaatttgtaggttgctttgattgttgtttgttgttgttttgtagatattattattgtatgcttgtatataagggagagagcgagagcgggaggtgg

SEQ ID NO: 647673 - DNA, 112 bp, Homo sapiens
gcagcaggcggatcacgaggtcagagttcagtcagctgacaataggtgaacccgtctcactaaaatacaaaatgagcaggtgtggtggcacacgcctataattccagctact

SEQ ID NO: 647674 - DNA, 625 bp, Homo sapiens
  misc_feature (44)..(44): n is a, c, g, or t
  misc_feature (133)..(133): n is a, c, g, or t
  misc_feature (235)..(235): n is a, c, g, or t
  misc_feature (568)..(568): n is a, c, g, or t
taatttttcttttttttatattttattatatcatctctctcttnaccatattcttttctcttcttattcttattttatctatttttttcccatttttcttactttttttctcctccctttccctcccaatttncaaacttttcaccccttctcctacttcccttttcattttaatcatatttatttcaatctttattctcatctcatcttcaacatctctcttttcaaaatctanaactctcttttccaactcttcttcatcaatcttcataataacctccttttctctctttttcttctcactccctccaattctaccttatctaccctttccccttcctctacctttcctttccctcttttaccccttctcctccacctcatcatcaacccttttatccttcttcctttccaccctccttctttttaaaacctccccctccctcctctctttcctcttttccttatacctatcctcatccttatctctcctccttctcaaaatctcctcttttatatttactattttcctttttccacttttactttattcttttacttttttcanttcttatattcttactctacttaatcttcctttatcctcttttattttcctctcatt

SEQ ID NO: 647675 - DNA, 838 bp, Homo sapiens
agcgctgttcctccatgaaactgaaaaacacacacacacacacacacacacacacacacacacacacacacacacgagacacacacacacgtctgagagagagagggagggagagggtcgtgtcgctcgtatgcactctagctgctcgccagatgtccactcttatcacgagtctcgtgctcctctcctgtgaaatgtgaaaagggaacacacacacacacacactctgcagagagggaggggaggagagggtcgtgctagcaaataaagagctctctctccacaatatcatctactactaccaacacaaatattatgagcagacaatcattacatgctgttgttcatagaccgcctcgttgttacagaggcctcatctcgacattagatgcgcacaacacaacgacgctccgtgggagacagacgacgaccgacacgcagcaagagtagttgcatagtagtacgccagccatcgtaagatccatacgagggagcgaacggaggtagatgcttcacgcagagcatactactaacacgatgatagatgcgtggtgcatgagcgacgaaggagcgaggggcacggaggaagaagaagtacgctcacggaggaacaagaatcgcatcactctcatccaggtaggagattctagtttgatagccccccaacgaagtgggtacgaagaaacgatcggtggaagatggtaaatataagtaggggtcggttcgatgaaagaatcattggcgagcaagggggaacataccgtgggtcgtgcacacgaaacagaggcgggagcaggaggaaaaagcacagcatgaggacgacgaagaaaaaacaacg

SEQ ID NO: 647676 - DNA, 643 bp, Homo sapiens
gtcctcgacatttgcgctggctctctgacggtcgtgcaggtcgtgcagtatgcctgagactgtgtctgaggccgctgctgaggaggttaggcaccttatgaccaagtcatcgcttcaggcgatgctgctcatatatgctgattacaaacaagcaactgtgcccgacataagtacagagcgtcccgcgctgatgtacttcacgcccaaggtcacgtgagatgcctggactgagctgaagggaactgacatggaagatgccatgaaagcttacatcactaaagtagaagagctagtggccaaatacaggatatgagagactggatttggtaactgcgctatgagtgtattctaacgtgatacagtgccttgatgctgtctaataccgagcatgtggggaattcgagaggatagccagatagaccagctgctcacggctgatcaccatacggctctaacagattagcagctcagttggtactttaatgaacgacaccattttagatcacactcaaggcgttgcccgaacgccaattgccctaacgcggtcggaatcacccttaatggcccgccgattacaacgaggcccttgagcacccctggcgtacacaccttctctcttcaccaccctcccctctttgccgcg

SEQ ID NO: 647677 - DNA, 215 bp, Homo sapiens
agtttatttacaagatacttgtgcatacggttagatatacatcctatgccattttagtagaagaaacttgaacgtccacagtttttgctattttttttggaatcctggaactaatttcccacagatacagagggagaagggtgtagagaacaaattggtggctgccagagacagggggtagaagattggcaaaatgggtgagggtggtcaaaagg

SEQ ID NO: 647678 - DNA, 856 bp, Homo sapiens
accgtgtaccagcgggcggtggtcgctgtgtcggtcggacgcactgggagtataaggggaattgtccggtgtttcacaggtttctctggtttttgtctccagagccacaggcttttttctttccgcctgcccccctcctcggggagtgaggtcccccctcgaggggttcacagggtggccccccgccccacgggggctcttggtgttctggtgtccctacaaccctgccgtcgcgccacccggcgcccctgtcgcgctgttcttgccacggcgcccgcctctctgggcttttctgccacagcacagggctttggcgccccaccctctctcgagagttgggagagtttggaaaagttataggcgcctctctccgggctgtccccctcgcccctctggtgggccctcttgtcacgccccacccccaaggcgtttggccaccgccacaccacaggtggagcccccccgatggcaccccccggcgctctgagcgccctctcttgcgcttctccccataccacggccctttctcccctcgtgctcgcctcgttggccacgccctgaacacacccccaccctcggcggttctgggcggttccaccacgtatgggcctcccacctctgctcgagagggcacttgtcacgcgtcacacctgaaagtcacccacgcttgccggaacactttttaatgccaagacactgagagaatccattattaaattcaccacggactgagcgtttcacctaatcacatggggctataaaactcccccgggagaggaaagtttccccgttcccctggcgggctttcatttgccattttaagaaccaccatttaatagaaaacccccgaatggga

SEQ ID NO: 647679 - DNA, 644 bp, Homo sapiens
catgagccactgtgcccggcagacatttgagtatttgtatataagatattttcgtagacatttgagtgtttttttttgtttgtttgtttgctgacactgattttccctcttatttcccaggctggagttcaatggcacgatctcagctcactgcaacctccacctcccaggttcaagcgattctcctgctgcagcctcccaagtagcacatgccaccatgcccagctaatttttttgtatttttagtagcaacatggtgaaaccccatgtctatcaaaaatacaaaaattagctgggcatggtgatacacacctgtaatcccagctactcgggaggctgaggcaggagaatcacttgaacctgggaggcggaggttgcagtgagcagaaattatgccactgcactccagcctgggcaacagagtggagaccctggctccccaaaccccaccaaaaaaaaacaaaaacacaaaaaatgaagaaacgcatttgtgtgggcccgccttaggccccctggaaaaaacgtttgtaagcaccaatcgtgtgggggcgcggggacccaaagtagggtacggaaccgtgggccaaaacggggtcccaaagaaaccccgggccaagaacaacggcgtggaacccacccaataa

SEQ ID NO: 647680 - DNA, 151 bp, Homo sapiens
ataagtggcgtgttgccactgttagtgaggggtaggagtcaggtagttagtattacagacgggggttgttagggggtcggaggaaaaggttggggaacagctaaataggttgttgtctgattgtggttaaataaatagtagacgggatgat

SEQ ID NO: 647681 - DNA, 675 bp, Homo sapiens
acattttctgactatggaaatgatattagacaaaaagcaacttcaagtggttttcttatttgagttcaaaatgggtcataacgcagcagagataacttgaaacatgaacagcgcattgtggcccaggaactactaacgaacatacagggcaactgtgattcaagaagtttgtgcaaagcagactagagccttgaatatgaggaacacagtggccagccatgggatgcttcacttcttgaagcatcttgacagcttttgtgcaggtgaaatgcttccacaccagcaggatgcagaaaaatgctttccaagagttggttgaatccagaagcatggatggtggggtttatgctgcaggaataacacaaaactttctaattcttttcccttccgggttttgtgggggcaaaaaaaaaaaaaaaaaagggggtttggggtttatctgggggaacactctctgcggggttcttcaaaccacaacgttctgctgggggggggggaatattttttttttctccccccccccctttttatttaaaaaaaagttttttttcaaaaataaaggagagggggagggggggggaaacacacatttttctcttttttacacaacaaaaacaaacatttttttttcactacaaaaaagacaaaatcgtagaaaaacaaaacagggagaga

SEQ ID NO: 647682 - DNA, 159 bp, Homo sapiens
agactttagaaaaacttagtgactactagagttatccttaggactctgcattaactctagtatgttcttggctacttagaaaaaaaagcatatttgtcacagaaatttagatgacatcttacaacttaacatgtatgtatatagcttagataaatgtaa

SEQ ID NO: 647683 - DNA, 137 bp, Homo sapiens
agtgatatgggtctgtcaaagcctatactaactttgatgctgagctggatgcttcgaacatagaaacagacatcaagaccaaaggtgtggatgaggtcaccatagtcaacattttagaccaacgcgcagcaatgcac

SEQ ID NO: 647684 - DNA, 611 bp, Homo sapiens
gtgctgatcagtagtgggatcgcgcctgtgaatagccaggctggtctcaaactcctaggctcaatgccattcacctgcctcggcctcctaaagtgagagattccaggtgtgaactacccacttaaatcgttttaatttaaaaaataaaatgaaaagaatgttcttcgtgttgattggttgggttgtggtaatcattgcatagtgtatacatctatcaaaacatcatggtgtatgccttgaatatatacaaatcttatttgttaataaattggtggagagaatatcctcgtggcgcggatagcttccctcttatatggtcggagatgagccccccttttcctgcattgtacttgtaacagatatcttttttcccctctgtagcttgtcttattcacctgttagttgtgtcttttgataacataaattcttaatttcaatagtagtaatgacatctaatcttctcctcctgtatgattcagtgctctcctgtgcacgttatgacataacagctcataaacgataatctctaatatacatctactacaacagccaatcgctttagcactttcacactctagatacctatacagggctaaaattactcaataacc

SEQ ID NO: 647685 - DNA, 390 bp, Homo sapiens
  misc_feature (40)..(40): n is a, c, g, or t
  misc_feature (107)..(107): n is a, c, g, or t
  misc_feature (121)..(121): n is a, c, g, or t
  misc_feature (212)..(212): n is a, c, g, or t
  misc_feature (229)..(229): n is a, c, g, or t
  misc_feature (296)..(296): n is a, c, g, or t
  misc_feature (299)..(299): n is a, c, g, or t
  misc_feature (379)..(379): n is a, c, g, or t
ggggaggcactgggctaggagttgttcctcaaactcgagnatgcccaaagacaggataaatgaaccgcatttatactcaaatatttgtgggaaaatagttctttttncaggctgggtgtgngtgtcacgcctgtaatcccagcactttgggaggccgaggcgggtggatcacctgaggtcaggagttcgagaccagcctggccaacgtggcnaaaccccgtctctactnaaaatacaaaattagccaggcgtggtggcgcatgcctgtaatcccggctgctggggaggctgaggcnggngaatcccttgaacctgagaggcggaggttgcagtgagctgagagtgcgctattgcactccagcctgggcaacaagagtgnaactccatctc

SEQ ID NO: 647686 - DNA, 1046 bp, Homo sapiens
gacccattacttccactcataattcacaaggcaccaaattcattcagccacagcaaataagcaatcagtattcagacagcaattggatcctcattttgaacccctctccagtatcttcacactcttgtcaactctccccgtgcctctctcttgccctgagttcatcagcctgtgtggtgttaactcaccttcagaagtgtacacagctaagcaaatgtacacagtatcaaccctcccagttgcttaattcatacccataggtaatcaccaaaacagctctgaagacccaaagatgcaccattactcaatgatgtgatttccaggagccaccagaagaaccttaccagcttccctcaaatcagtccttatcctctttctatcttcactcccatcatcatctattttcacactatccagctaagcaaaggattcctgtgacgtgctgacattgtctcttcagactcacagagttgcacatccagctcttctgacatcaagacccaaccagtcgtcttctcatgcagacctgtttgctaacaaaattccatattctgcccaaggatattgcaggcacacaagcaggctacttgatcggcaggcccaacactccgtgcccacattggcaagtgtatcctctacctagggtcgtttgcaacacctttcactgcaggcacgggtcaacatcaaaccctgggccaatgaaattttgtcaccacgtagcaactcacagtgcccatgggaaatacccacgcccatcatcatcactttcagtccatcttacttgtggtcagctgaccgggaacgaccaggcacagggcgcgcccctggaagagcaactcacaggaggcgctcacgcaggccaacagacgggcccctataaaacagctggacagggcccgagcacccctgacaaggcgagcgcgcagtagcagcgcgacggaaacaacacatgcacagacggacggcgagacaggaccgcaccaacacgccacaagtgagcggaagccgtacacaagcacacaacaatcaaccagacacgacgcaaa

SEQ ID NO: 647687 - DNA, 347 bp, Homo sapiens
taagtttagggaaaaaaaattgggtttgggattttttggtttccccatttgtgattgaaagactatggccctgtaataagtccaaaaacaccagttgcagggtaacagggctgttaatggaatcgggtcatttaaaaacagtcaaaacttccctgttgggcatggggttaggagccagggcccccgtcagtttttaggaaatggccagtttgagcaaaagcctttgaaatccaagacttttccccttggggtgctgttgaggggagaaaaaaaaatgggggaattttttttttttgaggattgagattttccccttagaaaaaaacaaaaatttttttttcagggga

SEQ ID NO: 647688 - DNA, 101 bp, Homo sapiens
  misc_feature (27)..(27): n is a, c, g, or t
  misc_feature (31)..(31): n is a, c, g, or t
  misc_feature (85)..(85): n is a, c, g, or t
ctggccgtgatgtcatcagccgagccncccncgcggcgccccattcccgccccccgcaggatgccgcgctgcagcctgagcgccngtccccgccccgaccc

SEQ ID NO: 647689 - DNA, 126 bp, Homo sapiens
caaggagtattacaagtatgcaactccaccattacccctcctaagagaggctggagagaaagccacaaacattaagaagtgccggtcctgaagaagggaggtggtgtttagagctctgcaaggagg

SEQ ID NO: 647690 - DNA, 431 bp, Homo sapiens
  misc_feature (4)..(4): n is a, c, g, or t
gagncagcctgggcaacaagagccaaactctgtctcaaaaaaaaaaaaaaaattaggaagtagccaggtgtggtggctcacacctgtagtcccagccctttgggaggctgaggcaggaggaacacttgagcttaggagtttgagatcatcttaggcaacatggtgagactccttctcaaaaaaaaaaaaaaaagaagtgatgaatacttaagcatcattgtttttaacattatttacttttttttttttttgagacagcctgggcaacaagagccaaactctgtctcaaaaaaaaaaaaaaaaaattaggaagtagccaggtgtggtggctcacacctgtagtcccagccctttgggaggctgaggcaggaggaacacttgagcttaggagtttgagatcatcttaggcaacatggtgagacaccttctca

SEQ ID NO: 647691 - DNA, 743 bp, Homo sapiens
tcctgtgccttgcaattaagcgttgagctgcgcggggcgcgggggacgctggctcggccgggcaggagagagggcgcccgggctgctgcttggggcgcggtccggagagggttcggctcccctgggaccgggccggggctgcgcgctggagaggccccacaggtcctgtgctactgccctccaggagctgttggcggcgtggcagcgatctggggcccggggcagtcgcctttgattatcgagggcgcttggcgttcggggaatggttggcagcaccttacgagacccacacacgtcccctggggcggccacgggccaccttctgcggagcctcgtgggcttcgccgcgcgtcgcacctccgctctgccttgcgcttactgcggccccaggaggtaaggcccccatccgggtgacggaggcctgcgagtcttgttcaccccgagtcccaccagggtcccgcttgcgaagggtgaaggcggagtgggctcgcttcagaaaaccagtacggcctgctcccagtttctctaaattggggttggagccccgtcaccctttccccagatcaccggccgcgggggagcgaagggaacttcccagtgactgcatagggcgcctcccgggacccacaggttgggctagggccggccccttttgagcatacaggctaaggcttgacttgggggaaatctcccgtggggagcgcgaaatggtcttccccggggaccagctctggccgggttac

SEQ ID NO: 647692 - DNA, 100 bp, Homo sapiens
ggggtctgtgtccggtgcgtgttggggttggggtcaccgtagtgatggtggtgatgggtgtcgctgttgggttctgtgtgccggtgcaggttgtgggact

SEQ ID NO: 647693 - DNA, 243 bp, Homo sapiens
ccaggggtttcttcccctaaaggagaagtctctcgaaaagcttctttgtgtcagatagagctcacctcccatcagggacgcacagaccaggtctttgccctctcgtgtaccgcagcgccccagtgaaagaggctactatgacccaagcagactgtgttctgctaaaaattcaccagcaacacatctgaccgagacctcaaggctgctctgccactctcagcagctcactcttcctgtgctccg

SEQ ID NO: 647694 - DNA, 1480 bp, Homo sapiens
  misc_feature (487)..(487): n is a, c, g, or t
  misc_feature (522)..(522): n is a, c, g, or t
  misc_feature (525)..(526): n is a, c, g, or t
  misc_feature (539)..(539): n is a, c, g, or t
  misc_feature (550)..(550): n is a, c, g, or t
  misc_feature (561)..(561): n is a, c, g, or t
  misc_feature (572)..(572): n is a, c, g, or t
  misc_feature (577)..(577): n is a, c, g, or t
  misc_feature (585)..(585): n is a, c, g, or t
  misc_feature (595)..(595): n is a, c, g, or t
  misc_feature (602)..(602): n is a, c, g, or t
  misc_feature (614)..(614): n is a, c, g, or t
  misc_feature (619)..(619): n is a, c, g, or t
  misc_feature (625)..(625): n is a, c, g, or t
  misc_feature (627)..(627): n is a, c, g, or t
  misc_feature (636)..(636): n is a, c, g, or t
  misc_feature (645)..(645): n is a, c, g, or t
  misc_feature (675)..(675): n is a, c, g, or t
gagacagagtctccctttgttaccaggctggagtgcagtgacaccatcttggctcactgcaacccccgcctcctgggctcaagcgattctcctgcctcagcctcccgggtagctgggattacaggcacctgccaccacacccagctaatttttatattcctagtagagacagggtttcaccatgttggccaggctggtttcgaactgctgatctggtggtccgcctgcctcggcctcccagagtgctgggattacaggcgtaagccaccacgcctggccaagaaaatcaagatttacctggtttatgtgttgaccagctatacacagagaattctagatttttttctaaaaattattatcaaacccccaatttcaccagtagaaaaagagatcttaagatttctgtgtttttttttccagcataactcagttacttatggctgggagaaaatatgtagggagataatctaatacctaattcgaaggnagaaaatatctaattctaagtcttgagttcttctnatnngaccatagcaggntttaacatttnacatttttcanaagcttctaanagacntcattcanttttttgccncagcagnggcatttaaatnactgnctttananccatgaatngctggaggnttggaaacttgagtcaatttccctagtacnacctccaaggcagaactagcagcaaaacagtggtaggaaaaactctcaaaattttacccaatctgtatgtttctctacattgtcagtatctagttcttatatagtctcacatcatgtcacttctaacaatttcctgacagtgtctggtgctataaacaccagacccagctccaagatgtcaaagcacagcactctgcacgcacattccacagtcaactaatgcgacttatggtagccaaggaagcccgcaatgttaccatggacacactgacgtgaatggtttcgaactgaagacttcgtcgtgtacttacaggcaagtaacatatctactgaactcacgcagcacagtgtcgggacccgcacaagtacttcatgtaccctccagtgggctgtccacgcacagcttagagcgtcatcttcgtactcccttctaatctcaactcttcacacgaacgctagcggactgcccatgtctccagtagaacgctttcatcaccttctggccacttggacacgactgcatccagcctcaccaacacgggccatcactcgcacgtcaggctaacccatgtatccgcctcctcgcccaaccgggactgcactctggacaactgcatctccgcaaatccaacccgttaaaattcgacaccttctgttaaaacctcttggacctcttctacctaacgtttgggacaccaaagacggttagtaccaaaatctatcatcaggacctacacccagcaagcaccggagaaccaatcagtcacccactaacacaccatagcacaccaaaccaacatatata

SEQ ID NO: 647695 - DNA, 150 bp, Homo sapiens
gcccttcatcgttcccagctaggccgcttgtggcacttccatgctttagtcacatgcctgcagaggtctgtgctgaggtgcgtatcagttcatcagtagggctcttaaatggggcattatgaggtgaaatgcggcatttggatttgaccc

SEQ ID NO: 647696 - DNA, 165 bp, Homo sapiens
gatgtacacccgtgtccagcgtcagcatcgccacttcctagccggcgcaaggaccgcaacaccggcgagtttggtcgacgacacccagtggcaccggtgtgacgttttatgaccgcctggccgagatctgccggcgagtacctgaagaaaggctgacccgtgtat

SEQ ID NO: 647697 - DNA, 277 bp, Homo sapiens
agcataaatagtgagccatatctgataaaggcagtaactacgattcaagagaacaagagtaggtggcatggtgcctcatgcctgtaatctccgcacttttggacgccgaggtgggtggatcacttgagttcagagttggagaccagcctggccaacatggtgaaacccgtctctactaaaaatacaaaaattacgtcgggcgtggtgatgcacctctgccatcccagctactcaggaggctgaggcacaacgaatttacttgactctaggaggcaga

SEQ ID NO: 647698 - DNA, 307 bp, Homo sapiens
  misc_feature (9)..(9): n is a, c, g, or t
  misc_feature (73)..(73): n is a, c, g, or t
  misc_feature (95)..(95): n is a, c, g, or t
  misc_feature (128)..(130): n is a, c, g, or t
  misc_feature (145)..(145): n is a, c, g, or t
  misc_feature (172)..(174): n is a, c, g, or t
  misc_feature (180)..(180): n is a, c, g, or t
  misc_feature (185)..(185): n is a, c, g, or t
  misc_feature (188)..(190): n is a, c, g, or t
  misc_feature (283)..(283): n is a, c, g, or t
ggaggaaanaagggggcacagcaggagtgtatcttaatcctttctcaaagaaaaagaagtagagcattctganttgctgaaaacctgtgcaaatngggcttctgaaacattgtactgtgagctctcannnaaaaggaggaaaaanatgttgataaataaggaggcaatttcnnnaagaanggganaannngggaggcttactatttttaatgccctcagccccagtacctgataatcagaggagaccatgtccaatcttgaatcaattccctgttcaaaaagnggtgctaataccccggggacaaga

SEQ ID NO: 647699 - DNA, 128 bp, Homo sapiens
tagtgaatgaatgctgggggaaagcccagggcctaggtgttgcaatgttttgtggttggcaaatgctttttgttttgttaaaaagggccacaaataaaatttatccatccctttttgcttctcaggga

SEQ ID NO: 647700 - DNA, 332 bp, Homo sapiens
ctgccacttataaagtgagagaaggaatatacgtaaaagatcagtggaatggttccatcctgccaacgcgatatgaacatctggtccagagcttcaagaagattacaaatgtattgtcatctctaggcctgctgatcacttttcagattttctaccagtgtgttcacatcaagaccatcatgacagccttagcattatgcatatgcaacatgcgtaccgtccctgatgtctcccgtcccctctctccctttacagaagcaattacttgggcgggcacagtgactcacctattaatctgtttatttcgcgacggagtctcactccatcacccg

SEQ ID NO: 647701 - DNA, 135 bp, Homo sapiens
agggcatttccccggggggctttcattttttttcctgccaccctgtgaaaaggggctttttgccatgattgtaagtttcctgaggcctccccagccaaatggaactgtgagtcaattaaacctgtttttttcata

SEQ ID NO: 647702 - DNA, 126 bp, Homo sapiens
gctcgatggtacccaccacgtgaggcatcgtgctcccccgtttggcctcgcagccatgactggaagttgctgaggcctcctcagaagcagaagccgccctggttcctgtacagcctggagcaagat

SEQ ID NO: 647703 - DNA, 112 bp, Homo sapiens
tttctttcttctttcttccttccttccttccttccttccttccttccttcctttctctctctctctctctctctctctttctttctttctttctttctttttgatggcgtct

SEQ ID NO: 647704 - DNA, 770 bp, Homo sapiens
cagacacaatttctgtattcatctgagagccagttgaccttaatttctacatctaaaatacgaacatatgtacactattatataatagcagaactaggtctgtaaagctttaactaaaattgccgacattcttaaaggctgtttacaagaatttatgtgtagtctaatatggctgtagcctggaaattagtctagaaggtcctagaacacagtctcaagggacttgtatgtagagactcttcactatatactgaggcaaaaatcatagggtgtaccagtattataacatctagtagccagtagagaaacactacactctatagaaatctctgatttgacaacatataagaaatccttgacttcagatactcacgtggtctcctagtatgaagtcagccgacaggtagcgtcatatgagaagagagaaatccccagcatgctcaagctgctgctgagattgtgtgctaggaacaggctatccctccggtattcccctcagtcaaagcttgagccagcctctggatcgatgtgatctctatagcatgtttccatggggtgtacctatcactttaagccaatccgtgctgtatgcactgcttaaggttaaatagtaagccgtagaagattagcacatgtgcagatcctgttgctatctgatagcatctcttccgccacgtgtaagctagccacctggagggcgtgatgggatattatagcagctgatcgcacatctgaacaggggacccatatttaatctccctttgatctca

SEQ ID NO: 647705 - DNA, 643 bp, Homo sapiens
  misc_feature (72)..(72): n is a, c, g, or t
ggagaataagggtcagtcattagtatctgaattacataattgctgaaatacacaattattaccaatttgttncacattggaatgtgataacactgggatgctcattaaaggtcaaatgtaagggcctcaccaacaaaaacaggactggcctaagaacctgcattttagcacaaccccaagtgattcttactcagatgaaatcttgagatattgtctcatgtaattcaggtaagccaaataaataccttcctctctcagtagatttttggagaggggaaaaagatgtttttcccttcccttgtaagattctaaatataagatttaccatataacatataaataaataagaaataaatttatttttagatatatcactagaatgataatctaatcattcacttgataataattatagggaagcaaaatgccaccggttggcatattacatgttttgcacgtaatgctatttatttttcaagacacagtttttctcttagtgcttaaaaacaattgttttagctttattattaattaaaataagataaactagccaataactgtcagtattaacatgaagtatcaatataaattttattatagactaacatcctttaacttattttttattctacaaagtgatgcc

SEQ ID NO: 647706 - DNA, 115 bp, Homo sapiens
cggactctgaagtatgggcaataaataacaatgacatcattgacaaagcatggggaccactcctcgtagggaactgggcttttcctctccagccagagcacccagggcttcagag

SEQ ID NO: 647707 - DNA, 497 bp, Homo sapiens
cggagcattacccgggcaactcataacagcttctcctgggctgcccaagctgctcatcctggttctctggtaaaggccaaggcctgggacactgggcatcccccttcacttcctaagacatggctaactaaggactctagcatgtgacaaactctaccagggcccgaaagacagcacaggggcagaggttcttcctggatcatctttcttctaagcattagcctgttaactggtgcatcagaaccggcccgtgctctccgggaaggggatgtcccttccaacatcccctctccgggggcccaggctcctaccttaagtctcggggttggtcagcagaagccaaaatcagtcaccattaatatcagctcaaataaggtttaccggtgagtgactgaaaacccaaaataacagtagccttgaatgatctatggtatttcagtggtgtcagttgtaatatctccggtttggtatctaagtgaggtgattgggattttctc

SEQ ID NO: 647708 - DNA, 145 bp, Homo sapiens
ggtggggtaacaggtgggacctggctacccgttcgggctatttgtaggtcatgtacagaacatgatcaagggtgttacactggggcttccgttacatgatgaggtctgtgtatgctcactgccccatcaacgttgctcatccagg

SEQ ID NO: 647709 - DNA, 360 bp, Homo sapiens
ctcccaaagtgctgggatacaggtgtgagccatgcgcccggtggtaagtactcttatgtgaagtgtgctttagttttatgtaaaagtgtctatgtacatattatatcaaatgataaatatattacttcctgtgtatcgcatttaaaaagtaagagaaaataatttgagagagactagtagtgtaagtccagacaagaggtgcaggggcccaaataaggacagatgagatggacataaggtacagataacacatttcagaaaataaatgtgcaggacttgtcaatagataacaggtaagggaagaacgaagattaaggtgtaaaaagtaggggaaggagtggatgacacagatagggacgt

SEQ ID NO: 647710 - DNA, 925 bp, Homo sapiens
  misc_feature (925)..(925): n is a, c, g, or t
taccaggcttaattcactattatgtttctggtataaaaaccctatgtggtagccacagtgggagcctgagtccgctgcagggagactcgggggggggtctggacgagggggctcagtgaacctccgtgactagggagactgggtgaatacagtctccttccagaaggtcgggggctcaggtagctgtagggtctataaaagagggcactcaaagggggcctgggcgaagtctgcccagggtggcagtgcagccccgggctgagggtgtagcagctcactcgaataccagccatcagtgagcagcttctaaggcacaggtgcggaaacgagtgccaggtgccccggggtgtgccgggattgaggcgataccagcacagagccgcaggcggccgtgtcacctggcaggggacacgtgtggggctgtgccgatcttgtgttcccccaagtagccctctgggcacggggtgacgatggaaagcttgggccaggattgatggccccagggattggcgggtggccacctcctttggagcatttaacacccagaccgagtgtgggccatggtatgtccccgatagcaacaaatggccttgaacctgggtgcgctggccggaacgggtcggcttctggccgtgggcataaattcttcaaaacctaatccttgaaagaggcccccaggagcgacactcagggagcctcgagaatcctatatatgaggcggggaggaacggagatgagaatctccctcacgaggggacctgggaccttgccagttgctccctatggaaacaaagggggggccaacgtgtgggggagaacggggcattccacactcccgctaaatcacggcgggacatgcctacgcggagaaactcacggaagatcgtcgggccccggaccccggccccagtgtccggagaccccn

SEQ ID NO: 647711 - DNA, 338 bp, Homo sapiens
acacaaaaccggcccgggttaatactatttgcgggggcttcgtatgattatgcgttgattagtagtagttactggttgaacattgtttgttggtgtatattacagcgatggctattgaggagtatcctgaggcatgggggtcaggggttgaggtcttggtgagtgttttcgtggcgtcagcgatggaggtacgattggtactgtggctgaaagagtataatggggtgactggttgtggtcaactctaatagcgtagcaagctcgaataatttatcgaaggacgaccggtcaggctcgattccccgagcatcctacttccccggtgcattcctatctcc

SEQ ID NO: 647712 - DNA, 1778 bp, Homo sapiens
  misc_feature (226)..(226): n is a, c, g, or t
  misc_feature (348)..(348): n is a, c, g, or t
  misc_feature (396)..(396): n is a, c, g, or t
  misc_feature (417)..(417): n is a, c, g, or t
  misc_feature (601)..(601): n is a, c, g, or t
gggtatagcatcgggtcaagccttacctcgcatctgttgtcaggtctatggaagatacgcacgaggcccctatcgctgatagggagttgccactggagacgcgcgtggaggcacgctgacgggagttctaaaggaacagagccgtgcattggtgcaggagtccatgctgaatctcagagataggcccgctgagcagcaatggccagtactactggtcctcagaatnacctgcacctgggtaccctctgatgaggtccttgcggctgtctggggacttcgcaccaggatccgcaggctagctccccgagagagattggagtgggacctgttcattgtgtgtagaggctnatggaggatcttctggaggacgtgacggcgtagaaggctgctcttatngtgcgaactccatggaacctngtagaactgggaacgcactctgcggcatatagcacgcgctgatcattggccacactacatgcgaggggaagctggctcacgcgaggcgggcacaccacaggcaaggtggctcactgcgcggcgcaaattttgcctgaaaaacggcgtgatggtcacggacaccgggatggaatctcggcgcgtncccactgagggcgttacccgactcccacacaggtagagccagagatctagactagggcagtcctggtttgcgctcgcatggaaagccggcaagatgtaccttgcggggctggctgcgtagtccagcgtcgtggcgttcacttctccacgtggcgcccccgtcgatcgtcgtttcgcgagccctgttcgcgggccaagggacttaggttgccgactgtagagcaaaggcctaggggtagggtttacctgaaacttaaagaattcggggcggcctcgcccgtccccgaagtgctaggtcccgaagcgcggctgaaaacacttggccgtgttcagtcaatgagcgggtcaccttcgacagtccccagaagtttgccgattagggcactatgtggcagtgtccctggagtgcttgaaatctcggagctagaggctaggcaaccacatttcctaggccttttctgcaggccacagcttgttacccttgtaaacacttttggtaggcctttgccacaatctatcggaaagaacgctccgtgggagagtcaccccgaacagaatccacaccatacgctaaaggaaacgttacctgtcagcagagaaagtttggccccatccttggagcgaccttagcacagcggttgcgaaaatgacggggagagacccactaagcgtgtaaccaggatgtggcgatcccgtagaaattcccgagagagagaacttaggggagccccagagagggcatatacaacccgtggagacactgggacccagccgcgcgactcgctggcatatacaggcagggacaggcagagaagtcggaacccagtagattgaagacatcatacgtggtccccagcacagaggacagggagagccacaagggcagccctaccagaaaggggcgatcaccacagaggccacagttaattgcagaagagaaccagcgcgggacaggcaccacagagtactgcagaaacggcagcgagcatacgccagacaagggtaggtacgaaaacgcagggacaacgtacgagaaaggtaggactgagcgacacacacccgccagaggctgacgcatgccgcactagtgggcagccagaacaacaggacatctcatacagagtacggtacgaaaagcagcgtagcgacgaccgcacgccacagaccagcagacacga

SEQ ID NO: 647713 - DNA, 847 bp, Homo sapiens
  misc_feature (81)..(81): n is a, c, g, or t
  misc_feature (90)..(90): n is a, c, g, or t
  misc_feature (120)..(120): n is a, c, g, or t
  misc_feature (171)..(172): n is a, c, g, or t
  misc_feature (174)..(175): n is a, c, g, or t
  misc_feature (179)..(179): n is a, c, g, or t
  misc_feature (185)..(185): n is a, c, g, or t
  misc_feature (189)..(189): n is a, c, g, or t
  misc_feature (229)..(230): n is a, c, g, or t
  misc_feature (232)..(232): n is a, c, g, or t
  misc_feature (249)..(249): n is a, c, g, or t
  misc_feature (257)..(257): n is a, c, g, or t
  misc_feature (259)..(259): n is a, c, g, or t
  misc_feature (269)..(269): n is a, c, g, or t
  misc_feature (279)..(279): n is a, c, g, or t
  misc_feature (282)..(282): n is a, c, g, or t
  misc_feature (318)..(319): n is a, c, g, or t
  misc_feature (324)..(324): n is a, c, g, or t
  misc_feature (338)..(338): n is a, c, g, or t
  misc_feature (348)..(348): n is a, c, g, or t
  misc_feature (359)..(359): n is a, c, g, or t
  misc_feature (379)..(379): n is a, c, g, or t
  misc_feature (399)..(399): n is a, c, g, or t
  misc_feature (406)..(406): n is a, c, g, or t
  misc_feature (422)..(422): n is a, c, g, or t
  misc_feature (431)..(431): n is a, c, g, or t
  misc_feature (449)..(449): n is a, c, g, or t
  misc_feature (453)..(453): n is a, c, g, or t
  misc_feature (484)..(484): n is a, c, g, or t
  misc_feature (487)..(487): n is a, c, g, or t
  misc_feature (501)..(501): n is a, c, g, or t
  misc_feature (505)..(505): n is a, c, g, or t
  misc_feature (722)..(722): n is a, c, g, or t
tgcgggcccaggtggccggcgcgcccgttgggcactgggggacgcgggcgcgtcaggtgaagactgggggccgcacgcgcnaggagaacnatgccatttttgggtcaggactggagatcncctggatggagttggattaagacagaagatggctggaagagatgtgcatcnngnngtcngaaacntganagagagaataaccgttgtaacatcagtcacagcattatcnnanatagtgaagatggaganatattccntnatgaagagcntgaatatgcntcnaaaaacaggaaaaaggacccttttagaaatgacacnnatacnccccaggcctggcnattgcccccngggagaagccnttaatcggttagacttctcnagtgccattccagatatccnaagttcnattatgtggtccaacngttgccgcnaattgccaaatccccgtnaacntccttgagtggcgtggcacagaagaattacntcnaccttttggataanctcnttccacaggttcttgatgaccaccaccctcctcgcttaatcaaagatcttctgcaagacctaagctctaccctctgcattcttattagaggagtagggaagtctgtattagtgggaaacatcaatatttggatttgccgattagaaactattctcgcctggcaacaacagctacaggatcttcagatgactaagcaagtgaacaatggcctcacccncagtgaccttcctctgcacatgctgaacaacatcctataccggttctcagacggatgggacatcatcaccttaggccaggtgacccccacgttgtatatgcttagtgaagacagacagctgtgga

SEQ ID NO: 647714 - DNA, 421 bp, Homo sapiens
  misc_feature (37)..(37): n is a, c, g, or t
  misc_feature (41)..(41): n is a, c, g, or t
  misc_feature (109)..(109): n is a, c, g, or t
ctacataaaatatctggctgtgaaacaaaccaggagnaggnccacggggcgttatccaagcagctctgcagaagctccgtggaatcggataccgatttcagacagatcnatcctgcgttcgtctctttcctctcttctctttcttcaagaaaaaaaagttgatcctaatgatttcagcccatgcattaaacagaaaacaataataactgtagaattcatatttttctaaagggaacttaaaaactgctgctacatgtatgtacaaaactggtctctgctacatgaacagaatcacaggtttggttttggtacttttgtttctctttgtactcagttgtgtagaacttccaaattcagagtgaaaagaaagctgttctgcatcaaaccatctaagcaataaatgttatatttaaaaaacgga

SEQ ID NO: 647715 - DNA, 324 bp, Homo sapiens
cccccccttttttttttttaaagggggggcccggggccccggggttttaaaaatttttcacccgggcccccgggggggaaaaaatggggccccccctgggagcccccccttgtttgggggcccccttttccccaatggggcccgggggccccccctttttgggggggggaaaaaaaccccccccgccggttttccctgggggggcccccaaatttttccttttggggtttccccggttttttttacccccggggggcccccggtttccccccctttgggggggggggccccccccttttttttccctttaaatttcctttttga

SEQ ID NO: 647716 - DNA, 731 bp, Homo sapiens
gagtgtggggaagcttttaggactagccgacaacttactggtacatcatagatttcattatggatgagaaagcctacgaatgtaaggagatgtggcaagggctttagtgtgtatggacgacttagtcgacaatcagagtattcacgactggtgagaagccctttgaatgtcacaaatgtgggaagtcctttaggctcgaaagcaggccttaaagtacatcagagtattcatactggagagaagccgacgatgacatgtacaggaatgtgtgataatggcctttcgtcagttttcccaccttgtgggtcataaacagaattcatactgcagaaaaaccctatgaatgcacacggaatgcgggaagggcttcacatgtaggtatcaacttaccatgcactcgagagaatgtattcaggggagaaacactatgaatgtaccgcaacatggggaggcccctagtagtggccatcaacttactgcacctcgatacattttgacagtgttgagaaagcttataagtgtgacgaacgtgggaaagcctttagttgcgcatggacgacttactcgacctcagggtattcatagtggcacagacacccctatggaatgtaccaacatgtgccacagtcctacagcgctcaacttcattcccttcaagatagcagtccaagactattcataccggtgtcaacaccttacaatgtcacgcgcccgtgcggcacaggcctcca

SEQ ID NO: 647717 - DNA, 122 bp, Homo sapiens
ctaccgtgtacaagagatgataaagtaaatgcacgaatacaaatggagatttccaaggaacaggagctggaaataaaatataaggacattatgagaactgaaattgtcccatgcgaagttct

SEQ ID NO: 647718 - DNA, 854 bp, Homo sapiens
aaacttaaaaagcgtaaaatctcctcccacaattaaccagtgtcccctcgtaactctttttccccgatcggtcccagttactctctgggtcccagttggggtccccacaccccccaccaagcgggctaaaccttgaagcgtagggtccggcaaaaattataacggcctgaatgttcccttctaaagacgcctcttgttatcctcccgcctatgcccccgccgtttcttgtttcaaccaatttgcgcgcttaatccctccataataatcttgtcccgccctattattagcccccctctgaatttcaaggggggctataccgctgcgccacataactaactttaaagggggcaccttccattaactcccagacgcataggattggttcaaaatcccgtgcccctcccccgggtttcttctttgttatcgggtacaaaacacacaacggggttatcttctattagctccccaagactctggggtcgagaccacattttgccgcctcccccactggtgacaaggcagcattcatcgggttcccacgtgaagatgtgcccccgtcttctgacttggggaacacccgtctcctcccgagccttttgaatcggagtgtccccccccacattgttatggcaccaaacagggcgaccctagcctatgatgaaagtggcactctgaacgaagagtctgtgtgcttgcggcttctatgggtcaaggctgtctttgttgtcaccaacaggggccggcagtgttctgctcttcaaattggagaccgacgctgcgttgttgaatataatatcagcccaaagtggggccccaaaaatatactaagagacaactttacggccacataaca

SEQ ID NO: 647719 - DNA, 805 bp, Homo sapiens
  misc_feature (16)..(17): n is a, c, g, or t
  misc_feature (71)..(71): n is a, c, g, or t
  misc_feature (770)..(770): n is a, c, g, or t
  misc_feature (776)..(776): n is a, c, g, or t
  misc_feature (781)..(781): n is a, c, g, or t
  misc_feature (793)..(793): n is a, c, g, or t
  misc_feature (795)..(795): n is a, c, g, or t
  misc_feature (797)..(797): n is a, c, g, or t
ttctctgggtttaccnncccccggggtttgggatatgtctgacccacgccgctcgcccacgctgtcggacngccatgttggggtttgtgggtcgggtggccgctgctccggcctccggggccttgcggagactcaccccttcagcgtcgctgcccccagctcagctcttactgcgggccgctccgacggcggtccatcctgtcagggactatgcggcgcaaacatctccttcgccaaaagcaggcgccgccaccgggcgcatcgtggcggtcattggcgcagtggtggacgtccagtttgatgagggactaccaccaattctaaatgccctggaagtgcaaggcagggagaccagactggttttggaggtggcccagcatttgggtgagagcacagtaaggactattgctatggatggtacagaaggcttggttagaggccagaaagtactggattctggtgcaccaatcaaaattcctgttggtcctgagactttgggcagaatcatgaatgtcattggagaacctattgatgaacagaggtcccatcaaaaccaaacaatttgctcccattcatgctgaggctccagagttcatggaaatgagtgttgagcaggaaattctggtgactggtatcaaggttgtcgatctgctagctccctatgccaagggtggcaaaacttgggcttttggtggtgctggagttggcaagactgtactgatcatggagtcaatcaacaatgtcgccaagcccatggtggttactctggngtagcnggagntggtgagaggcncngngaagggca

SEQ ID NO: 647720 - DNA, 283 bp, Homo sapiens
ccgcgacagagtgccagtcagcgtggtcgagccttcggtgagaatacgtacatacactttcgaaccctggggcggccttggcgatgttgcgcaggtcggcttcggagtcggtggagagcaggcgcacgcccttctcgtagaagtagcggatgtccttggatttcttgatggtgttgccgtagctgatacggtcagggctgacgccgcggtccatgaccttgtccagctcgtagatcgacgcgatgtcgaagctcgaacccttgtctttgagcaggtcgatgat

SEQ ID NO: 647721 - DNA, 1114 bp, Homo sapiens
  misc_feature (16)..(17): n is a, c, g, or t
  misc_feature (71)..(71): n is a, c, g, or t
  misc_feature (1114)..(1114): n is a, c, g, or t
ttctctgggtttaccnncccccggggtttgggatatgtctgacccacgccgctcgcccacgctgtcggacngccatgttggggtttgtgggtcgggtggccgctgctccggcctccggggccttgcggagactcaccccttcagcgtcgctgcccccagctcagctcttactgcgggccgctccgacggcggtccatcctgtcagggactatgcggcgcaaacatctccttcgccaaaagcaggcgccgccagccataacatgcatgacataattcatatgcataaactgcagatgagagaaaacaaccgaaatgtaaaaaaaaaatctaaccatccaattgtggcaatgaaagcccctgtgacagtgtatatgcaggcatgttgtatgtagcctagtacttagtgaattgataagtagaaaagcctcgagtcgatgaataattgtgagatgatcttccgagttagaagataagcaattggaccaaacaaatttataatatgattcatatatagcaaatcaaaatatgaaatgaaagagagcacatagagacagattgcaaattgagatgtcaaaaatgaaattcaacccaatcggcacgtggtagacccagaatgaaaagagcctcaaaaacagatgcaaaaaagactgttgccaaatatagctggaatagcgcaaatgacggggttaggaataaacactcccctaacaaaaataaaaaatgatattctaaaattataacccccaatagctaaatactaatccctagacacctaaaaaaaatatctacccccaaatatttcaacgaatccgaaaaaatatgcacccatacactgtacaccacttaaaatccaagttaaaaatataatttagacttcctcaactaacatcacaacttaaagaggaattactaaatataattacctagtttgagagaatattacttaagtaccgaaacaaaaatatcgaccccctaaatgaaaccccaaatataaagtaattatctcaactcataaaaaagaatcctatagacttaaagatcaaattttaaacgtacagaaatatataaaacctctcacaacaaaaagaacctatatttaccacaattgactcgn

SEQ ID NO: 647722 - DNA, 210 bp, Homo sapiens
ttagcggctggtagatgtgctaccgccggttcccattaatgtcattcaggagcttttggtgtcctagaggattacacctcatctcctctgcacggttcaaggtcttttcaagctctcggaacatcccttcagtcattctgagctccttgctattctcttcctttattccaacatcaactctagtacataggacttggcacaatgtacctg

SEQ ID NO: 647723 - DNA, 297 bp, Homo sapiens
ggggggaaaaaaacgggggggaaaaattaccccccccgggggggggggcccccttttcccctttggacccccccggaaccccttttttttggggggggctttgggggggtaaacccccccccgggggggggggggggtcacaatttttggggaaccccccccttttttttttgggaaagggggaaagggggccctttccccccctttccttttttggtggggggccccccccttttggggggccctttggtcttggggttttcccccccccaaaaaaagggaaagggggggggccca

SEQ ID NO: 647724 - DNA, 810 bp, Homo sapiens
accaaggcaatgtaacttttgattttcggtcaatttaagttctttgtcaccaaatattaataaacagttttgacttcaaaaaaaaaaaaaaaaaaaaaaaaaaaaaaaaaaaaaaaaaaaaacacaaaaaaaaaaaaaaaaaaacaacaaaaaaaacaatttgggcggccgcgccgccgcccccacagaaatgccttccaaacacaacattcggggggcgccgcgggccccaagggtgaagaacacgatggacaaccgtgtgccacaagacatcgctgggcaaaagacacgggcggcggtgaccccccacaaaaaaccccgcggcgggagccaccgacttgtgacgaccccccacaggcagggtgtcgccaagatctcgggggggtatcaacacagcgggtccccaccgacgcttcataaaaaaatacccccgcccgtcgggatgacatcactccagaacgacacacacaccacaaccacaacactacacagccaagcaatcacaccacacaccaaccaataacattctcacaccatttctaaataccactgctatccacgcaactcactctacataccacaaccagccactactcaacacaaacatcaacacatctccttcatacaacatacacaaacatataataacgataaatatactactcaacactactcatcatcaccacatatcaacaagcaaacacacacatacttcaccccacaatatttgcctcgatatatactatattacaaattcacagacatagtcatactataatcaaaaataaccactatattccacaaataacc

SEQ ID NO: 647725 - DNA, 435 bp, Homo sapiens
  misc_feature (47)..(47): n is a, c, g, or t
acagctcgaaagattttaactttactgcaaggggtccatcagggtgntgggtttcaggacattccaaaaaggtgtttgtttttaatagaagacccaagaaatgatttaaatatcttatcaacagaaaaccagttctatcaactatgggcccagtatgcagcttttaaaaatgccagttctatatacattgatatgagcccatttcaaacaggtattcaataaagtatagaatggtaacatatccccaactgtgtaaagaaaaatatataaacatatgtttgcataggcacagaatgtatcatttcatatgatacattaaaaacaaaagaacatatagtgcctgtctttgaggggaactgtgaagctatggaaaggtgttgaagaaaccctttttatagtatgtatttttgtaattgaataaaaaataaaattcca

SEQ ID NO: 647726 - DNA, 183 bp, Homo sapiens
tagaggatcccactgcttatacatttactgggtctctattacctcctacagctcagagtattcgagtctccttcacattcccgagggatctacggtcacattttttgtagccacaggtgtccacggacgttcacgtcatttatttgggtcaactttccctcactatctagcttccggtcgaac

SEQ ID NO: 647727 - DNA, 108 bp, Homo sapiens
  misc_feature (68)..(69): n is a, c, g, or t
gggagtacaagttcaaggtctcaacagaggcctccgtcctcatcgaggaaaccattttcaaaggcatnnggcaggccccagggccacaagtttacaaccttgccccat

SEQ ID NO: 647728 - DNA, 101 bp, Homo sapiens
  misc_feature (34)..(34): n is a, c, g, or t
ctgtccgattacgctctagacgggcaggatgatncatttgagcccagagtcaagggttacagtgagggtaataatgacttgtggtgatagtagatatcggg

SEQ ID NO: 647729 - DNA, 111 bp, Homo sapiens
  misc_feature (6)..(6): n is a, c, g, or t
ccccangaatagcggagacgctgcgtgacgaggtcttcaaggagtggctcagcctcaacgtgatgcggcagcggcccgggctcagcacgaccagcaatctcccgcgctggg

SEQ ID NO: 647730 - DNA, 558 bp, Homo sapiens
  misc_feature (24)..(24): n is a, c, g, or t
  misc_feature (28)..(28): n is a, c, g, or t
  misc_feature (49)..(49): n is a, c, g, or t
  misc_feature (68)..(68): n is a, c, g, or t
  misc_feature (219)..(219): n is a, c, g, or t
  misc_feature (264)..(264): n is a, c, g, or t
  misc_feature (342)..(342): n is a, c, g, or t
  misc_feature (355)..(355): n is a, c, g, or t
  misc_feature (391)..(391): n is a, c, g, or t
  misc_feature (398)..(398): n is a, c, g, or t
  misc_feature (427)..(427): n is a, c, g, or t
  misc_feature (456)..(456): n is a, c, g, or t
  misc_feature (493)..(493): n is a, c, g, or t
  misc_feature (516)..(516): n is a, c, g, or t
  misc_feature (547)..(547): n is a, c, g, or t
gtcacgcatcgtctggtagtccangttnttacgatccaccaggggacancaccttgtcgatcacgcanagaccgcatgccaattgcgccaccttgaaactcgtcagcgttttgccgctgccgtggtgtgccaaatatagccacctgccgccaccgtacccaactgctgctgatgtgtggcagtgacaatgcgttgcaaaatgcgctcagcagcacagantctgataaggcctgcatcacccaacaacttacgattggcacttanaacaccgcagtatttggtcagcacgttgatgcagcgaactgcttggctgaatatacgttttgcgctaaaactagtcanactcggtgatcgngctgactttttcgcatctgcccaccaaatggctaancgagaanactgcttggacgctcttacctccttactngcgcttgttggattgctccttccacatgnccccggcgccgcatctgttatttaccgtcacattacntggctcatacttgcccatttgcngatccgcacaaaatagctggcactataaatnccgtaactaac

SEQ ID NO: 647731 - DNA, 1574 bp, Homo sapiens
  misc_feature (1013)..(1013): n is a, c, g, or t
tctgaacagagaggaagattaagtagtaacttgtgtgtgaaaaagtaaaagtttttaataagtagataatagtgaacgagaaatattttgctccttgggggggataatcttttgtgggtggccttgtttttaccatcacaaagattcgcaccacaaatgatgcgtggggtcctctatatccatcagataaagctttgttttgtgtgcctccctacttgtgggtgtaagtgcaggatatttccttctttgtcctcgagcagccacccaccgttgtgtatttggggacgccttgtagttccttcacccctcagggggtggagagcccctctagcactctatagccgcgctgattatttcgtccccgaagaccccccacgataatgtcccccgcttttgtggggattgcgtcaatccctcccccgaggtgttccttgtttcaacaataagccgctcctccccaaggagacatcgtgtgtcctgggggccctcccatagcctgctaagacgattttcctcaaggaaaagaggcgcccccctcaatttagtccggtggtcaacgacgccttgctctccttcgccccaccgaggggacaccacacgagggggacaccacacgccctgctacaccaacgacacctgggggaggcttcctcatccttcgttaaaagacggataagactcggcgcagagatccagcaacacaacaccacaacggcccggctacctcaaccacgatcggcgggaaaggagtgtgcttctcctggtgatgaggagggaagcatccgcggcgcttctggagccacccggcgcgcttgataagcgccacgcgtgctctcgcggcgcacacgcgggtcttttgtgccccccacgtgtgtgtccgctcccgcgcttttattaacgccacccacgcgtctcttgggtgtccacgcgcctctcccgctatagagatcgctgtagcacacgcgcacacacactcgtttgttctcgccacacacccgctggggtctcccgcngggtgatagctcccacactcgggagatctcgagcgcacacttctgagagtgaggctctcacgcttataggtctcacagagatctcggagatatagtttccggctctctctctcggctgtatatctctcgctttatagctctcgctcggtgagagattttatagccacaggagaagcctcgtggagagagaccacgcggtttcggtcttttctatagcacatgagacagacacacagagagccctcacactcctcacagagatggcacacacatcgagagctcggcgcggagattgagaagagagtagctcgtttttcgtaactgggagaaagggagtttttcacgcccttcacgaattcgcttccaccctctgcacgcttctcccctttctctgtaattcctagaaactgagacacacacagctgaacactcaccacgcttaatttcctcactttttataaagtcccttcaccaaccccgtgttttaggagcatgagtgccgctgtgtgtgcgtcctcgtcggaagcccgtctcctctctctgtaataaactcatttctag

SEQ ID NO: 647732 - DNA, 107 bp, Homo sapiens
ccggctgtgcttgtaggccagcgaagattatggcgacactcttgccgccatccaggacttacctgaagaaacatgaagctttagagacagacttcaccgtccacaag

SEQ ID NO: 647733 - DNA, 604 bp, Homo sapiens
tttttgggcccccaagcgggcccccttaagagcaaaattatttatgccagctccagggcgccctccagaagaagctgccagggatccagcatttattgcaagccaattgtttcgaggggtgcaaggacccctgccccctggcaaaaaaaattgggggcagtgccgttatttccctggagggcaagcctttgttagccccttttggccccctgcctggaggatttggcagccccccccctggccttggggggtgcagggtgcccccttccttccaaaccggagggggtgggggggttcccacaaggggagggcaatccctttccccccgttgccaaacaaacccccccccccctgggttttccttttccccccctcccctggggggtttggccttccccaaatggttttggtttttttattccttttggggtgaaacagacccagttcccccccggcccccccgttgtgggggggcctgtttttttttttaccacatcccccttccccccctgggcccccccccttccctggtgcccactttttacccccataggggctttggggttgtttgttttgttttggggttaaatggaatgttgtggga

SEQ ID NO: 647734 - DNA, 266 bp, Homo sapiens
  misc_feature (79)..(79): n is a, c, g, or t
  misc_feature (185)..(185): n is a, c, g, or t
aaacaaaattattctctgagagggaaaggacatttgagggaaacatcaaatttccccataaataaatgaatggagtttncaggaaggtgaggatgagcagagatgtgtgtggacatctctgcaccatccatcgctgtatcaaatggattgattctaatccatgcggcatcaggcatcaccacganccaggtacagtcatggcagcagccctatgtcacgccccagtaactagcctgaccctcactagctctgactagggtgtattc

SEQ ID NO: 647735 - DNA, 238 bp, Homo sapiens
gcggccgcctactactactactgctcggattcaagcttctaacgatgtacggggacatggtgaaaccccatctaatctaaaaatagccaggcgtggtggcaggcacctgtagtcccagctacttgggaggctgaggcaaaagaatggtttgaatccaggaggcagaggttagagtgagccgagatcacgccactgtactccagcctgggtgacagagctaatactccatctcaaaaaa

SEQ ID NO: 647736 - DNA, 590 bp, Homo sapiens
  misc_feature (269)..(269): n is a, c, g, or t
acccctcttcggtctatgttattctcctccccgtcgcccctattctctggcgtcggcggtggtgttgtattacatacgcggctgcgccgccggccccgctcgacagtaagattcttgtgttgctctttagtatgatccgcgccgctcccctccctactttatatatgggcgcgcggccatatgtctttctctcgccccactcctgctcgcgctctatctccgcgcgccgcccgccccgcggtctgcctctgttgtgtcgggcgagaggnctacgcggcgccgcaacgatgctggttttgtgccgcagcccccgcttgcttacgcaagtgtttcctctctcgtcgtcggcggtcccgcgaagaattatgctccgccgggtattgctccccacctatccgccgccgggagcacacctgggtgttcctcaccccaggggctgccctcctttcgcccgcggcgctccccccccacgttgttttctcgcccccggggggtttgggagttttggcggccccccccccccctgtgggtaccccccccggcggccgcttgttcctcaaaacacacaaggggtggtgtgtaaaaacaca

SEQ ID NO: 647737 - DNA, 115 bp, Homo sapiens
tcatcgaaacccttacccctcctgtgtatctgagaccaggctcttcccatcaatattccttgtagtctgctgtctcacccgtatctctgtcaattgagatacggtcattatatac

SEQ ID NO: 647738 - DNA, 351 bp, Homo sapiens
aggggttttaatttttttttcccccggtgccccctggggaaaaaggggctttttgggggggggtggggttttaaagggttcggttaaaacctcacccctttttaaccgggggggggtttcttggattgcgccaaaaaaccgggttctttaaatttggggggccgggggcctgggccttttctttgttttccctggttcccgggcccccgggccccctttgccccccctggttggccggggtaaggtcccccctttcccccgggtaccaccttttttgccggttctttttgggaggggtttcccggggcccgggttttgggggcccccccttaattaaattccgcccttttt

SEQ ID NO: 647739 - DNA, 162 bp, Homo sapiens
aggtctccagtgggtgcacagctggagtctgtcgctgacctactgagacagcacagccaacctagctagcaacatttgttttagtctgaccaatatatactatataagaattcagtcaatgataccacaatcttgaaacagcttcaatggggtggactctaa

SEQ ID NO: 647740 - DNA, 196 bp, Homo sapiens
  misc_feature (153)..(153): n is a, c, g, or t
ggctgattagaggatcccccagtgcgcttgttggaggtgtcagccagaagaagatgcaccgaatgcacccagtggccactttctgcgaatgcagcttgagaacgtgtcggtggcgctcgagtacctgggacgcgagagcatcaaactggtgtncatcgacagcaagggcatcggtggacgggaaccttgaagctga

SEQ ID NO: 647741 - DNA, 261 bp, Homo sapiens
atagtaggtgtacaagatagaatcgttagttccactactaacttcgcccacagcaaccgtctagagtaccctagtagaatttaactgctagtccacacagaggaacagctcttcggaccctaggaaaaaactatgtagagagagtaaaaaatataacatccatagtaggcctaaacagcagacaccaattaagaaagcgttcaagctcaacatccaatacctaaaaaatcccaaacatataactgaactcctcaacacaag

SEQ ID NO: 647742 - DNA, 931 bp, Homo sapiens
tatccattttttctctttatacttgcatagtatgctatgtgtttctcattgtaaaaggctgccgctgggtggcagaagccaagagaccttattaactaggctatatttttcttaacttgatctgaaatccacaattagaccacaatgcacctttggttgtatccataaaggatgctagccctgccttggtacttaatggtctcaactactatcaaaaaacaaacacacatatctatcaacccatttcactactatatcccactactcaaggtatccatggaagcatgacacagaataacatttatgcagcaggaaaacaccaaaacatccctgaaaatatacacacctcatacaccacacacgcacaggggaactaacatacagaaacatcattttcctcaccatagacttgatcccaatccttacaacccatccttctaacctccgatgtgctatactacatactgccacacatttcaccaaactgttcttcggtcatttcaaacatacttcagtatcatcaatatcagtagataccagtgggctggcaccagggtcaccaccttgacaccctctgaccgcaactagccatactcacagcccttccaaccctgccaaatattgccttcagtcaccccagtgcacaccaggtgaactcttcaaatgcgtgaacgcactaccagttacagctaaacgtacccagcacagacagccttgggctaatatattagcacagctccctgacccatcagctgccatcctagcacccttccaccagaaaccatggacatccccttcacacactggactgccgcgctcatttcctggtcccccacatactggacttcctcctccacgctgctctcctcacgatccgcaccacgcatcatctggcgcaaccctcttcccacactgctcccaccacccacac

SEQ ID NO: 647743 - DNA, 682 bp, Homo sapiens
tgccgccccccgcagaagcgcggccacccttagcaccggagcctcaaccagcagcttcggcttgttctctcgtgaggttaaacagcagctacctgctatacatggcaagatggctggttatactctgggaactattctgggtgggtgaggtgggcagtggaaccatgacgggcccctatccactcactgtcctcactcggggcaggggaacagcctcgtcacaagcaaaaggccagagtcacagtggtgggtagaacaatggtccttgccccgctcttgggaactcactccataggggcagtgcttggcagttccagacctggggaaagtggtagcgtcctgtctgggggcagattcccaagcaagagtgacccatggttaagggtctctggaaacatggagagagcttgggatcctttcctcctggggcctatggtgttgattgcagactggaggggtaacctcctctgaaggtctttatgtgccaggcatggtattgggtactttctgcattgggaccaggcagccgggcctgccatttgaggcaacgagcctccatgacctgtcctccctcatttgtaatagtggggtcacagctatgtccccggccagttgttggcattaaagtggtccttttagtgcccagccaaaattctcaattaagccattcagtgagaacaaa

SEQ ID NO: 647744 - DNA, 153 bp, Homo sapiens
agtcttacctatcgagtacacgtcatgcaattggtacagctaccttttaggtacactgctttgacactctaaggataggaattacagaagcggcattataggctgtgcacggcattattgatttgttgacggatcgttcgtgacaaatattga

SEQ ID NO: 647745 - DNA, 181 bp, Homo sapiens
agccagtgaaaagactcggccaaatgtcccaccgtgcctcaataccccactcttgctaagccaccaaaagggcctacagcccatcgtaaacaagctctgctcatgcagctcttcttacgaccaacacactctccactataacaccccatatcctccctggttaaaacagtctgactggctc

SEQ ID NO: 647746 - DNA, 757 bp, Homo sapiens
cccacgcgtcgccgagcctgagcctgagagaagagacctgggaaattaatatttcttgcgagaggtacagtgtgtgggattgcaggctgcatgatgcaggggattcatggaaaggcattgctgtacctgagcccccagcatggctgggcctaaagcaggcgtggcaagccaggtgtgtgccatgaagagcatggtgagcaggaacatgggctgtacagcctgcaccgcatgtttgagatcgtgggcactcactctgacacacagagatgtgcgcgatgccttacattatccatctatgctctgagtgtcacttgcatgaccacgacgctctggcactcgatccgacaactggacagtgacatatcttagtatggcactgtgacgcgcccagggccagcatggtgatagaaacgtacactcttctgccaggatgactagcatgcttgctgcagcatcaatcactcgaccaagacacgtgctgccctacgtcaacccgtcaagaggagacgaggctgtgtgcactgatcttgatagacaagtatctggaggagaccatcaatgtcgatatgtgaccccacagaagccctcatgtgataccagacaccaaggcctcacacagcccctctaagaacaagtgcatcaccacactataacatgatgagcgtggtgggccaagtacgggcgtcctcagcactgtgttagaatgcggccagaccgagtggaaaagagaaaaatggaaagccaggcacacgccgac

SEQ ID NO: 647747 - DNA, 342 bp, Homo sapiens
acgattcagatccaaattattcatttgacctgttaggacggagaaacccttcaatattagcttaagaaattgagtaattttgggccgggtgcagtgactcacgcctgttatcccagcactttgggaggacgaggcgggcggatcacgaggtcaggagatttgagaccatcctggctaacacggtgaaaccctgtctctacaaaaatacaaaaattagctgggcgtggtggcgggtacctgtgatcccagctgctcaggaggccgaggcagagaattgggtgaacccgggaggtggaagttgcaagtgagccgagattgcgccactggccttcagccctgggc

SEQ ID NO: 647748 - DNA, 891 bp, Homo sapiens
actccattataatacagtatgtaatctactgttttgaacggtttgttcagcattggctatttaaaaaaatatttataaagagattatttctttcagttctggaggcaggaaagtccaaggttgaggggttcacatctggtgagggccttcttgctgtgtcatcccatggcagaaggtggaaagtaaaaaactggaaacaaccaaatgtccatcgatggatgaatgaataaatatctatgagatggaatactacttagcaatgaaaaagaatgaagtatggacacatgcagcaacatggatgaatctcaaaatgattaagatggattcttgctctgtcgcccaggctggagtgcagtggcgctatcttggcccactgcaacctccatctttgggggtaaagcgattctcctgcctcagcctcccgagtagctgggactacaaggcgcacactgccgtgcctggctaatttttgtgttcagtagagatggggtttcaccgtgttgcccaggttagtgttgaactcctgagctcagacaatccgtgtgcctcggctcccaaagtgtctgggattacaggcatgagcaccgcaccggcccggatctgcatttcacaagtcttctgatggtcctctgctctggggtcgagaagtcttgttctatggtctctgaagtgtttgaccattcgattcaaccatcctttggtctttgttaggtctttcttaaggcccggctaagggtgcagtccctcttctgggggtcccctttcgcggtgtcggcgcggggttcacactctggccgcttccacacgtgggtgtgcacaccaccctaatggcgcgggagcgcgcgggctcgacggcgggccctctgcgctctcgcggcggggtgtgtgttg

SEQ ID NO: 647749 - DNA, 1051 bp, Homo sapiens
gctcgaccagtcaggccagtcttggtatcctgtcgtgtggagggatctgattgttgttacattgcacctgtcgtccacgcgtgggaggactgcgagccatcgttccaagtgagaaatgatgctagaggccggttttgaggagtcgaggtgactgacttgggttagagatgcagtctatctccatgcatgctccgaggagacctgttcgaagaacccatgcttctgagtgaagcactagactctaggatacgcagatatgctccatgcgagagcaaagaagagcaggcagggtacgctgagatgagctccctaagggtttgcgtcgattaccagattgccagcttaacatgctgatatggagctctatattgaggtgatgcgacgatcccgctatgtactgctattgtgtgaacgcactgcattgttggctctagccgcatgtcctggaggcttgtgcgggtggcacttcgaatccctgcagactacagatgtgtcctccattttaatcctacactctgtacgaccctgcggcgagctgacatgtcgagttccctcaattggtgccccgtcatggagtactctcttcataggagagcctcgtaccctcgaatgaggctgcttggaatgcgcgagaaggcagccaagctttacgtcccccccggactggtttagttccaaaaaaatgcacgctgccgtacaggattgcgtcagggcagaactaaagcgccctttgtcctgtgcggctaccgcgctttcagtctacgtgtcgcatgtggaaagttaaccgtcagtatcaagtctgttcccagacttgaagcgtcatatactggctctgcaatcggttagatgctgcaggctggcacgagcagttgggtacgatgaacggcagtgaactctcttgcccgttctcccactggggggaaccgagccaaactccgttttaggtgcctggaacgaactctctgaagggccaggtatgaccgtagcattgacaaaaaggccccggggggggcccacaaagttgcagcgggtaacgagactctccctttga

SEQ ID NO: 647750 - DNA, 841 bp, Homo sapiens
gggcgagattcccccgccgccccggaagactttccccgtgcctccacctcccctatgctggggatggcgacgatgcagagaggtgcttctagggaggtgccttccacgacggcaagccttcccggcgaagccgaggtgaatcataatccaccacatgcagactacgtggtagtcgaggagcatctatccgctataacagaacagtgacgcacgcggaggacgagggacgcgggctgagaggtactcccacatgaccagcgcgcccggccgcagaggcgccagcgggagcaaggcgtgaagccagggaactgcggagaggggaagaatcagaccactgcaggccacgtccgcctgcttgcggatgagaatgaagccccaacatgacgcccattaacaagacggcacccgcgcaagaagcttcgagtacgtagcgagcagcgtgccatgtcccgcacaagccacaaggcatgggcaccaaaatcccaaacacgggcatgacagagcacagagacacaccaacgacacaccccaagcgcactattgccaagaccgccggggggatccagacaccagagcgacccacccgcagatgaaagacgctacgcgccgcggcggaccgaggcaagccgacgctagtcccacagggccattcccaccaagacggcaatgagagaccgcacccaaaaagcgcgataagcacgggagggctatcccaggggacgatacccaggaaagacaccagagcgcaggccactaaagccatgggcccagctggggaatacacagggcgcccgaccaaaagaggggacggcaccacgaagcgaccccagccacgcaccag

SEQ ID NO: 647751 - DNA, 849 bp, Homo sapiens
caccgatttcatcctgtcttcatgattcagaatgctggaatgttaactgggattcaacagtccattctactcattacctgtatgcaggagaaatcgaatggagtaatagaaaaatggaagatggtgtcgttaataaaggcatttaattagataaaaacatctcctaataaaggatttgaagctgatcctattatagttagaaagataatttcgctttcaaacgtgaggtccgaagaaaactaagttatggcatcagtctgtgaaatagtaccattattgtgttaaaatgcttcagaaaggttttcagtgtgcggtctgagatgcctggtatataggagctcttgggaaatacctatttttccagtcattcgcatgcatatggatatcaccatgaagcaagagacatgcattctataatcatgtagacactcagactcaggggaaaataccagtcatatcctgaaagccgtgttaaaactctatggtaggatcacagattcaaatggtctcagagaggttgcattccaagtaattgttctagtgctttcaagagcaagtacatcaaaatgtagaaggtacatatgtgatgcaatactagtatgacatctattccaacgtctctaaggagccaattgaaaacctagatgttcttcacagctctgtgttcgtgtacgtatgttcactgtaggaacttgcagtccttacttttggccaggcattcctaaataatagggaggcccggaaattacctcaagctttggtaccctgcaaagtggagggctcacaggctacacataaggtgaaatcaccagattcccgaaaagcggctctttttcagccacgccgggg

SEQ ID NO: 647752 - DNA, 131 bp, Homo sapiens
attgcagcctgttcagtgacacagccgtacccatgggatactgctaagtgctacaactgaactatcaaacaatagctacttgtgaatggaacattaagtgcattctcccagaacacttatctaaagtgcat

SEQ ID NO: 647753 - DNA, 1014 bp, Homo sapiens
gctgctctggtggtcttggatgagagccccatgagcgcgggccctggtgggctacagcagcaggggctccgaggatgagtccgaggacgggatgcggaccaggccgggggatgggagctcaccgtcgtggccagagcccccttcccaggcagagattttcagtagcctgacagtgtgctgaacatgttcgcgcgggtcaccggaggcaggggcctgaagactgacagccagaaaagacggggggacggggtggtgcacctttccctgctacggagcgacggcaatctggggcacccgcacgtctatgtacccactaatgaagcccatcggaggagttccctggatcgtgcttgatctgtgctggctgccgcctatgctcgcgagacagtatgtccgcccggctggtaaggcatgaaggtcgtccaccgtcagaggcgtgtcccagagctgtgggtgctgggccatccagggggtccttccacgttcgatgcaggggtgtgtaaagcccgtatgatcgtccttccaaagattcgttctttgctggcaagcaggttaaagattgtacaccaagtccatgaggaaaaccagggacttgtatgggcgttgaggtcacgttcagggcatgccctagattcctggacctggttgcagaggtggacagagtcatggaggaaatcaactcagcgactttctgccagggatccttctttgcacctcagccgtggctggtgtgttgggtggtgccgtttccgctgtgaggggcgggcggcggatctgcgggactcgggctgggtttgacaatgctgtgggctgtggcgtgacactgagctgtccgttgaggcgggagagtctttcgagcttgggtggcccgggctctctccggcctcgagccgctgatgggaccggactctggcgtttgcccggggcgccggtcacgggggcccctccggggatccgtcctaggtgtgccgctccgtaggtcgctcgagcctcggcgagtattccccctctttg

SEQ ID NO: 647754 - DNA, 982 bp, Homo sapiens
gccctgagagagcctcgaacgccatgctgcgatgggtcactgagccagagagtccccggggcggccgccgcggagagcgacgcggagactcgcgactatgcgccccccagccctcgccttcttgcgtcgcgttccccgtatcctcgggtccttctgtcctttccgcgtagtccccacctgcccgccatggccaccttgctcctgcagcaatgcttgtccagatcgtgggccacgtccgtgtccgaacaaggtcccagggccaacgatgagcggctatgttcggccaggatgggttctcacggcggcctacggcatgatgacggcggtgggcttcggcgcattgcggatcgacgctctgactttgaggcagcctgccagggccttgcaagattggtacactccttgaaagccagagtggtaaagctcctgacgtggggactgaggagcgacatgaaagcgacaccgatcgcaggggcatgatcgactccaattactcatgcagcagggcctacgcgtgatgcctccgtcatggccgcgccatccagcgactaccaaggactcacggtcgggacggttggtagggcgaattcttgtggggagccactgacaaaggcccaagaaatcacaggtagtgcggacggcaggctggcgaaccagtgatcataaagccatccagaggacaaaagtacagagcctggggccatagccccgtacgtcccagtccatgtcaaccggccgtgcttagcctcggcgggggtttggtttttcctccattcatcgcttccgcacaggcccgattgctagctggctatggctatacctcaccgcgtcagaggagtccctccactacagctggtgcactttgttacccgacgggaggcaattgcaacgtagcgggccgaagggttggataggccggccgttgctggagacttcggtacccgtgggcccttatggcacgaacgcccatgcctgcgccccc

SEQ ID NO: 647755 - DNA, 135 bp, Homo sapiens
tgaggagagcgatgacttcaatctggaagcctagcggatctcccatctttgcattgctgtcttttacatgatggtgaaaactgagtgcctgatgctggagattctatgagtggtgctctacctacaaggtgtatc

SEQ ID NO: 647756 - DNA, 178 bp, Homo sapiens
  misc_feature (59)..(59): n is a, c, g, or t
  misc_feature (95)..(95): n is a, c, g, or t
  misc_feature (103)..(103): n is a, c, g, or t
  misc_feature (114)..(114): n is a, c, g, or t
  misc_feature (116)..(116): n is a, c, g, or t
  misc_feature (119)..(119): n is a, c, g, or t
  misc_feature (131)..(133): n is a, c, g, or t
  misc_feature (148)..(148): n is a, c, g, or t
  misc_feature (158)..(158): n is a, c, g, or t
  misc_feature (170)..(170): n is a, c, g, or t
  misc_feature (177)..(177): n is a, c, g, or t
tgaaagataataaatttttggagaataagaatacagggctgggtggagtggctcatgcntgcaatcccagcactttggaaggaggaaaaggtggncgcttganccaggtgtttnanacnattttgggtaannnggtgggactcccctntttaaaaaanatagaaaaattngccaggng

SEQ ID NO: 647757 - DNA, 1563 bp, Homo sapiens
tccgcattggtagagggaatgaagaaggaggagggaacagagtaagttgttagtgcagatattactcaacaaagtcttgtgtggctggttggatactggaactgacgaaggagatggacaatattatgggacttattgattcagtgtgtttactactcttatgtgagcacctgagatagtgtgttatgtgctgacgaggtacacagggacacacgacacgtacagacaactcggacgacgtgacttggttggacttgtggcctttgacttatttacgacctttgctaacgcttcaacgactgacctagtgtaacccatcaaacctgatggacgcacggtcatgcccactgcatttcgcaccactgttgtctctctcactctatacgagaaggacgacacggacaacggtgacacgaactacaacactaccactggtgaacgttataaccttaccaacctaagggactgctagacaaccactggacgtggcttaaccgcggttgccccaggggataacagcctggggcagcactggacacgaaggaagtgacaacgtggccccaagggtaccgacgaaaaaccctacacgaacactggggtaagcacttaacgcgggacgacagctgcagacgagactaacaccaaggcaccacctggccgaactctaccacgggccttgaggcccacgacaaggggtacacacactgaagccttggcgtcctaatacagatgccacacaatgtgacacggccccttaccactactagcgtgataaggactcgaataatcctacatgcccttttccacggacgcccacgcttataccgaggttgataccggacccaagtcccccttggtcctcggctttggtctccacagacccctgaaaaaccttatcagattggaagacaacccaagaagaagacacggccgtgaactggactgggcatatttcgtttgtaactgcccacccaagttaggcaaactcgtcacgtaccgagatcgttgcagcgaccattacttacagtgctcgcacgcccaacgagcgcaggaattctttgcgccagggccttgagcggcaacgagtacctggcccagctcgtacgacgcagtctgtgactaacatttccgagccaggggccatgtcccgacaggaaacaaaccggtgcgcaaaacaaccggcggagacaaccattttgaaacgcacaagggctcgccggcgcagttcaccacgtcgacacagtggcgacgcggggagcagatcgacgaaagaagacacatgagagcaccaggacaagagctggacgccaacgcagaggggaggcgggcgcaccacaccacgacgtcggagagatgacatacagatagacgatgaagacagccacgacagggaacacggagacagcgtccgacggacacaatggagctcgcccacggttctgagacgtcaagcagcgcactcagagtgcaacacacgggacaacgtgcacgcaaaacctccatagcacgacggaaccgcggacgatcgtacgagaccgcacacaactggagaacgtcattcga

SEQ ID NO: 647758 - DNA, 903 bp, Homo sapiens
gcttgaagccacctttcccctcaaggggaactgaccctgtctttaatgctgcagttggcatccagggatcagatggtagacatgtggctttgatgcataccgccatcctgctgtttacgggaggtccgagtcgacaagaagactgtgttgactccgcctggtaggcactaagagcagccgggcatcttgggatggacttcccttatggaacgatgaactccctgtacgggctggactgctactacgatctctacaatcctaaattaactgcattttaaaagccagcagcagcgacaggtccgatgataccttgagtacagcgtgtgcgagttatgcagagccgtgccgcttgtaccaaggtcagtatggtggacttcccactaggggaaatctgggcgtgctgtatctcagggtgactcccagtctccgttactagtcagggacaacctccacttcctttctggagcgttagtctctgaaagttccctccagttggggtgtgctccgctttcaagattgtgcctgcatttccatatgtcatatggctctgactcattgagtcttgaagccgtgactgctggggcttggcatgtcggcttcaggttttgcactgtgaacatgatgtgaggtctccttttctgcacccgagcgctatgggagggcccagagcaccaatctctaggtcctccagaagcgatgcgtgagacaacgattttgtaggggtgggcactcttttttatccaaagttgactaagctacgacatcagtgtttagctgagaacagaattgacttttccatttggttgtaccttgacacttgaggaaagggtgatgggtacctactgatttcccccttctttgaaactagaaatggtgcatggcaggggaaaagcggttaactgc

SEQ ID NO: 647759 - DNA, 133 bp, Homo sapiens
ttgcaaatggcacagaaattgaaaactaaagcttccagttcagcattgaggacagcaacttacagaaaaattggagagggtcagaaccagtgtgatggcacccagcatggctttgagcttagacaggctacct

SEQ ID NO: 647760 - DNA, 382 bp, Homo sapiens
ctgccccaataacaagacaaaaactttcgagacagattacccaatggtagatattctgatccattttatacctgatgatcactgtgtgtccatgaacatggtcctccatgtagaccagtgatgggcacaatctatgccatggcttccagtggcctctcaaacacagcaatgttttggcggagacatatttaaccagcagcatggggtgggaagatgagccatgagcatctcgtctccagctggatgtgctctagcctgtcgtgatatgttacaatgagcgtccagggcctgcatacttgaaccatgagtcactttaacaagcagtacctgaattcagcgagacgtggtgatctcattccgctacccggcctcttaagaggag

SEQ ID NO: 647761 - DNA, 118 bp, Homo sapiens
  misc_feature (56)..(56): n is a, c, g, or t
aggtcacagaaggtgcctctggtggttcccaaaaagccagaagccccacctgctanagtgctgagttcaaaagaagtagtccagaacagaaagttgatttgtccccggctggggatct

SEQ ID NO: 647762 - DNA, 211 bp, Homo sapiens
aaaaagactctagtttttcttattcaataagaatataagtagaaaatttaggagtcacatttacagtttggctgatacattcttttttttgttttttaaaacttgtagggtctggcctattggcttactaagggcaaaaggcataaaaatatcaagggggctagtatgtaatggacagaccagggcgatgtaaaattgagctagacttggg

SEQ ID NO: 647763 - DNA, 99 bp, Homo sapiens
ggaaatggcagagttaaagtacatttctggatttgggaatgagtgtgcttcagaggatcctcgctgtccaggttccctgcccaaaggacagaataatcc

SEQ ID NO: 647764 - DNA, 1289 bp, Homo sapiens
gctgccactcctctagttgaaagctgttgtgtttacatctgacattaacattatttttccagcatacaacgatttaaatttgggaacggggcgggatgtcctcaattagcacactttccgactcacgcctggcctggctaccgtctagctactatgcagccggctcctcaagcttggcacgaacaatgtgcctttcacttcacttaccctcctcttggcagcacttcctctgcctggcacctgacacatcgtgtgctcacgggcacctactttgcgacacctggcactgttcttctcgcacacttactctttcactccctctcccacgcacctcttcctgacactcttcctctgacggcgccgtctttaacatcttcctcctgagtctgacttgctctctgccatcgctgctgctctctgtttctcacgacgctgctggccacgcttactcccacgaccactggtgcccaacttccagccggttacgccaccttctgggctcttcgaggcttcgtggcctaactctccttgcctgcatggctcccgcccactctttactccgtatgctgccttcaccctgggcacggcagcgggccactgggcttcaccctccgtccgtcttagcgtcgggcttccttccttacaccttaacctagatcgcgcttcctaagcgaacaggggcgtgattaggcacgtttcgggcgcgcaaccgcaccgcggttggaccgccttggaacttcccccaggcctcttttatcctttcccccttcttgctggccccttcggaacgcggcctttcgtctggcttacccatctggcggcgcaggcgtgcgcgcgcccacggcgcgcgcgacacgcgcggcacgccttacctacgccttctacccttcacatagcccctaagcttcgtccagctgtccaggcgtgcgcatctctaccctggggctgtacgactagacacttccacgccacgccttactatgcgtatcgcggcgcttaagttccgtttgctcccccactaggcgccccttaccgcgcacgcgctgcccatctcactctggcgtgcactgcccatcctttgcccgccttccagcttaccttatctcttcctcggggcacacgcaactgctgctctacgcttgggctgcctcctgcgctggtcccgcctgtgcactcctccgcttctccgctgccgcgcactactccccccacgctcggtgctgcgattctgcgccccctggtgcgcctctacgctcctgactgcgcgcctatatcccctctcccctggg

SEQ ID NO: 647765 - DNA, 111 bp, Homo sapiens
ttttgcacttctagcaaagacaggcttcaccatgccggtcaggctggtctcgaactcctgaccccagatgatccatggggtgagttctttttaagttaatgaagaaggata

SEQ ID NO: 647766 - DNA, 454 bp, Homo sapiens
gtggacaactggagtgcaaactacggtcgctggcaggtccgtgggacactcagtgaccacttcatcagattcatcagaatgctaagacacatcagactggtgagaatcatcactgacatcgacatcatcagagtcgttcgagtcaatggagtcctggctgtccacatggtcatcatcctcttcatcatccatatcatccatgtggtcatagcttttgccggctttaaatggaagggtctcttgtttaaagtcattggtttcttcagaggacacagcattctgtggggctaggagattctgcttctgggaatggtcagggtttagccatgtggccacagcatctgggtatttgttgtaaagctgcttttcctcagaacctccagaatcagcctgtataactggtatggcacaggtgatgcctaggaggcaaaaagcaaatcactgcaattctcat

SEQ ID NO: 647767 - DNA, 614 bp, Homo sapiens
cttggggccccagccgatggatgactaagtccattggaccagaagaggagaccctggaagtccattccagcccaagagaaaggtgagccagcccaccaggcccagcaaccggccgggaaccacccgagtccaccaaatcttatatccatccaggcccaagatccgggaactgggactgaaggacccctggtccgagcaccaggtccatccgccgtccagaccccagccccgatatggattctagggctctggacctgattgctccccggatcctcctgcccagccccagctggcctggccccccagcgttcacctctgggagcccccgctgctcttaagccccggatctctttcccccaggaccccgccctctgcctctgcgagaatggacatatttgatagatttttcttataccagttagcaaattccagctcccttctgtcctggagctagccaagacttgtgtgatgcctccgcaaggggctttgaatttctggggtgggaattttgctctctgtcacggtgtgataaaatgttgaaccctcccccccccccctttttttttttaaacccgggatgtctgttgaaataaaaccttccgtctgaccaacca

SEQ ID NO: 647768 - DNA, 1338 bp, Homo sapiens
tccgggggtcctcgccgggggtaatggccgctggttcttctgtggtctattgtggtgtgctctgtttttactcttgttgtgttctctctcctggtgattactctcccctttgtttctactctggtgtggggacatgtgatcttccacgtgggggcccttccctcccctgttctcccggggggcccacgctaagggtggctcctgtctagtgcccctctttcggggttggtgcaccgggcgcccgtttttaatcgttgtctgattatgtctgggtgttattgattgggtgccacgcgtatatttgggggcctattgtctgggagttacttatctcccctccccccacagggggcccttctaagaggtctggttactgaggtccccccgcgggctttttgttggtgggacccaaatgctctcctttgagagatatgcgcccgtggtgctacttttcggctggaacttgtctcggttttaaagggtctcactatggatatgcccaccccccccgttgccatattttccgcgcgctctaaggcgttttcccccctcggcgtgtctccccccctcgaggggccctttattatacctcacgaggttgtcccttattggggacgcaccggaacttgagcacgtgtctgtttgtctgtcgccactataagtggatgctctctgtggacgcacatttgtgagagagctctggggcactctcccacagacactgcgggggattgaaatttttgggagagccaaacagcgcccacatatactgtttgtctgtataggagatgtgtgtccctctctctctctcactccacccatatcccgccattgcctctcacaacatccctctgtttgttagaggtgtgatagccctctgtttctgtgccactggcacgcactttcgccctctgtgtgtccacagggcctctcctcccactctgtttagaggtgcgctctagaaagagtgtggtctgtgtgtcgtctgtgtgtgtagtgtctgtctgtctgttctgtcgttgtgtctttcttctgttgtctgtctgtctgcctctctccctctctgtctgtctgttctcctcctttcttcttcttcttctccctctcttcttctccctcttgtgccacagaagtaaaggatataaatttctctttctaactataaagcacctcggtgttctccaactcttttggttctccacagagccccacactctcttaagaaattgaggaagttctccaagagctttgcttatattttgttctctttgagatacttaccctaactagagaatttaagcgaaaaccatttttataaatataatacccctgccacca

SEQ ID NO: 647769 - DNA, 186 bp, Homo sapiens
  misc_feature (76)..(76): n is a, c, g, or t
catatgaaacaaatatgtttaaaaagcaaagaataagaatatatacaaaagggactggaatctgtaagctgatccnataaacgaaataagtagacaatccatggtgaaacctgaacatactacctctgctttggagaattgctatcatacaacattcagtcagctgaagatggattggtagaggtg

SEQ ID NO: 647770 - DNA, 107 bp, Homo sapiens
  misc_feature (28)..(28): n is a, c, g, or t
  misc_feature (38)..(38): n is a, c, g, or t
aatcaaggaagctccatgctcaggctcntcagctctcngggccagtgctcctctcttgtcccgggtagggaatactgggagactcctgccttttaccctccccttgg

SEQ ID NO: 647771 - DNA, 986 bp, Homo sapiens
ggcgttggtggtgtgatcttgatccgctcaggaatcgagatggcggttctctggaggcatgagtgccgtaatgcggtgcccttaaggaggacgagactcgtgtttgcttcgaagtcacagtggtcagatccttgctcatattgttcagtcgagttgtactctcagcgtagccgaccggtatcctcagaagtgggtgtggatgtagcaggccaggtatacacattgtcgaccggagccaccgatgtctggtggcttccaagggctgtcactctctcggcattggacatagccgagagtgtgtcgtcagtagttccggtcctggagtcctgctgccggctgctgtatgtattgaaatccttgctcgtgtgatggactattccctggcatgattcaccttcactcattgcatggtcacatggggccttgagaacaaggtgagtaaacgtgactgatgttcatggggatgccattgcaggaaagcttgtcaggggagggctttttgggggactttcgagttgttagagctgtgctgggaattatggatttcaattatcacgatagtgtgcatctgcaaaggtgttgccattgatgtggaaggctttgatcatttagatacatagtggtgaagaagttgatgtatgcgtcttgtgcctctggtttgtcgtggcattattgtcacattatggaagaatacaggatagtccatgatgacaggctgttcttgcaatgacagattatgggcagaatgatcttggggaaaagggggagggataatcttggggtgagactgaatgcaaaatgtgggggaggggtggcaccaatgtttgtaagattccagagtattacatgatatgggtggtgtaagttaatttttaggaacagtttgaggggtttgaactctttgctgttaaaaggagaggattggtaagaggaaaagaggtgtgaactcaacaacgtgtgaaaaaggggaaataagggtttgggaa

SEQ ID NO: 647772 - DNA, 225 bp, Homo sapiens
gggagcgtctccgttgggtccggccgctctgcgactctaaggaaaagctcgcaccaggtggacgcggatctgtcaacatggtaacggagacccaacaagccgcgggcaaaatgtcctcgtacgccttcttcgtcgacctccgggaagggcccaagaggaccccagtctctccgtcaattcgcggaattctccaaaagtgtcgagaatagagaccatatctccaaa

SEQ ID NO: 647773 - DNA, 877 bp, Homo sapiens
  misc_feature (740)..(740): n is a, c, g, or t
  misc_feature (877)..(877): n is a, c, g, or t
gtatacccctctgtacaatgcggtctgcctatcttctcaaatgacaaaaacgtaacccccatgtcaatcatgtaataaatctttccctcgctatcacgtaaaccttcgtccgtcactctctcgggtcttaatccagtcatagccaggcagttggcggctgagacttgataacgcaagatccacgtctcaggccatcacatcattcactcatatctccctcatactataccctacctgtaggcaattggagactaaataggcagatgtactagcggttatcacatcccttgacacccattaatcacctgtttcctctcatctgtataacctagtgtgatattaaatttccctaaaacttgaacgtgagctctggtagtttcacctcatccataacttgccacatgtttgattaagctacgctagggcatcgctatcgagagcactcattatccttatctcactcccttcgtcgatcgcttgtaaaaaataaatgatttataacattggaactttaggtcatcctctataatagtgtaccatgccaaaccctgcacttacttcacacttagagtagggcacctgacacactacgtatctgaaactgggagcattttcctgggccccacaattgcgtgcaacattctactgtgaaagatgtgaacttatcatatgtggaaaccaattaggaacctctatgaatagctcctacgattacaataagtgcatcctgttatcctgtnaactataatttctcgtagtatatatctctaagtgctttaatctaactgccatttcgtcaattaatgaagttatttccccacatatactcataggcaaggatatataaactacaaagtgtgatagtattgaatctttn

SEQ ID NO: 647774 - DNA, 348 bp, Homo sapiens
ctaatttgttttgttttgttttgttttgggaaagataggatcctgctatgggacccaggctggttttcaactcctggggtcaagcaatcctcctgcattggcctcccaaaggggtggaattacaggcatgaggcagcacgcccagccctaattacttttattacgccaaattccttgtgtggaattcctgggctttgcacccaaattgccagggtggccccaaaggggaaaaaagtgggtccccttttccccttttttatgcctacgggggtggcaaatttcccgaatcccccaggagccggcgctgatttttgtcctctattcgctgaaataaagttccccctggga

SEQ ID NO: 647775 - DNA, 931 bp, Homo sapiens
cgcggtggctcacgcctgtaattccagcactttgggaggccgaggcaggtggatcacgaggtcaggagatcgagaccatcctggaccaacagggtgaaaccccgtctctactaaaaatacaattataaattagccgggatgtggtggacagggcgcctgacagtcccagacacacatcgagtaaggactgagagcaggacgaacggagatgaacccgagagagagcaggagacatcgcagatgagccaaagatagagcacactgatactccagcactgaggaagacagagcgagactccgatcatcaaaaacaaacaaagaaaaacaaaaaacacacaagcagaaagacagacaaacacaaaaagacacaaggaacagaacacacagacacaaccaccagaccacaaaacaaaaaagcgaacaacaacagaagaaacagagaaaagacacaaacaggaccacgaagtacaaaagaacaataaaaaatacacgagaactcagagacgaaagagaaacaagacaaagaaaaagcacgaacagcgcacagaaagcaaaacgaaaaagagaaatgaccgacacacgagaagcacacacaagcaagcagacaaaagcaaaaggcaacagcgcaaacagagacgcacaggagagaagagacggacgcgcacgcgacaacaacagaaagaaaacgagacaagacaaatgacaacgagacaaaaacacagcaagaaacaaaaaaagaaaggaaacaccacaagacacaatacacacaacaacacaaacacaacacgaaaaagaaacagaaacgaaggcaacaacaaaagaacaaacggaagacaaaagagcacagaggagaaaaaaagacagaaagaagagaacaacacagaagagaacaagagacaaaaaaaaaaagacaccaccagacagacgagaa

SEQ ID NO: 647776 - DNA, 226 bp, Homo sapiens
atcatcaataacggattaactaatgtggatatttatactcagtggatgtagtgttcagccttaaagaaagaatgaattcctgatcatttgctacaacatagatggaactggaggacattatgttatgtgaaatatgccaggtacaaaaagacaaactttgcatgttctcactcatttgtgagagctataaattaaaacaattgaactcatgggacacgaatgttca

SEQ ID NO: 647777 - DNA, 809 bp, Homo sapiens
  misc_feature (433)..(433): n is a, c, g, or t
actacttaccgtgttgggctgcctgtccttcacagatcaatatgcagatcgtctctctgcgccaggagcgttgtcatctctatagaaatcagacgctactgagtcctaaattaggggtctccatgtgtcttcttagaggtcatgtgccctcagagatactcttgtcgtgacgccgtaggtggctggctctgtgagagcttgaggccattctggtaagtcaccacgtctgtaaaagtctacattaactctcgctcagaccaatgacacttctgtgctcgagagacagacttctcacagagcctgcttgccgcgcattgtctgccattcgatcctgagagtgatcactccgtgactgtagcccgattagactgagcaaggattgatccaagcattactattccagtccatacagtgaggtgtacagtgttaaacngtcgaaaacgtcgagaggcacgtcctgccctcttccctataaaatcacccagcgtgatctcacaaggtccctggggctaccttgctcacgtgcatcctctgcccctaccttatgacgatatgcactgcagcagttgctgttgcttattctgaaaggaatgtagaacttgacagcagccttctgagtctgggtcaggaagatgtcctttggaccaaagcagacttctttatacgcagctcagtttcccgggagtcgccacagatgtacccactagcccaggttgctgtgagtcagcggaagctcccgttatgccctttgctcctggtgggagagggaggagtgagctccctgggttccagtatttacttggtatacg

SEQ ID NO: 647778 - DNA, 999 bp, Homo sapiens
tgcgtttccgtgaaatatacagaggtaccctggcctcagaagattcctttcttgcgtgcccgcattacggcatatcgaaccctatattcgcttatcgtcttgtcaagcgcccatctgtgtcttacctctctaatggccgcttattgggaaaatatattctccccaaatgttccacgaagtcaggaacataatacccgttcgacgccgaagaattttgcccccctgtgtatgagccatttgggtataccatacacctacgccgtagtttcttacttgtgtctcacggggcaaaatattaccggaaccttcataggataactctcagaaggagcccaatggacccctgagtagtagacaatgttgtaacatgccaataaagccttgacgaagttgctctcctaagtcacaaagatgtagaagtcaattccttacacacgctagtatggagatactagttcgtattcatataatggggaatcaagaattgtcagtatattcctcatgtttgcggctttgtccttgcttatgttatatggcttagacttacagactgtggagcaatgcccaaactctgtaatactgctgtcctacacagggtaatattatctgctacactggaaggccgctaaggaagcccttgcttctctcaacagttcagctgttcatctagggacaaaatcatgtttctgatgtacactagcaattgtgttcccaatgttacgtacacgacatacagcgtttaatcaccgtgtaagtgctcgcagtccttcagcagatggcgtacattgtacgtaccctgttgtgctttcagtttgtttttcacctatagatgagagttgtaaacaacaaagcatacttgtggggtctgatagcaaacatagaaatgatgtatattgttatattgtctatatatttattttcatcaaatacagtagaatttgatgtacttgcaaaaatagataataattaatataacaggttttctgtttatagatgtta

SEQ ID NO: 647779 - DNA, 485 bp, Homo sapiens
  misc_feature (260)..(260): n is a, c, g, or t
cattacaaactggtgaaaacggaggattttagcttgaacaggtttttcctctatttgaaatcaatcatttcccttttacaattttggagtgaagtttcaaaatcagtacgcacccactcccaggtttatccttatgtaaagtgccccctctgcacatgcaacatttaataaaccttgaaaatatgatgctaagtgaaagaagccagtcacaaaagaccacatgttgtgtaattccatttaaataaaatatccaaaatagnccaatacatagaaacagaaagtagattagtggtggcccggggttaggggagttggggggaactggagggatatggggtttacttcaaggtaatgaaaatgatctaaaacttactgtggtgctgtttgcacaactgtgcaaatatactgaaaaccgttgaattttacactttcaatgggtggcttctgtgatatgttattaatatttctcaataaaacttcaaaaa

SEQ ID NO: 647780 - DNA, 431 bp, Homo sapiens
  misc_feature (431)..(431): n is a, c, g, or t
cagtttacaaaagaaagttgtctcacccacaacatacgggaaatcaagctgagatttgggtagggacacagccaaaccatatcattctgcccctggagcttcccaaatctcatgtcctaatatttcaaaacaaatcatgcctttccaacagtcccccaaagtcttaactcatttcagcattaactcaaaagtccacagtcccaagtctaatccgagataaagcaattcccttctgcctatgagcctgtaaaatcgaaagctagttactttctagatacaatggaggtataggcattgggtaaatagagccattccaaatgggagaaattggccaaaacaaaggggctacaggcctcatgcaagtccaaaatctagcagggtagtcatcttgctcctgatctcctttgactccgtgtctcacattcaggtcn

SEQ ID NO: 647781 - DNA, 252 bp, Homo sapiens
agacaccctacctcgcattgtgggtggtgctcagtgtcaagagagttactcccatgggaggggctggccactgagttcaatttggggaatttatgtttatatttattctatttattttcgagatggagtctcactcttgtcgcccaggcttgtagtgcatatggctatgatctaaggctcactgccaacctcggcactcctggtgttcaccgcgatattctctgcctcaggccttccaagatagctagggat

SEQ ID NO: 647782 - DNA, 200 bp, Homo sapiens
cattggtccgagagaaattaggaatgaataaaaaagtttggctgcagaaccacagaaaggactagatattcatacatgcgagagcacactgagtactgcatgtttatttggcataactgctagaaaaaagtccgcaaagaactgccagaaccaggcctgtgacccatgtttacagtcttctcatttctctcggaccactg

SEQ ID NO: 647783 - DNA, 220 bp, Homo sapiens
gggcagcgtgctatgatgcgagtgctgtgttgataagatactggggtctcatcagggctgtatctgattagcaatgactgccattggagggggcttttcatattttacaggaaaacattgtgattttacatgaaactgtaatgtctcccacatagcggttgcagtttttctttttctgaagcaaaagcaatagcccaagaaaactcccaatgattataag

SEQ ID NO: 647784 - DNA, 125 bp, Homo sapiens
aggtgggcagacagcacctatcaagatcttacaacaggagggaaagctaataaggaatcctccaaagggctattctactcctctctaccccctgatgggacagcacctgagtctactacaagccc

SEQ ID NO: 647785 - DNA, 183 bp, Homo sapiens
  misc_feature (85)..(85): n is a, c, g, or t
  misc_feature (99)..(99): n is a, c, g, or t
  misc_feature (111)..(111): n is a, c, g, or t
  misc_feature (124)..(124): n is a, c, g, or t
  misc_feature (165)..(165): n is a, c, g, or t
atagcgtatgagggtgacaggcccgagggaggcccggcactgctccgagttggggggagggggtgtggcaacgtgccccccgcanaggccacgcatgtntgaccaaagccntcattgtggtccngaccggatcatacgcccttttccctcactgcgccctcatcngacgcatcttcgctcatt

SEQ ID NO: 647786 - DNA, 735 bp, Homo sapiens
gggggagcgcgctgcgcgtcgaggagtaacctacttggtctcctgctttcgcgaatggccttcaatttggggctccctcggcacctccggtaccggtgcagccaccgtggccccggctgggtgggttggggaggattgtgggacaacatctatcaatgcaggttctgcattcagcttttctgccccaaactaacacaggcactactgactcttgtggtggtactcagaacaaaggtttgtggattgtggtacgttgtttgcacaaacaagcgggaactggtacctggttaaggtactggttggggaactggactgggattggaggatttaatacacagcagcagcagcaaactaatcatatctgaagatattagtgagctacaaaagaatcaaactactatctgtagccaaaatgtgcacaatacaagaggaaattcatggatctttcccatagaattttacaagtgtcctaatcaaacaggaacttcaagggaagagtggttatgccattcaggctgaatgaagaagcagttgcgagttcagcgtggataacgatacaggggtggaactaaaatggcgcctaacttcagttcaaggggcgactaaatgaatgtgagtgtctcaaaatcaggggtgcagcaatcattgtggggcagtcagattctggaggaaaggttttacataggatgccgattctgttgcgagaaatcacggcgggttttggaccacaacgga

SEQ ID NO: 647787 - DNA, 120 bp, Homo sapiens
agtctgagaggcgaggacacggccttatattactgtgtgagatatggttttgacagtactgatggttacttcatggcttatgatctatggggccaggggacactggtcaccgtctcctca

SEQ ID NO: 647788 - DNA, 410 bp, Homo sapiens
tgaggctgggtctggctcttgttgcccaggctggagtgcagtggcatgatctcagctcactgtaacttccacctcctgggcttaagccatcctcctacctcaacctctccagtagctggcactacaagtgtgccaccatgcccggctaatttttgtattttttgtagagacagggttttgctatgtcgcccaggctggtcttgaactcctgagctcaagtgatccgctggcctcagccacccaaatgctgggattatggggatgagccgctgtaacgggccccttttttcactataacgtttctctctatgtgtatatatatatatttttggagatggagtcttgctcttgtcgcccaggctgctcttgtcgcccaggctggagtacaatagcatgatctcggttcactg

SEQ ID NO: 647789 - DNA, 117 bp, Homo sapiens
caggaatattacagccgtcccgcttttaatttcgtcacggggcctgggcttagatggtaggtgacatgggcactgtctgacaatctctcacagtttacgcggaagattcagagcccg

SEQ ID NO: 647790 - DNA, 277 bp, Homo sapiens
ctgaatctctcagatctcgatcttttagccttactgccaagtagcttttattctgactgacagactgtactttccgtactatacctttcttgagtcatttcctttttcacagtctgcatttttcttttgcaaattaactactttcacctttcctggcgatttcttgatgttagactgtgaagctgtggttaacttccccaaaatagtgtctggaaggagttttcttttcttctgttcgatgaacagctcctcgcgtcgcttcctcttctccttcagg

SEQ ID NO: 647791 - DNA, 505 bp, Homo sapiens
  misc_feature (24)..(24): n is a, c, g, or t
  misc_feature (288)..(288): n is a, c, g, or t
  misc_feature (344)..(344): n is a, c, g, or t
agcggaagtcgcgaccagagccantggagggcgcggggactgcaaccctaatcagagcccaaatggcgcagtgggaaatgctgcaaggacatctgtggaacgaggcgccgcccgattttcaaggggatcgacggcgtgggcaacgcaaagggcgagtgtataaaccgagtgccggggccaaccaaagggcgcgttccaccgtggccacgtgagtggagaaccaagtttcgggaaccgaaaaggggggtttaaaccccgttttgggcatgtctggcattgcaagacccnaggaaaaaccttgggcaggcaagctgcactgtgggcagtgatgattcccaaggggngcgttttaaaccgcgaatgcttattcttccgacttcttggactcacgctgacacctaacttggaaacggtttggggcgttttggggggggccaccccgggggtctttggggcccaaaggggagcccccccaaagggggggggaaaaaagcaccccccaaag

SEQ ID NO: 647792 - DNA, 503 bp, Homo sapiens
ctaggatacttaaccagaatcctccgtgtcctgtcccagccatattatacccctggagttttctgccactgaggtaccatccacgaagtcaaaatgaaactgcctgtgtgtggcggttgggtagcgggatatgcgggtagtgtgcacgaggggagagagaatttctctggcttttgtattttaccttaggcaggtgaacgacatataattgtacacgagaacaggatggtgtagtacgggcatggtgacctgtctatttactctgatgcaaccatttgcaaaattgtgccattcccttcagcacttaccccaattccttagcccgcatactgtgacttacccagcggcggatcatgattcgagagcaggcagacgttgaaaaattccatagtccaggagcgtgtctcccactcttgtgaacatatcccagctttcatacgctctactgcccccaaaacatatcgtaggtcatccgacatcctatacgaaccgagggctccccc

SEQ ID NO: 647793 - DNA, 482 bp, Homo sapiens
gcctcgctgttctgtgctctctcctggtatctggtgcgtctccagtcgagctcttgtaagtgtgcttcctcgaccatctccttacttgtgacagcacccagggtggtggctatgcttttgtacaggatgttcttctcctgtgggtgcctcatcgtactatggcatctgcctgcacagctccaggctcagctgtgagattcacgcgttgtcataaatgatggccagggtgtctcgcaggaacatcaacagcttctcctcccactcctcctgtggcagggtctcttctgtgtgctcatccaggtaccccagcagcagcgggacagtcgtttcccaatgctgacccagcaaagggtgaatgtttgggtgcagaacactgaggaggcgcagcgccgctgccccacgtccgtcccctaggtaggggctggaagacacaaccaacagtcttccggttacagcatagggagacgggaggctcgcatggg

SEQ ID NO: 647794 - DNA, 554 bp, Homo sapiens
gagaggagtgccgcgtataagagataactcttgcaaccccaatagcggatactgggatattgagaacactgctcttattagaccttgtcgacgctagagttctggcgaaatattccacaccgggaccttgcgtaggcgaccgttcattcttgatgaagcacttggacataaactttctaagattaagatttatcctatcccggtttaagtaaccgttgtggaacactcactcactacactgggagtgttccaagacatgcgctatttgtccttgtatgagaagtgttcaatctgatggaatctgcacgatcaggctgctgatgttcagaagagaagttaatcttctcatgaccggcactacttgtgttgagtataaagaaactctaaccaaggccactatacttgatcgaacggtgacctttcagaatttgcccgtcacatttcggaaacagttggttaactgaccctgggacttgacattattatggctccgttttttctatcgctgatctcatgaaagggtgcccatgggtaggtgagtgggcttttttctt

SEQ ID NO: 647795 - DNA, 113 bp, Homo sapiens
cttgactcggggcaattctggactcggggcaattctggactcggggcaattctggactcggggcaatactggactcggggcaatctggagtcggggaaattctaggactcggg

SEQ ID NO: 647796 - DNA, 258 bp, Homo sapiens
  misc_feature (5)..(5): n is a, c, g, or t
  misc_feature (8)..(8): n is a, c, g, or t
  misc_feature (19)..(19): n is a, c, g, or t
  misc_feature (32)..(32): n is a, c, g, or t
  misc_feature (110)..(110): n is a, c, g, or t
  misc_feature (125)..(125): n is a, c, g, or t
  misc_feature (137)..(137): n is a, c, g, or t
  misc_feature (177)..(177): n is a, c, g, or t
  misc_feature (179)..(179): n is a, c, g, or t
  misc_feature (188)..(188): n is a, c, g, or t
  misc_feature (190)..(190): n is a, c, g, or t
  misc_feature (194)..(194): n is a, c, g, or t
  misc_feature (231)..(231): n is a, c, g, or t
tcccnaancccaaagattnatttggcaagggncaaaaaaaaaaaaaaaaaaaaaaaaaaaaaaaaaaaaaaaaaaaaaaaaagagaaaaaaaaaaccaaaaaaaaaatcnaaaaggaaaaaaaanaaaacccaaacnaaaaaaaacccccaaaaggccaaaaaccccccagaattancnaaaaccccngncccnaaaaccccccccccatttttaaaccaaaaaaaaatgnaaagaaccaaaaaaaaggggggcaaga

SEQ ID NO: 647797 - DNA, 241 bp, Homo sapiens
attgcagagatcctatccatcaacgttgcttcagtacaacctataaactagaggcactagtacatacagaatcgtacaactacaggaaatgaaaagttcaaaaagtagatcctacaaaatgtaacgcatcactttcctaaagcatcaatgatacagctcagaacaattcaataacaagatttggcctactataaggcatcccgataagacaggctaaaccctatgagtccacattctactg

SEQ ID NO: 647798 - DNA, 301 bp, Homo sapiens
ccattgggttggatgtccccactacttccgttaacccttcccattgtcaagatgtgccacgggtgcctctgggggcacactgaactcgtaggaagtgtgattttgaggtaggtgcacatggtctttgactttgacagagatcaccctcccctcccctgacctgacaccggtagtagtaagtcactcctcatgagggtggttcggtattaggggtgttgaccctctcataattgggcccataccggacggatgcgtagggtgagttgtcaattgtgtaacatgtggccttcttgcgaggtta

SEQ ID NO: 647799 - DNA, 356 bp, Homo sapiens
cccttttcccctccctttaaaaggtttgggggatttggggcccggaataaaatttttcaaaggccccggtgttgggaatggttttaggtccccccctgccccccttcctcaagttaaagggggttgccgcaactttttttcccccagtcctgggcaaaagcccccgggttgggttccttccccccttttgggatttttccccccctgccattttgtggggataatccccccggtttgctttttgggtccccaaggggttgtggcccattttctttccctcccatggttgcctttttttttcccctttttcctttttttttttttattaaaattttggtttccccccctggctccca

SEQ ID NO: 647800 - DNA, 328 bp, Homo sapiens
  misc_feature (242)..(242): n is a, c, g, or t
attttaaggcgctccgacgttttcacgcaacttggcgaggatcttactgttcaggctaccggaagcttcttcgccgacgggttgcaggctcaggctgatcttgccgtcgggcggatctccttgataaagcccttttcctctttgccggcccgcagaacttgaacacttcgttcttgtgaatcagcccccaatgcttgttgttgatgatcgccttgaagcccatgtcggtggcttcggccagncaggtcgacttcctggccgggcgtgtactggcggagtcttgtccaggtagcgatccaggcggcgcgtggcggtgatacggtcgacg

SEQ ID NO: 647801 - DNA, 280 bp, Homo sapiens
cacgaggaacgagagctatcgctatgtgcgcaccgacgtgccgtgggcgaagtcggaggacgagctgcgcgacatctggcgcaagcgggtcaagaacgactggctgcgcctgaaactggccggcaaggacgacgcggcgatccgcgaaacgctgggcaagcgctacgacctggcgctgaccaatctgaaccgggcaaagagcgacgacgtgttccagctcttcatgaacgcctacgccgagtcgatcgaaccgcataccagctacctcggaccgcgcgcg

SEQ ID NO: 647802 - DNA, 342 bp, Homo sapiens
catatatgtatactcttaacagaacagtgtgggaggaactacccataggcctgatcaggaaagagacaagagacgataagataggatcttatcatcattatgaagtttaatatcaagtagtagagataaggcatattcgactatgtaagaacacacagtcagcaaagtgcattaaggatgacataaagaggtgcagcagcatgagcagtggggggggtccagcagatgcctgtcactttcagccaggcacaattagggcaatatgtttatcgcaggccagaggtcatttgagttgcagtcttacaaagcaacagggtacatgctggtggcgctcgtcaggag

SEQ ID NO: 647803 - DNA, 355 bp, Homo sapiens
  misc_feature (79)..(79): n is a, c, g, or t
gttcttcctgctccctctgttccgctgctgttgctcccgttgccgtcgagctgccttctgctcttttttccttgtagcntgccgggcctccatttcttgagtcaatggccctggcacctggaagatttcacaaagatattataaaactacaaggaagcagaaagaacctatgaggatctctgatgccctccgctctgtagctccttttccagctcacccgagccttgttgtaatcataggcatcaagattcttctccatgaactccggaattcattacgcgttgatttgtcagctgctacagtataaggtgccgagccctagagtccctaaggataaaaacccaaaaccaagtta

SEQ ID NO: 647804 - DNA, 842 bp, Homo sapiens
agcggggcaggcagggttacccctgcaggagggggtgggggagaaagggtaggggtgggcaccctatacatctacccagaggggtagatcaagcagccatcatctgtcgtaactagatggtcccaggaaggtggcgtcagcaatctgcagccgcgtcgacgttgtcggatcctccgcggaggacccactgagagccggactaggacctacggaccctgggccatccaccagactccgctccatggcataagcttgtgcaggccgtcatacgagagccctctaagggctcgtcgagccaggtcctgtgagtccagtgagagtgtcctagagtgctccgatgaccaagactttcgtcaagcttccggtcagaagtgtgaggctgacgtgggctggaacctgacctatagcagggctggggatgtctgctcttgcgcgtgctaggctgtgagagatggatcggaggctgtacaacgatccatgtccagctgagactatatcatgacctgggtcctgctcttcagtagactcaaggcctcatggggagaccacatggaggacagtgacgagcctttcgtgagcatgtgtggggacagagacatatagctcaggctgatggccggatggacgtgctgtgatgtggcaggcgcacgcaccactactacgactagaccgtgacaccgacatatgagtaccagtcagagacatgggacagaacacgtcatttcagacttttgaccatcgaccgcttgacagtcaacgcgtgacgtgggctattactcctggacgtgtcccaagtccctggagaaccgggatgtcttccagccgtccagacctgggtccca

SEQ ID NO: 647805 - DNA, 384 bp, Homo sapiens
aaaaaaaaacccaagaatcacctgtattgatttcatcaaattatgaaaggaattcaagtgattaaagtttttttagatatacaagacaagaacgttaacttgttcagaatttcaaaatattaagaaagaatgcattcatatataaatgtgatagcatttaatccaaatctgttccccagagcaaaaagctgccactagcttaacctctctatgctttgcttctttcatcctaaaagtataggtccactgcagggattgtaagagatgaaatatgaaaattgttttacaaatgactatctcatacacagcccataataccactgctattattaccttgaagtagtgttaaaaagtctgcaatttcagttctcactagcaaacaaa

SEQ ID NO: 647806 - DNA, 290 bp, Homo sapiens
gctcgacaaaaatctttcctctgcctcgtatcacttattaatgataagaaaacatggctgggcatggtggctcacacctgtaatactcgcactttgggagacccaggtgggtagatctcttgaggactggaattcaagaccagtctggccaacatggcaaaggcctgtttctactaaaaataaaaaaaattagccaggtggtgcacacctgtagtcccagctgcccgggagctgaggcggaagaactgtttgaacctgggaggcagaggttgcagtgggctgtgatcacg

SEQ ID NO: 647807 - DNA, 260 bp, Homo sapiens
tatgcgctctgcatacatgtgtccatagtggtccactgcaaggctctgtatggctgccctgggtgccccatctcacctccgaacacttgcttattgaaacttctaaaacataggcttggcctcccaggggtgttgggattacaggcgtgagctacccatgcccggccagaatggtcgacctcttggagttgttgggagaattaaatgaacaacacatatggagttgctttgctgctgctattgaaacttctaaaactagg

SEQ ID NO: 647808 - DNA, 449 bp, Homo sapiens
  misc_feature (130)..(130): n is a, c, g, or t
ggctttgctcacgaacacaaagcacgctcctgactatccgggacaggctcttctcggcttccatattggtggcagtggtgcacactgggcagagtggagacatattccatgtgaggtacaccttaacggncctgggacgccggaggacagggcattgtcctcagtcagatacaacagcatttggggccatggtacctgcacacctaaaacactaggccacgcatctgatctgtagtcacatgactaagccaagaggaaggagcgagactcaagacatgattgatggatgttaaagtctagcctgatgagaggggaattggtgggggagacatagccccaccatgaggacatacaactgggaaatactgaaacttgctgcctattgggtatgctgaggccccacagacttacagaagaagtgggcctccatagacacgtgtagcatcaaa

SEQ ID NO: 647809 - DNA, 406 bp, Homo sapiens
taccatcatgagatcatagcactgtgattagcttttgacactgtgtctcttgttacgtgttgtctgttgtcatgctgagagcacatttacattaaagattcattttgttccttttatttcccttgtattcttggtcaagtgattcatttgcataaacattactgatctctgcatactgatttggggttaactctttccttctaactctaaagaaaaaatatttgctgcagaattatcctcagaagaggcttccctggccttcatctacctatgcagtctgaccaagtatggtacattttagccgtattcaaggacacatctctctacccaggtcattgctgtcactagcagctttcaagtcaaacctgcagcactaaatatttgtatatcctggttactctacata

SEQ ID NO: 647810 - DNA, 362 bp, Homo sapiens
  misc_feature (72)..(72): n is a, c, g, or t
  misc_feature (76)..(76): n is a, c, g, or t
  misc_feature (101)..(101): n is a, c, g, or t
  misc_feature (111)..(111): n is a, c, g, or t
  misc_feature (113)..(113): n is a, c, g, or t
  misc_feature (124)..(124): n is a, c, g, or t
  misc_feature (152)..(152): n is a, c, g, or t
  misc_feature (155)..(156): n is a, c, g, or t
  misc_feature (169)..(169): n is a, c, g, or t
  misc_feature (230)..(231): n is a, c, g, or t
  misc_feature (233)..(233): n is a, c, g, or t
  misc_feature (249)..(249): n is a, c, g, or t
  misc_feature (264)..(264): n is a, c, g, or t
  misc_feature (271)..(271): n is a, c, g, or t
  misc_feature (338)..(338): n is a, c, g, or t
gggacggagtctcactctgtcgccaggctggcgcgattttggctcactgcaacctttgcctcacgggttcangcgnttttcctgcttcagcctcctgagtngctgggactncnggcacacgccnccatgcccagctcatttttgtatttttngtnnagatggggtttcnccatgttggccaggatggcctccatttcttgaccttgtgatccgcccgactcggcctcccnnantgctgggattacaggngtgagccatcaagtntggcganagagattgtttttaaatgagggtgggggcgggtgtccttagcccaaagcttgtgccagtttctatcngaaataaatgcccccaaaacctca

SEQ ID NO: 647811 - DNA, 145 bp, Homo sapiens
atgtctcattgtgtagtgtctgacttaatctaaaaccaaacccatgttgaaactcagtactttcccctttaaaaacaaaccaaaaaaaacaaacaaaaaagaaacttgatccatatatcaaaattaattccagtcagattttact

SEQ ID NO: 647812 - DNA, 271 bp, Homo sapiens
gggcccaagaaaaaaaacagctttcaaggccctttttgcggtttttcaggggggcaaaaaaaatttggaaaaggaaaaagctttagtttttaacaaccgcccctcctacaagatttaaaaaaaagtttccaccaaaatttagtttacaaaaaaattttggggaaaaaaactttttaaaaggtattttgaaacccattaaaacggcttttttttttccagcaagaacccacccaactggttttggctccaataaattttgggaaacccccca

SEQ ID NO: 647813 - DNA, 154 bp, Homo sapiens
cgggtctgtgtcagtgcgacacagcagagtctacgtattcccgccatatatacacgcatatacactggacccatggcagacactgcggacacacagcctgtcacggcccacatctagacgagcacactatcatggaccacatggtagcacacac

SEQ ID NO: 647814 - DNA, 99 bp, Homo sapiens
  misc_feature (63)..(63): n is a, c, g, or t
tctctctctctctggaactggtgggcagcggttaccgcatgtcgctggtgaagaggaggtttnccacagggatgtacctggtgagctgctgaacccgca

SEQ ID NO: 647815 - DNA, 468 bp, Homo sapiens
gtggacctcctggggtggacacaagaactgctggatcttatgcagcgggaacgtggcaagctggatggacaggacagataagactatggcttcttcacctggggaagtcacacagcagatcatcctatgtccagcaagacttcatgcctgaagacagctccaacacgtttacaaacatgaaccagaccacaacatgtggcctggacagtggtcctccgaggctgcctttggaaaggctgaccagggatgtctacccttggggcccctccatgtgtgcgccctgtccacctcatcactgctgaaggtgtagtgcaggtgctgctttctgcagcggccttaagttatcacgagggcagcacagcacgcccgtcgccaggcaggcgatgcactagggcaatctagcatgttgatcggtaaagtggcatctttaactacaacatcatttcttgcatgaaataaacttagtat

SEQ ID NO: 647816 - DNA, 803 bp, Homo sapiens
  misc_feature (54)..(55): n is a, c, g, or t
  misc_feature (135)..(135): n is a, c, g, or t
  misc_feature (139)..(139): n is a, c, g, or t
  misc_feature (143)..(143): n is a, c, g, or t
  misc_feature (199)..(199): n is a, c, g, or t
  misc_feature (248)..(248): n is a, c, g, or t
  misc_feature (261)..(261): n is a, c, g, or t
  misc_feature (269)..(269): n is a, c, g, or t
  misc_feature (293)..(293): n is a, c, g, or t
  misc_feature (330)..(332): n is a, c, g, or t
  misc_feature (336)..(339): n is a, c, g, or t
  misc_feature (341)..(341): n is a, c, g, or t
  misc_feature (352)..(352): n is a, c, g, or t
  misc_feature (364)..(364): n is a, c, g, or t
  misc_feature (368)..(368): n is a, c, g, or t
  misc_feature (373)..(373): n is a, c, g, or t
  misc_feature (390)..(390): n is a, c, g, or t
  misc_feature (394)..(394): n is a, c, g, or t
  misc_feature (417)..(417): n is a, c, g, or t
  misc_feature (430)..(430): n is a, c, g, or t
  misc_feature (436)..(436): n is a, c, g, or t
  misc_feature (440)..(440): n is a, c, g, or t
  misc_feature (454)..(454): n is a, c, g, or t
  misc_feature (465)..(466): n is a, c, g, or t
  misc_feature (479)..(479): n is a, c, g, or t
  misc_feature (484)..(484): n is a, c, g, or t
  misc_feature (490)..(490): n is a, c, g, or t
  misc_feature (501)..(501): n is a, c, g, or t
  misc_feature (513)..(513): n is a, c, g, or t
  misc_feature (521)..(521): n is a, c, g, or t
  misc_feature (594)..(594): n is a, c, g, or t
  misc_feature (726)..(726): n is a, c, g, or t
  misc_feature (801)..(801): n is a, c, g, or t
aggtcccggcccggcggcggcagccatggccggggggccgggcccgggggagcnngcacccccggcgcccacacttcttgtacgaggtgccgccctgggtcatgtgccgcttctacaaagtgatggacgccctgnagcncgcngactggtgccagttcgccgccctgatcgtgcgcgaccagaccgagctgcggctgtncgagcgctccgggcagcgcacggccagcgtcctgtggccctggatcaancgcaacgcccgtntggccganctcgtgcacatcctcacgcacctncagctgctccgtgcgcgggaaatcatcaaagcctggnnncctnnnncnccgcttctgtncccaggcaccantgcnccgangcccagcagcatccctncacncgctgaggccgaggcctggagcncccggaagttgcnatcctnagcntccaccttcctctncccaacttttnnaggctcccaaaancattnagggcntgaactcggcntggtctcaagcnctgcttcnctgtggcctccaccgctatcttcagcttctttttctactaagctaggctcagagagctcagtgtttatactgnagggagcccgcccctttccgttttgctggcccctctgtgagatttcccggggcaccacaacttctcggaggagctcaagatcggggagggtggctttgggtgcgtgttaccgggcggtgatgaggaacacgntgtatgctgtgaagaggctgaaggagaacgctgacctggagtggactgcagtgaagcagagctttctgaccgagntg

SEQ ID NO: 647817 - DNA, 315 bp, Homo sapiens
atcgttagaataaagagtggaaaaagaaatatgtcagcctgtgtgaaatgggtgctgactatcatcccagtttaatgattacatgcagaatgttcacggtaaggagattgaacaaaagaaaaccactgtgaaagtcccaggaaagaggccaccccgagccacgtcagcctgcgcacccatctccagccctaaaaccaatggcctatccaaggacatgagcagtttacacatctcacccaattcagacacagggctgggtgactccgtatgctctagccccagtatctccagcaccaccagccccaagctcgaccc

SEQ ID NO: 647818 - DNA, 154 bp, Homo sapiens
ttacctgttgggggaaacaacattggacgtaaaagtgtgcactcgtaccgcagcggcaggccaggacccttgtctttggtgcgtctatgattgataagcgacccggccctccaggggattccctgaagcggactcttcttggcggccaaactct

SEQ ID NO: 647819 - DNA, 153 bp, Homo sapiens
tatgagcggctcacagacacaggcggagtatacagctgcatctgtgttacctgggtgtgtggatctaagtgtgcatgcgtgtgctgcacatgtacatgggggcatatacctaacgtgagcaggtgggtgcaagtgtgtgcatgtgtgagcacc

SEQ ID NO: 647820 - DNA, 904 bp, Homo sapiens
gggaagaaattccagacacaccatgtttaagagctgtaaaggggggccaggcgcagtggctcactcctgtaatcccagcactttgggaggccgaggcaggtggatcacgaggtcaggagatggagaccatcctggctaacacggtgaaaccccgtctctactaaaaatacaaaaaattagccaggcgtggtggcgggtgcctgtagtcccggctacttgggaggctgaggcaggagaataacttgaacctgggaggcggagcttgcagtgagtggcatcgcgccactgcactccagccctggcgcgaacagggccgacgacctgtctcaaaaaacaacaaacaaaacaaaaacaaacaacaaacccctcgagggcctctctatattcccgcggggcgcgggagaaacaagcgcgcgtacatcgcagaacgcgggccaatggggcgccataagcgcctgtgttaccgcgtgaccccacaattcttctcgtgtgctccccaacgagggcgcaacaacttcgcgcgcgcggctccccccctctaatatagagggagagcgcgcgacatatacaatctccgcgatattaaagcccgggtctcaccctgggcctttagaaccccccgcaaaaaaacccatcccctcccaccccccaccaccaccccccccccccccctccacccaccctccccccacccaccccaccctcccacccacacaccctccccccccccccctcccctacatactactaatgtatcacctacacatccaccacaagactcaacacactcactatacacctactcttttcacattcctcctctatactcatagacctacaaccagcacgccccacacaacctcactccgacacagcaaacgtatacccaccccacacacccacc

SEQ ID NO: 647821 - DNA, 325 bp, Homo sapiens
  misc_feature (48)..(48): n is a, c, g, or t
gagatggagtttcactcttgtcgcccaggctggagtgcaatggcacgntctcaggtcactgtaacctccgcctcccaggttcaagcgattctcctgcctcagcctcccgagtagcggggattataagcatgcaccatcatgctgagctacttttttgtatttttagtagagacagggtttcaccatgttggccaggctggtctcgaacttctgacctcaagtgatacacccaccttggcctcccaaagtgctgggattacaggtgtgagccgcggtgcccagcccgatttactaactttctgaccctaatggtgagtggggttga

SEQ ID NO: 647822 - DNA, 335 bp, Homo sapiens
  misc_feature (304)..(304): n is a, c, g, or t
  misc_feature (326)..(326): n is a, c, g, or t
ccatgtggtaatctccctccatccctttattttgagctctattgtgtgttctgcacatgaaatgggtctcctgaatatagcacactggtgggtcttgactctttatccaatttgccagtctgtgtcttttagttggatcatttagcctatttacatttaaggttaatattgttatgtgtgaatttgatcctgtcattatgatgttagctggttattttgtttgttagttgatgcagtttcttcctagcatcgctggtctttacaatttggcatgtttttgcagtggctgataccggttgttccntttcaggggaaattcctctagnaagttcgaa

SEQ ID NO: 647823 - DNA, 1069 bp, Homo sapiens
  misc_feature (865)..(865): n is a, c, g, or t
gccccgcttggctctacgtaagtgtatcttcctccaactcccatcactgcacgtgtaacagaggtagcccatatggtagagggacctgtctagtaggccatcgggtaactgtgtgctgagaaaggggatactgacgtgactcggcatactctagtgacttgacaacgtaatctgcattaccatgtcacaacgacagcatactcataaacagcacctcactcgatgggccctcagtgttcccactaccttagatacgggcgcacgatggtgcgtaatcagagggtgccggagtcaatcacactcaacttgagattaagtatgagctacgtgccccaaggaggcatggagtgagtcctcatagcatgattatacaaattgcgcgtaacaatgccgtagaattaccttaaatggcatacatggccggtgtagcctagctacaaggagtcttcaataatggccccacttaggtggtgctggctatgatcgcggaagacgcgggaaagaaggtgaccgagctcttacttgcgaatcgaagggctagcgagtccagacatgttgattttctcctaaaggctccctaaggaacgtaagagtagcaggtctaacgcaggtaattcatgtcgccagtctctggtggcaggcagaacttagtcaccacgaagcactaccctgttagtctccgacagcctgggtgacttgggtaccacgctaagagttatccttggtgcacttcgggctacggacatgagttgggaatgtaacttgggtgcgatcacgacgctgttactattattttcgaaaaaaagcgccccggtaccaaataagaatacacgaggcaacacattgaaggttgcagacttccgcntagaatgcgaatgggccttgtgaaagaatacactatttgtacattacataacactggagttcacacttactctgggtttcgtattggaccgtggtcaagaacaggcacttactctcgcttaaatagaagaacgacactgtaactccataatgatgaagacctggtttcagggcagaaggtaggctgtgggggaaccatctaaca

SEQ ID NO: 647824 - DNA, 732 bp, Homo sapiens
gcctcgtgccgtgcttatgcccgcgcgccaggacgcctcctcccgctgctggcccggccggcggccctgactgcgctgctgctgctgctgctgggccatggcggcggctgggctgctgggtgcgcccgggcccatgtgaggcggggtggcggcggggacgggccccccgggagacggcgaggacggacaggacccgcacagcaagcacctgtacacggccgacatgttcacgcacgggatcagagcgccgacgcacttcgtcatgttcttcgcgccctggtgtggacactgccagcggctgcagccgacttggaatgacctgggagacaaatacaacagcatggaagatgccaaagtctatgtggctaaagtggactgcacgagccactccgacgtgtgctccgcccagggggtgcgaggataccccatcttacagcttttcaagccaggccaagaagctgtgaagtaccagtgatcctcgggacttccagcacactggaaaactggatgctgcagacaactgaacgagggagccagtagaacaccacgagccggaagttggcacctgtccagttgccccgatgctcaagcaagggggtgtatgagcttctcagaaagcaaacttttgagctgcagcgttgcacaaggaggaccactttatcaagttcttcgctcgtggtgtggtcactgcagagcctggttcaacttggaagcaggtggctctgggcttac

SEQ ID NO: 647825 - DNA, 749 bp, Homo sapiens
gaagaactatgtagaagaagctttgccgcttttgtgcctctcacaggcgcctgtcattgccatgggagggacgatttggggctctcctccttcttctcttttcctcctttttcttcctcccccttctgccttccttcttttcttctttctcctcctcttttctttcgcttctttttcttctctttcttgtctcttctcttcctttctttcctcccttctctcttttctccttctcttctctcctcttctccttccccctccttcccttttctcttttcttccttttctcttttctccctcttctgttcctttctctttcctcttctctttctcctctctcttcctctctcctgctcccttttcccttcctccctcttcttctttcctccctttttctgcttctttctcctttttctccccttctcttgctcgcgctcttttctcccttttccttccctctctcctccctcttttccctctttcctctcctctctctcgtctctttcccctcctcccccctcgtcttcttctcctccccttttccctccctctttcccttctctctgctttctctctccctctcttttcccttcctattttcttcctccttcttctttttctcccctctgttcctcctctcgttctctctttcctctctttttcttctctctctcttctcctctccctctatccttctctcttgcctcctctcctttctctcctctcctttttctcctccctctcttccc

SEQ ID NO: 647826 - DNA, 1359 bp, Homo sapiens
aatcatcggactaatttacagctcagaacagccctaggctccctaattatattcatactacgtcactgctctagcgtgccctagaggaagcgtatcaaatagccatccgtgagcgcaatcaatacgttagatatgacgtagacattacacaaatagcatttgatagataaatgataccttcgtttacaggactcacacattatgacgtcccatatggccctatgtctgaatcgccgcatcaggttcgggtcaatagctacttgaccgagaagtatgtcttgaatggacataggtcagtggctagtgtggtgataatgagcgacctctacgaacttcacttactgcaaattcgcctcgtgcacatgaatcgagccaattagacactaaccgccattgcacttgatactaagtcgcactatggaggcataattaatacatatacgcttcgctagtcttgacctataacggacctagagacagaacgcctaatagatctcggcttcattttagcgatatactttcttctccaatgtctagagctcgaacaataaggcctctgtcaggtaaggatagaagctaaggcgccaagttctgtccatgtcccagatatggcccccgacatggagaagcttatcaggcaagggcgcaagggattcgatgtatgccgtgcagtaaagtgcgtccacccagctgaggaaccttttatgcatttgcacgttcgaatgtaactctatttatccgtaggtcgcataagggccaaacaacgttcgaaaaagcattaacggtaaatcagccagcatccatgctaggtttccgaccaatttcaatataagttcccgttcttccttcaggctgggaaacttttcagaaagtcttcttaatattcgcccaacgttaaaattaaggcatctcctttggtgaactggagcggttcccttaaggcccacatggcgcctttgcgggcgttaaaaaccattctggctcgtttaatcggctcaccccacaatgtaaatttaaaacagcccgtaacctggggggacaggacacattcgtccttggtgggcctaaaagttaaaacacccaccggagtcggccccttgggtatgtcacaatattaatgccacgtttcctgtccctttaactgtttaaccagggggaactattccaaaggtgttaaacttaaagggtcgagcaatggggtgctggtaattaactttcccgctgtactaaacagttgtatttttataacgcgacaagtagcagcgaaattgggggggtttcccactttccaacccaaccacgtcattttttatcccaacatcagtgtaagagacccccttcattttcgaaccggaagaa

SEQ ID NO: 647827 - DNA, 166 bp, Homo sapiens
tgggaaggggtaccccctcaaccccgaggtagtggaccaggaggagagaggctacctgagagggaaggaagcataaaagggacccgctgcagactcagcgcaaagggaatgccctcggtgctgggacctgtgagcactacaggaagaaacagcgaacgtagtgaga

SEQ ID NO: 647828 - DNA, 135 bp, Homo sapiens
tccagaagactgtgctcctgttgaactgaccccagctggggacatcaggcacaggagggcagtcctgtggtataggcatggaactgaacggctctagataaacagtgggagcctgctatggcagcctggccccta

SEQ ID NO: 647829 - DNA, 253 bp, Homo sapiens
gctgggccaggaatatgagatggcgccgaggttgataccggacagtgacaatcaatactgaacaaaaagtatctgacttctacgacattccaggacgagattagagatctggcgaaatttggacagtgtctttcgacttgtagaacagaaaactcgtaaaagtctgggcaggtgacgttcttcaagggcatattcagcatacagagaaagagaatatccggcaggagattagcatcatgaactgcctccacca

SEQ ID NO: 647830 - DNA, 387 bp, Homo sapiens
attcgcggccgcgtcgacggcatgcacctgtagtcctagctactcgggaggcacaagaattgcttgaacccgggaagcagaggctgcagtgagctgaaatcgtgccactgcactccagcctgggtgacaaagtaagactgcatttcaaaaaaaaaaaaaactagccaggggtggtggcacacacctgtaatcccagctacttgggaggctgaggcaggagaatagcttgaacccgggacgcagaggttgcagtgagccgagatcgcaccactgcactccagcctgggcaacagagcatgactctgtcttcccgccaaaaaaaaagaattattgctggaataacataaaaaaaaaaaagtcgacgcggtcgcgaatttagtagtagta

SEQ ID NO: 647831 - DNA, 1187 bp, Homo sapiens
  misc_feature (1074)..(1074): n is a, c, g, or t
  misc_feature (1116)..(1116): n is a, c, g, or t
  misc_feature (1141)..(1141): n is a, c, g, or t
  misc_feature (1149)..(1149): n is a, c, g, or t
  misc_feature (1172)..(1172): n is a, c, g, or t
  misc_feature (1175)..(1175): n is a, c, g, or t
  misc_feature (1183)..(1183): n is a, c, g, or t
tagcactaaatgcccacaagagaaagcagaaaagatctaaaattgacaccctaacatcacaattaaaataacgagagaagcaaagcaaacaaattcaaaagctagcagaagacaagaagtaactaagatcagagcagaactaaaggagatagagacgcaaaaaacccttcaaaaaatcaatgaatccagggctggttttttgaaaagatcaacaagaaaaccctgtttggctagttcacctggctcatctgatggcaagttcctatcttgagaggactatgaaattaaaaccaatacaagtgccacaaataacatacaacattgtaaatcagcacaatttgtagctgggtgaatggaagaaatagttctattcatcacttcctcattttccctaaatctacaatctccagatgtcactactgaattaacagccaacaattccacaacattacctgggagacactggccctttttcttcctcttcctcatcatcactttcattttctgtaaataaattcagagaagcaggtcacattaagcaattcatacttcacatatgaacaaatcactgtccagtcatagcacaaggacataactattctcagtgcaagaataaggattctgacaggaatattctagggtgtcctagattaactttggtgagaattagatgaccctgctttccagacccacaggccaaaatctccctctacgtgtagaccataatgccatattccctgcctgagtcaaagttaaacaaaatttttttccccaaaaaaatctccaaaaattggtcaaacaattttctaagagtgttgctgcgatacggacttatatcaccaggtaacatggacattaaatgtttagaggcatctatacatgaaacacgactgatagataaatttgaacaactcttgctttaaaaagaatctgtgatttgggaggccaagacaggtaaatcatttgaggtcatgagttcaggactaccctggccaatatggggaaaccctgtctctactaaaaatacaaaaattagccagatgtgatgttgtgcacctgtggtcctagtaactnaggagactgaggcaggagaatcacttgaatcttgggaggcanaggttgcaccaagccaaagatgggngccactgnactccagcctggggtgacagaancangacttccntcgc

SEQ ID NO: 647832 - DNA, 161 bp, Homo sapiens
tgacgggcgggctgggaggatagcttgaactcaggagtttgagaccaaactggttgggccacatagcaagacttcatttctataaataattttaaaattagccagtcatggtggtgtacacctgtggtcccagctactccagagactgagatgggggggaa

SEQ ID NO: 647833 - DNA, 170 bp, Homo sapiens
caatgtgactgactgtgaatggcaacgcttattcgaataggcgtatatatactgctgtgctgaagtagccctggcatgtgacatcgatgttgcacttgaactgtccgccatataacaacataaggaatgttctccagtagctaatgctctgccctacagaggtggtatag

SEQ ID NO: 647834 - DNA, 294 bp, Homo sapiens
ctctgcgcggccaggagatgtcctattttaaaatgttatccttggccccatacatttcacatggatagatcttttatcatgatttgtatctgggctagacatttgggtagattgagtgggtatcataaaaggatgtggaattccttcctcagcctatccttgacacctgaaatcccactcattccttttgcttaagtcattgttttgcatgcattacatacccagtgtagtactgtcaactacctaagtaattagcatccacctctaagttattctagcttattttccaacaca

SEQ ID NO: 647835 - DNA, 232 bp, Homo sapiens
tcgagccggtaccagacgtccattctgcatatggagcagtggttggtagttctccttggagaggtccttcacatcccttgtaagtggattcctaggtactttattctcttggaagcaatgtgaatgggagttcactcatgattaatgataaaggggatatcaccaccaatcccacagaaatacgaactaccatcagagaatactacaaacacctctatgcaaatggacgtct

SEQ ID NO: 647836 - DNA, 218 bp, Homo sapiens
acggacacagaggctgatggatactttgtgaaataacactgtgagagtttgtgcacatttctttggttgttttcgtcatctgaatccatggctgactggctcccactctgctattttaaaaataaaatgtcctttcttctatcgtttctgtggttttgtcgccaacccatatttgctggaataaggtagtaaaaaacatacactaaagtctgaagtcc

SEQ ID NO: 647837 - DNA, 245 bp, Homo sapiens
acaggaccctatgatacacccaccaagttgttcttaaaaagttccatccctgaatgctcaggagactgatttgagtaacagtaaaactctggcctcccacacagtcggctctgtgtgaattcctctttccctatcgcaattcccccatcatgataaatcggctctgtctaggcagcgggcaaggtgaacccattggacggttgccttattacctgagcctagcccaggggtatagggtggtatag

SEQ ID NO: 647838 - DNA, 284 bp, Homo sapiens
gagcctgatcattacaaaggttgtatgtatcagaagcagagaccacatgccctgtggtaacagtaagggtatatccaagagaatctctcctgctgaaaaatacgctttctgccacctacacattgctatttaggaagtaaaatttgcttcatgtgtcatgaccccattagtcagtgttacagctgtgtagctgataggaagtatatctggcatattgacatttatacacgtttgcataaagcagattttaaaatatagtaacatccatttttttcccttgaaag

SEQ ID NO: 647839 - DNA, 191 bp, Homo sapiens
ggccgagtgcatggctaccatgacttttaaagaattagtttgaaaagccctttctggatccatgtgaacgctatttcatctttctgtcattctactaatccacattgttatttctctagatgctcttctcccagcttgatgactattattgggtctaggaacttattacccccatatgagtggattcttgt

SEQ ID NO: 647840 - DNA, 337 bp, Homo sapiens
  misc_feature (16)..(16): n is a, c, g, or t
  misc_feature (40)..(40): n is a, c, g, or t
  misc_feature (45)..(45): n is a, c, g, or t
tttattagtttaatantattatgtagtttttaaatgttgntttanattttttttttgaaattgtaatatttgtaatttttatttttaaattaaattgaatattattttatattgtattggatttttatatttgaataattttatataagggaagataggttagtatttttatggattttttttattattattggatttattttaagtatttttatattagatagtgttatgtaatgtagatatgatttttttgtgtaaattatttatttgttgtgtatattgttttataatattttagattttttaatttatttatttgtattaaatataattttta

SEQ ID NO: 647841 - DNA, 517 bp, Homo sapiens
ttgggaaagggctcgccctcccgttggggggagaatctctttttgcccacgctggggaccactttcatgtttgggaagaaattttggggcgctgtggggtctgcccgctttcaggaacccattatttcattatggaataagtccgccagtgcccaagcacccccagccggaatcggggacacatttgggggggggtttaccctccctcccacccccattatggaatacaaaactccccccgccagcatcaaaatgccaggcaggttggccccccaaaggctcctttttcaaaccctttggaacccgcggttgaatgtcccatgcccctccccctttttggagggccccatcattaaagcgggggtcatcggagtttcttgttttgttggcgggcccccgggaaaacccttttttcctggccaaaaggaattggaagaccttttttttttttaaaaccaggctgcccccccccagctccccccccagttgagttcccttaataaatggggttaaccta

SEQ ID NO: 647842 - DNA, 207 bp, Homo sapiens
cagtatgatgctgcgacactatcatcatcaacacagactcatagataagtgtaagctgccgaagttgacccagttccatggggtcgtgtcttggaatcaacaaatactgagggatgggttaagagacagctccatgggcatggggaaggcactgacacagaggactataaaacatccttctcttattcaaacaaaaaaaacaaaaaa

SEQ ID NO: 647843 - DNA, 697 bp, Homo sapiens
ggcctattgttggctgtcatcaatggcatccggcctgggcaggaggacttgaggttgccatttcagtgccgatacatcaatagcaacaagaagacagaaaaacagtattaggtacccctgaagcttttgctgggtgccttaccatgagcaggatggcacagtaatggctgccctaaatggtgggtgtgcctgtgctttggacatgatagctaggactggtagaatgcattcgtgcagacaggggcacaaatggaaaatgggatctggtttgacgcaactggtggaatccccgtgggaccagtgactaaaaactccagatggaactggacaatagaatactagaagatgtgcaattacttttgccagaagcgactacgctgataagaagatctctccaaagagagacaatgggattgtgtggagaaaattgactagctggtatgccatgtaacttattccatttgtcaggcaagaggtttaccacattagtggacgaaaatagtggaaagcagattaaatgggcttgatcctgctacctctgaagatagttgatgtggtatagactggaattgagctagggagtgatgccggtgatctctagtgaatctccagaagatctggagagttgtactgatcatatagaatcaagggttgatgggaactctacttggtcaggtcctttgtgagaagagtaact

SEQ ID NO: 647844 - DNA, 980 bp, Homo sapiens
ggtcaatggctgcagtagcgtttcttcatgggagtgctccatgtggtgccatcatgaccgacagtggcatgcccattgtgcctggagacccctccacctcaggacaggtgctgccccagtgacgcgacttgtcctcgggaactgaatctcccgctggtgctttgtgacttgagggtcccttgtgtgccttcttgctctcctccaccattgcatatgtaggtgtacgcgcatgtgttcgctcgacctgagtgcttatgagcttgtagtttgtatcgatgttgtgcatgaatgcattccccggccagatggcagagcgcgaggcaagacaaggcctcgagagtcgaggggtagtcagggactggtgccataatctcactgtctccaggtgttcacccgagtgcccgtggacactcaaggaccatgaacgcaaggacccccatccgaagggacttcggggaatgccctatgttgacaccaatggggccacaatggtggggtcaattcaacaagcaacggggacaaggcgtttgggccacattgtgcgccaatcgatggccaatgtgaggtgttccaagatggttcttggggaggcgccccttttgacattaggatgggggcgaccttgcgtggcccctgtccaaagggcccccccaatgacgagtgtattacaccttgtgcccgtcccacatttgagccgtccgtatcccgcttctcccagagaacaggacccatgtcccccgggtcgatggcgataatcgcgttccaggcaccccggtgggccaacggttgcgcccgctttccagtggtcccgcggcgttccgccatattgagttgttgccgcaaggaggctttccgttgggccccgttgaggctctttttccacccgttcttttgggtgaagagccgcgccccgttccccttgtgtcggtaactgggttaggccgtacgcggctatggttctttggggggggacaggccaa

SEQ ID NO: 647845 - DNA, 163 bp, Homo sapiens
ttttaaaaaaaggggataaaagaggcctgaatgaaaagaatgccttttcaaaaaaagggttcaatgaaaaacaaaagttaaaaaaggtaaccctttttaggtaacccgctgcccttctttttgagtgggaaaaaatttaaataaattgggtttttttttgcca

SEQ ID NO: 647846 - DNA, 131 bp, Homo sapiens
tgcatggtgtgcacttctgtaactcccagtcatcctggtcaagggatcttcgatagacaccactggggtagtcttgatggaggattgtacaggtcagacagctggtcaggcgagatgtactgaagagatcg

SEQ ID NO: 647847 - DNA, 121 bp, Homo sapiens
ttcgagctcggcacccgaccctgtctcagaaaaataaatatcccagatcttttcacgtgcaagtttgtgaacaacagaatgaagattttaggcatttaagtgttgcctactaatctgttct

SEQ ID NO: 647848 - DNA, 157 bp, Homo sapiens
cgcagaagccacgtgcagtcagatcccaagccgggccggcggtgcaagatctggagtccagccgtcagggatagcgctacaattccattctctgcaattagtacaattcgttctgtcaagcaatcctgctccaagcttcaactgcaatcaagctggc

SEQ ID NO: 647849 - DNA, 543 bp, Homo sapiens
ctggctctaccttgtttactttaatctcttaatcctgtcatcttagtaagctgagaatgtatgtcgcctcagcaccctgtgatgatgcgttaactgcacaaatggttgtaaagcatgtgtgtttaaacaatatgaaatctgggcaccttgaaaaaaagaacaggataacagtaatgttcaggaaacaagggagctgaccatcaggtctgactgcctgagagccgggcggaacagagccatatttctcttcttacaaaagcaaataggagaaatattgatgaattctttttctcagcaaggaacagccctgagaaagagaatgctttcctagggggaggtctctgaaatggccactctgggaatgtctgtcttatacagttgcagataagggacgaaataagccccggtctcccatagtgctcccaggcctattaggacgaggaaattcctgcctagtaaatttcagtcagaccagttttctactctcaaaccctgtctcctgataagatgttatcaggagacaaggtagagccgaggggtacc

SEQ ID NO: 647850 - DNA, 120 bp, Homo sapiens
aacctttcccgtcaggaacttaaatgggtgaccctgcttttcctcccatcttttccgtacttcgcaatctccaagctgtggccccattatgaaattagcctttttgattcacgcccctga

SEQ ID NO: 647851 - DNA, 136 bp, Homo sapiens
aagtgaagtattacagtcaattctgtggttgtaaatagttgctcttgttctatacctcgcaagacaaatctactttcacattgaacagctgtaagacaggacatattgagatgccatgccctatgctaaggtattc

SEQ ID NO: 647852 - DNA, 669 bp, Homo sapiens
gggagggtgctcatagagtaatggaataccctgtcattttagcacctcttttataatgatactgtgtcctccccttgttcagtgctgccttagtcatgggctctggctcccggttctgcaatcgtgctagtgactctcaaccctctctgcttgtctgtatcttgggatgatatacgactcccacaggtctaggtgtgaggcgtgggtgcgtgggcatcagccaggattgcacgttacagtctttttctctaggagctacaaagatctcttcctgttactaatatggtcgcacacccatgcagcctctcttctgcacaaccggggccctgcatgtcagatcggcgtggtctgcagggggtagctctgtgccttagtggctcttggcaggacactgagggccatgcctgtggtgtagcccaggctcttgccactcccagggaggggaagggctgctcagctcaaggtgtcctgttcggtagagcaagtgtcctctgacagccgtgtccccggacagttctagacacccttggggatggcactccacacacgacagagatgcaggggccagggaagcccagcgctcggtgcccttcgtccagggttaaaatcggcctgtggggtgtggtgagtaggcaggtgtgcgggtgtgatacgacgtatgtttcctaa

SEQ ID NO: 647853 - DNA, 117 bp, Homo sapiens
  misc_feature (51)..(51): n is a, c, g, or t
tctgcttagaccgtgttatgcatgctgtcctcagtagagagctgtgtgtantcagcagcagtgactggggtaaacggcagaagaatgggaggcagcagtcatgagcatggtcagcct

SEQ ID NO: 647854 - DNA, 194 bp, Homo sapiens
  misc_feature (70)..(71): n is a, c, g, or t
gcaaggcacattgcagagcccatgctgcgcagagctgacactgcgcaggtcccaggccctcagtgtattnntatgatacctgccaatactgtaggggagttcttggcatgtcttcagccatgtcttgagttttttattaaggacaaccaggacagggaggcagtctaactctcactctctatagtacacactgc

SEQ ID NO: 647855 - DNA, 201 bp, Homo sapiens
gaactagactcgagattttcttttttttttgttaggaattaataacactttgtatttagcacattcacactagaaatggatctaaattatcattcgttaatcacttttctgtggtctacagagatcacatattaaaaagttcagcgttagaaaagtattagcatatgcagcagttaatacaagtgttacagagctcgagcc

SEQ ID NO: 647856 - DNA, 196 bp, Homo sapiens
  misc_feature (138)..(138): n is a, c, g, or t
agatattgactgtactttaagacaggactttcagaagcagggaatttagttgttgccagagaggtgtgtcaggacccgtggaaggagcatgcggacatgaggtggaaggctttgtcccaacactgttacaacactttntgtacatgacgcaaaacatctttaaaaaatccttataaaattcttttataatattgtt

SEQ ID NO: 647857 - DNA, 216 bp, Homo sapiens
accatgccaagcatgacttcacactcgccacacagatgctggcggtcgttctgccactgagagggctgctgaggatggagcctccagtcatgctcccagcagcagagggctctggggagctggacttcacctattgcaacctcgggtgcgaatactggctgtagtgtgccgtgtgatgcctgaccgccggaactcggtcagaggtggggtacctga

SEQ ID NO: 647858 - DNA, 331 bp, Homo sapiens
  misc_feature (164)..(164): n is a, c, g, or t
  misc_feature (303)..(303): n is a, c, g, or t
  misc_feature (313)..(313): n is a, c, g, or t
agtcagatctctgtgcaggtaaccacagccaaagaccttacctcgttagttttcctgctggaagcctgacttgtacccctacccagcccccgctgaagagcagcccttgggaccatttgaaacaagaggcttgggggaaagccctgccttccgccgtgagtggncttccctcggccgggcaggaagttgtcgacggaactgctgcaggatgggcacgggtggggactgcgggcatggctggcttttagttgttttgggatatgtaaccttgaagggggaattcctgggatcattttgataacntctgttaaanttttatggcaagaggcaa

SEQ ID NO: 647859 - DNA, 335 bp, Homo sapiens
  misc_feature (68)..(68): n is a, c, g, or t
  misc_feature (199)..(199): n is a, c, g, or t
  misc_feature (229)..(229): n is a, c, g, or t
  misc_feature (261)..(261): n is a, c, g, or t
  misc_feature (284)..(284): n is a, c, g, or t
cccacatatgggtatataaatatatactttcctttcccatacacataagggtatgaggccagattttnttcatatacttcaacaaaacaacctatcaaaataaattgaatgcagaaatagataggagaatccaatctctattaagccaaacattaaagaaatttaccaaaatgtaacacaatgccattcttctcatttncttttgttttgggaaacatagctatttttnctttaaaactatagctttattatgggtttgtncttgttattttttaatgtttttngatttctccattttaatttctaataaaatatttaaatatttaaatattaaa

SEQ ID NO: 647860 - DNA, 314 bp, Homo sapiens
catccagagtacagaagccagttgatggaacagaaggaaaggtgtatcatccggcacatctaggtccggccactctttcttcttcactttctccagctgatactttagattttttgctgacctgcaaagagcatctgaagggcttcgttttagagaatgatcttcatattctcttattctggtttcacctatatttgaggattggactgctattgagttggtatcgattcatctgtgtttgggagaagttgccaacgttctctgaggagggtggcgagagctagtgggagttgaagaggggttcttggcccgtt

SEQ ID NO: 647861 - DNA, 200 bp, Homo sapiens
ggggcccaaaatttttccccccccgggggaaaaaaagggggggccacccttttttggaaaggggggggttttaaaaatttttacccttgcgggggaaaaaaaatgggtcccccccaggaacaaaaaaaaaggcccccgggtttttttgttttttggtttttccccccctttaaaaaaattaaaacggtttttgggcccga

SEQ ID NO: 647862 - DNA, 567 bp, Homo sapiens
ttgggtgtggcagggtaccttacccctaagctctaaggccttgaacggatgacctgttaaggcagttactttcaatgtcttgaacgtcaggatatgcggtctctactaccctacctcaacccaaacagctctgctttactctggttgatctactaactctctggattgaacttcattagtgacgttcttacctccttccctgccttcctcaactgaggagagcaccaagtgaaccctggctgccagacgaagtcagacttcgcattagctccagcctctttgctaagccagtcagatgagtgccccattccacagatacatataggttaagccctcttgatccatccagaggcctaatgctgcctctttgcctgattgacctatcactgtttcgttaacactttgctcgcgagctgttgagaccgcagtggcctctgcaaccctaggcagtacctctattcggctcctactctgtagccagttccaaatcttggcctcaataaagaccccccaatcttctgctgtcccctgtgcacgtcttaatccagccctgccagtttgagctct

SEQ ID NO: 647863 - DNA, 329 bp, Homo sapiens
aatcacaagcagagctcatatagccggcaaccatataataacgcaggaacagcaacaaaacatggactcatctgtgaagccaaggctggaatagcaccttcctcataaccagccacgttaatggtcaacaagattcatatgaccagcagctcaggctataatcaacatcaaggctcatatcatgagcagtcaaattatgatcagcttttttgattcctatagtcgaaaccagcagtcctatcattcacaaagggaagactacagccaccacacacaagatgaccgtcgtgatgtgagtcggtctggagtcaatcatagcgaacccgcga

SEQ ID NO: 647864 - DNA, 250 bp, Homo sapiens
cttgtggtcgttctctagcaggatccccctagtattattatctcatcttgttgatcacgtcttgattctttagtaatgttgagtacttccccaggtcattacttttgacctgtgggtgctggatttttcatcacttatagctccatagctcccagctctttttattggcttaggctgtggattcctctggaagatggtagatgtactttaagtaggcaccttaagtcagaaaacaaactaatatgcccga

SEQ ID NO: 647865 - DNA, 392 bp, Homo sapiens
ctcccagttaggaggtcaacgctaagacccttgctctctttccgtcgaacatgagatgccaatttctttctgggcagaggacaaaataaaaattgtctataaactttggccaggtgtagtggctcacgcctgtaatcccagcattttgggaggccgagatgggcagattgcctgagctcaggagttcgagaccagcctgggcaacatggtgaaaccccgtctccactaaaatacaaaaagttagctgggcatggcagcgtgcgcctgtaatcccagctactgaggctgaggcaggagaatcgtttgaacccaggaagtggaggttgcagtgagcctagatcttaccactgcactccagcctggatgacacagtgagactccatctcaaaaaa

SEQ ID NO: 647866 - DNA, 474 bp, Homo sapiens
tcgaccctaagatttgagcatacctatcatctatgtagcccatctatctttattgtctgcctatctatatctacctgcctatcgtcatctacgtatctatctatctatgcatcatctctccattatctgtctatccatctatcatctgtctgcctatctatatctatctaatctatctctatctagctatctatcatctgtctgcctatctatatctatcatctatcttttatctgtctgtctgcctctatctatctatctatctatctatctatctatctatcgatcggtctgtttgcctatctaaatctacttatctatcatctgtctgcctatctatatctatctatcatctatctatctatcttttatctgtctgcctatctctatgtatctatctatctatctatcatcggtctgtctatctaaatctacttatctatctatcatctgggtgatgctcaaagatcttgg

SEQ ID NO: 647867 - DNA, 738 bp, Homo sapiens
tattgcggagctgtctgcggtgtgcgagcggcgcctctcgtctacccggctggcccagcgctcgcaccaccgcttctccctccctgtcgcagccgcgccgccgcgcagggccccagttcacacgccggcgggcagaagccgcccgctctccggaaagtgataccagaattcattgaagtggcgaatttttaaagaaggtaacacaacacgagaatgaacaatgccgaaaccaatcaagcgtcagagtaactacactggatgctgagctggaatttgccattcagcccaatacaactggcaaacaactttgtgaccaggtggtgaacaaccagttggttcgcgtgaggtctgggttcctttgggctgcagatatgtagacagcacaaggttattctacatggcttacccctccatacaaacggtaacacagcaggatgttcacgcacacgagaatcctttacagttcaagttcagagctaatttctttcctgcaccgatgtctctgaggacttaccttcaaggaaataacccagagactcttcttctgcaagttacacgaagccattcttacactgatgacgctatatggccggccagaaactgcagtctttcggcttcctatgctgttcaaggccagtatggagatcccaatcaccgagatccatcacgccaggctaactgggctcaggatagactccgtaccccaggctgtttggcaccactcacccttacccacga

SEQ ID NO: 647868 - DNA, 694 bp, Homo sapiens
ctaaccaagggcctccggtgtttggaaacaaaaagtagtgcctctacagaatacgtgttcttcccacaaggtgtaactgatggacactcctcagaaatactggtctcttcgctttaccgaaggttacccaaaccaggattgtgctcatctcgcatctttgtcagctggcgggtctcaatctaaggaaagcgtccatgacattcaagggtgtatgattcgtcctgcgacgggatttttgtcgcctaagatagcacgcgtcttaaaaagctcctgatatatgcaggaaccctgtcgtaaggattaagaaaccatcgggacatcattgaaggtcagaatagatccatagtcagcacaccattaagatctgttgattgaattgccactgaagcaatcaagctgatatgtccggccgtttctcgatgtgcataccacgtgcatcaagtatagcatgagttacagtagtgacccgatgttgatccgaagtaagcgctccgtcatgtgccatctatatcatcatgatcagctgatgcacgtcagcgagttcctactcagtcgttctgaacacctgcagttctacacgagtgcatagtagtccctctatcagtaagagtgcactttgcaatctacagcataaggttcttgagcctaagtggaacagttctagggtgaactagacacctaagcgccctgtgtc

SEQ ID NO: 647869 - DNA, 991 bp, Homo sapiens
  misc_feature (623)..(623): n is a, c, g, or t
agggcggtggtagatctcactctttgttgtgggcgtgtgttggtctcagcccacgaggctggggcccgccgcgttgtgtgtgccgcactcttttttcttcttgccggggcgcggcgtgggtggtgtggtggggctcgcccctcgccgcctctggtccaccgccgagagtcgttggtgggcgggcgcgccacccccttccgtgtttgttccctcctcgcatcgctcttctgttgtgtagtcgagcgtcgcctcgtcttcgccgcctcgctctcgtctcccacgcgtgggtctcacctcttctgtgtgttgctcgctctccccccacctctctctctctctgtgtgtgaggccgccccccccgcccgcgaggcgccgcctcttctctctctctccccgcgcgcgcgcgatttttcttctgtgtgtgagagataatgtgtgtgtttcccctcccaccgcgcgcttgggtcgcgcgctctctctctctcgttcgccgcccccgcgctgcgctgcacccgacgcgcgctgtgtcttgtgtttgttcctccccgcctctctctctgtgtctctcacctcgtgttctctctctctctcacatcaagcatctccacctctttctttgtagngtgtctctctctctctagaaaacacacacgctctcccccgctctgtgcttttttcgctctcttccccgccccgtcgctgctctcgctccccctcgccgcgcggagatatgatatataatcctccgtcggggcgcgcccctctctcgcgcggcgccgcccccgcgctccccgcgcgcgctgtgcctcctctcttgtgggtgctctcttctcgcgcgcggcgctctcttctctcaacagaagaaacaccaccctcgcggggagagagagagagagagataaaagcacaccacaaacaaaattaatataaacttctctctctctcgctcgccctccgcgcgggcggaggagaggaggggggttcccccaca

SEQ ID NO: 647870 - DNA, 227 bp, Homo sapiens
  misc_feature (48)..(48): n is a, c, g, or t
  misc_feature (62)..(64): n is a, c, g, or t
  misc_feature (67)..(67): n is a, c, g, or t
accactttttgcccctggatgagctggagcacagcctgggggagagtncggcccagggggcnnntgnagtggtgctctgggtgagctgggaaaatacaagaaccaaggaatcatgtcaggccatcaaggagtatatggacactacactggggcccttcatcctgaacgtgaccagtggggcccttctctgcagtcaagccctgtgctccggccatggccttgtgtcc

SEQ ID NO: 647871 - DNA, 178 bp, Homo sapiens
cagtctcctggcagctatctcacaaatagggagtatctgtggcgcttttcccccttccactttcttttcattgttttctgtactactttacctaatgttcacactgaccttcacttttactgggttacagagagtttacgaacttctgatttgccttatgtttttggaaatgaggtcg

SEQ ID NO: 647872 - DNA, 802 bp, Homo sapiens
agcgggctgttgccaccccctagcgccgatggggctgaaggtctctgtcagaggcagtggacgccgcgtgcctctgttccgttcatggatgggggtccgtcaaagtagtgaggaataaggcctacttttatgagatacctatggtgtgaatttacggcaagacgacggaggagtggtagagaacgtggattattgaatgtctaccgggcaagaacgcatgtgggtgagttagcaatgagtaacaaagataagatattagacagggcaagtacaggatgatagggtgtcgggtgagtaatacatgagtatatcatttgtcatgacttgcgatactgcgccgtatattacgatggggggattatgattacgtctgcgacagagtattgcacacggaaactgccagaaaactagtggatggtgaacgcgttggaccctgacctataactcagtgctgcaacattatatgatatctggtcctgacatggatgagcctctgtgaaagggctgttctttcacatggtaggatatccggtgcgactggagcaaaggattggtaatgtaagaggacctaagtagagagagctaggcttgggccgagtgatacgttgagattgatgggatacaggcaattgactgggctcatgttcagtgatggccctataacgcttgacgtaatatcgggagtgcctgggcacttgacactgaaaactgaccacaggggaatgtagaggtactcgggtggccctgaagtggaagctggacagactggacagcttggtggaatcgcctcaatagtacccaa

SEQ ID NO: 647873 - DNA, 376 bp, Homo sapiens
tttcatggacaaatacacttgtcccttctatctgtgaatagtactccatgcattgctccccgcatactatgcccaatgcttccctgcagttagaccacagcatttggataggctctatcatagaatttctcgaatcatgtgcccattgtacttacattagatccttgcagggtgggcactgtggcttatctgacccctgtattccctgtagttagggcagtgatttgcagaaataggcatttaataaacacttgccacataaaaaaaaacaggcaggactaaaatttaagagcaaaaagaaaggtcggaaattgtctaatctaagccccctatttggtaggtacagaccgtcacagggtctgtaccaccaaaatta

SEQ ID NO: 647874 - DNA, 103 bp, Homo sapiens
ccgcggtcactgtcttacagattctgtatagggtctagacacctgcccggtgctggacggttaagtgaaggtgcttacgaataacttcgaaggccttgactga

SEQ ID NO: 647875 - DNA, 434 bp, Homo sapiens
cttttcggcccacctcgtgaccatgtactcacagacgccatgagaaaatgtgactaacacacatgtgtaataaccacacggctcacagacgctgacacagcacacgactcacacagatgctgacacagcacacgacactcacacagaccgctgcacacagcacacaactcacagacgctacacacagcagagtcacaacagacccgcacatagcacactgtcactcagacgccgcacacagcacacaactcagatgccgttaacagccacacgagactcacagaccctacacacagcacacaaactcaggtgccgcacacagcacatgacactcacacagactgctccacatggcacacaactcagacgccacacacagcacacaacactcatacacatgcacacagcacatgactcacacagatgccgcacac

SEQ ID NO: 647876 - DNA, 820 bp, Homo sapiens
gtgtgtgctcttcctgtcctcttcttcccccacaccccccccagacaccgacgccgcgttacccacccccgccacggtatactacactgtgggcatctatttgttgcccacaaggaatgcatgagagccctatgatttaaaatatgaaatggtggtctgctgtgtgaataaattatttctgaagaatgaagaacattaattttgggagttctttgacgaactttgatgtgtggaaaaagtatttatacttcgttgcaagaagaaagcaaactattgttagtcggcctctccagaggacccaagttaataatataaataatcattatcttttaaccatttcaacagttcgcatcaaaacgcttcttttttcccgacctcgatacaacatcacttcccccgtgtttccctcttccttgccactcctatctcttctcgcccttgccggggggctcgtttcctttcctctcctctctcttccgtttctctcctgtcttcgtcctctcgcccccatttgttttgtgtcctcccccgcgtttcatcttttctcactccattcccgtcgctccccccttcatcctcgctttcgtcatccagccttgctgtactcgttcctcctaacaagcttcatttatgggtggttttcgatgggtcttgctccctccgtaacgtatcaccagcgacccgcttgacatttttatattgtacactcaccggtcttctgttctgtccccgtctctgctacccgcgctattgaattccggtctcttttgtttctccattctgttttcgcgttacccgtcgatcctatcttcgcgcctat

SEQ ID NO: 647877 - DNA, 123 bp, Homo sapiens
actttctcgctgtcccatgttgtccatgggccgccttccatggccttggcggccatcgccccatgttcttgcagcacctcggtatggggcgctcggcgttgtgccaggctcccgcagctcgca

SEQ ID NO: 647878 - DNA, 1544 bp, Homo sapiens
  misc_feature (1025)..(1025): n is a, c, g, or t
  misc_feature (1300)..(1300): n is a, c, g, or t
gctgagtctccagacattacctgcccagatcattcctgagggtcgggctgccatggagtcccattgtgatctctgccctcacaatgttggagagtgccagggggacttcatcgcatgatatgccctggagccctctgcagtcaagtctcccgggatcccctccggagctggagtcaggtgcttgggcggtcgcaactcccgatacgttgttctcagatttccaatcaattgaaagctaatttacagatgcattagacgggacaaccaggcttccagtggcgacgcttggaagtgtggacaatcgggcccagtttgccagcctacgttgatagcaggatctgtcgtacagagtgtacccgtacaacctagggcgttctccttctgcgtgctatgttgcatgctctatggcacggccttagctgcccctcgctgagtgagctagaatcatcgtctagagatgctgccttttgccaagcaatcgtacagggaacttggcgttcaaccctaggccacgttgcacaaggcgaaagcattcatcgcccagatacatctatttagacggcacggcttggcggcccaaactttgtcgtgctccgcagcgcggccttgtgagaggcgcttccctcatgccattgcgttgaagcatcatactggtttgatccccccatcgaatgtcgtgcggcaagcataatcttattagtggaataggcccgtggaatcgaactcccttagtggtcctatgctacgcgatgtggggcttgtctaagtcccttctgcacaaagagagaccccatatagcaggaccccaacaccaccgagcaaagtcatgggcaagtttggcccactctttcccagtttgtggcaaccccaatggaattctttgacacaacaagccacgttattgggccgacggaagtcccctttggctccattttggcgatgtattatggctttattttatgccatctgtgggccccataattgcgccataggggccgtttgcagattgggggttagaaaactcncctcaaccacatgtggcgaccactgcccatgttctataccaaaccaggcccctcgaatgtgtgaaaacgcgtccacccccttgagtggactggtggggacgtgtggcccttgcgttggcgcaagggacattagcaattctggcaacccccggcaccgcggtgcccccgagctacagtgacaggcagcgaaccctcgttagcaacggaacattgcgaggagactcccccctttccaaacatctgggaagcgtgggtcatatgtcagcccagagggntggcccttagcgctatgcgcgcgggtaccagcctgcagcggctttgggccacattgggggtagtagcacattcccaaatttcatacgcccccagtgggccccaagttcaatagtacccacaggcctcatgactttgagcaactgcgggacccccaaattggttgggttttgcaaactccagcggccatttggtttcccctttccaggttgggatatttaacccgcgaatccagagcgcatcatg

SEQ ID NO: 647879 - DNA, 1638 bp, Homo sapiens
  misc_feature (129)..(129): n is a, c, g, or t
  misc_feature (244)..(244): n is a, c, g, or t
  misc_feature (1478)..(1478): n is a, c, g, or t
ggttaacgcgagtcactcactccaatgggcgtagcgagccactggcagcaggtctgcgacgagagagcccttgcggcgtgacaccagatcgaaaggaagagcacgcactgatggttccccagtctgacnatgtctacgagcagccatcgcctaccgtgtgccaggtctctatcgcgatgtcaagtctccaatatcatgataggcacgatatacgaggaaggacgtgcagagtcaagacggttcngcgtacggacatggggtaggggaagggaatatgtcccgtggacctgacccttgtacgacgcacatagtgcctctgcacgcgaaagggcccttggccacgcaccgagcgcagtcctgcgaagtatctagacgttctttggagtggaggtcgccaaggcaccgtttgaggtcgtggacgccggcacgatcgcccaaggaaggtctcttgagaccaggcccactatagaccagcgagagagttctaacaccttttgactctagctgaccgagggcccgtggttgtggagacccccccgtaaccatttgcgcttagtgagcctatcgaacttagtgttgtgggacgcaagcgaatagcgggtcccgatcttgggctatattccataagtccccacgagacactgttggtcctttacttcagggggcatttccttgtgcttggtcgttcggttaccgctatccgccggtacattgggggtcggcaccccttcgtggcattgcggcgttaatttgtatactttgtttgtcgccggttgcgcctttccgcgcctttcataccccgatacgcggcgaaagtcccccccccggataggggttacccctccctatttatcttcgaccccggggggctcccttgcgtttacgttggctaccgtttcgtgctccatcccccctattgtcaaccattcccccgcgttggccaaacggaatccgatgtgaaccttgggactcctagggtggggcctattcccgggtcctattgttggtggggggccaagaccctaggggctcggtccatccttttcatttttggcccccctctacccggttgggcggcgcggtaccaccctttcgcggcattcttttcccccttgttgtcgcgccgaggcacctccccgggtggttggccggtcttccccaaacaccaggggccgtgcggaccttcctctaagggagcgcccgggaaaccggaggccagggttgttgggcccccaattcccaccttcgagaggcgcctaatcgcggcccccatttaggggcggctccattttccgatgtggccattttaatcgctgccgccttttgggcaggcgacaccgccattatagtttaggaggccgcagttcaaatcccataagaaaagtccgcaccagagtgtacattgcgcagaaagagggcaacacccgcggtcaacattcccccgttcgcgcacagaggccaattacgtgtggggcacncttatcgcgtaacccccttccaccccaaggtggaacatgttgtgtcggggggcggtgaaaatagagagggcgccacacagtacatcagcaagagggcagaaaagccagtcacctatctgatatgtgaagcgctgtcacacgaacagggcttcaacaccag

SEQ ID NO: 647880 - DNA, 287 bp, Homo sapiens
agcgtgtgcagactaagtttattactcacactggcctatgtaggcccagacactacgtcacggcagagtactcagaacagtctattgccccacagcagcatccagcgggacggctccatcgtagacactgctctgtagacccagctgatgcctcctcagccttctgtccaggccttgctctttctgatgtcgagctcactagccccagctcatgcttctttgcaggctctccaggcgcagctcctgcatcttgctggcccctccaggcccagcctctgactcccgtc

SEQ ID NO: 647881 - DNA, 549 bp, Homo sapiens
  misc_feature (445)..(445): n is a, c, g, or t
gaagggtgaagtcctccccacacctggccaggaaaccctttccccatccatgacctctctgcctctggtgtcctttttaagcttgattcacagacccccctgtccaagaaggctgctgctcagaagctgaaaaaaggggaaaatggggtacctggggaggatgcaggtctccacctgagctccccttggatgcagcaacgagcagtcctaggtcctgtgccgctgacccgtacctctcggacccggacactacgggaccaggaggatgaaatcttcaaactctgatgtccccagaactgactgagagaagcaagatgttgaaagagaaacttcagggggagaggagcctgaggtgaggctcaagaacatggcttatgagcctgcctccctccactccagccatcctccccagccttcttgtctgccaaaaattccttggcctggngcagttttattggcaagattagggaatgggaactggacctttcccagttcttgggctgaatctagagttgagtcctttagactcaaaaggctctttttatatcc

SEQ ID NO: 647882 - DNA, 312 bp, Homo sapiens
  misc_feature (146)..(146): n is a, c, g, or t
  misc_feature (155)..(155): n is a, c, g, or t
ccagaagagatgagactgggaatcatcaccacacccagacagacttcatctattcttctgagagcagctccaagagattgcctggaggactttatctgcttaataagacaagctttgttcctgtacagctccgcccctcaccttcntgtaatatntgcctcccacctccccagtccatacatctcctccctcctgtatgaaaaagggtatacaagcttctgtgccccattgggttattgggaaatcattctcctgtgattcccctgtgccatgcacactaaaataaaattttgtatgccttttttcctaaaa

SEQ ID NO: 647883 - DNA, 109 bp, Homo sapiens
ctagaggaccgaatgacgaacatagggtgttctcggtgtgaatgagggtttatgttgttatgtggtgggtgagtgagcccattgtgttgtggttaatatgtagagggag

SEQ ID NO: 647884 - DNA, 408 bp, Homo sapiens
  misc_feature (22)..(22): n is a, c, g, or t
  misc_feature (72)..(72): n is a, c, g, or t
  misc_feature (152)..(152): n is a, c, g, or t
  misc_feature (162)..(162): n is a, c, g, or t
acctccaaaggcctggaaactntgcaacccatgtctaaataatcccatgggtcaaagaagggctctccaagngaaaatacattgaatttacatgaaaatacaatatgtcaaaatttgtgccacatagctgaggcagtgctgagattataacncgtaaatacncacattagaaaaagagaaaagtcttcagtggataatccaagctctcacttcaagatcccagaaaaagaaaatcaaaatagactcaaagcaagcaggaggaaataagttataaagattagaaataatgggagcaggatgcagtggtgcacacctgtagtcccagctacttgagaggctgagatgggaggattgcttgaacccaggagttacagttcagcatgggcaacatagcaaggctccatttca

SEQ ID NO: 647885 - DNA, 245 bp, Homo sapiens
ctctgagtagctagtattacagacacctgctaccatgtccagctaatttttgtatttttagtagaggtggggttttaccatgtgggccaggctggtgtcaaactcttgacctcaagtgatccccctgcctcggcctcacaaagtgctgggattaccggtgtgagccactgcggccgatatctacgtttttaaagactcctgtaggggtggcaaacttgaggctcctggacatgcaagaagggacg

SEQ ID NO: 647886 - DNA, 386 bp, Homo sapiens
acgccgtggtgtgatcttagtttactgtagccttcatttctggcggctccactgactcctcccacctcagcctctcaaatagcctgcgactacaggctgtaccatcacaccccagctcattccgaaaacaaaatttctttgtagagacgggtctcattttgttgcccacgctggtcttgaaccccagagctcgagtgatcctcccgcctagcctcccagtgctgggatcacaggcggtgagccaccacgcagcccccactgtgactgacacttgtgcccggttgcctaggagtgtgcaacatcagatctgggggcacgtgctttattaagagttcagaactggggccaggcgcggtggctcatgcctgtaatcccagcactttggg

SEQ ID NO: 647887 - DNA, 438 bp, Homo sapiens
gtgatgcccatgccttaccttctcgagaacctgcattacaggtgcgggccactacatgaaggtactgtgggcatcgttagtggagacattcttgccttgaggccgccccactgatctgaaactcctgaccacaaatgctgcacccgcgttggtctaccagactgctgggattaccggtgtgaattaccatgccacactggggaacttgtgggataaccttcgctgggtgctaacactggttgatcctatgctggaatagatgctttactttctggactcccagattcttgcgcccctaatctacgacagcatgagggggtataaagtctcttgatatgcacctgtcgtacaacgggccccatttgaaggtacgttcctactgttttctcgtgctgtgggtggcacttgcatgcatgggcgcatacctggacgacattg

SEQ ID NO: 647888 - DNA, 2021 bp, Homo sapiens
  misc_feature (520)..(520): n is a, c, g, or t
  misc_feature (1382)..(1382): n is a, c, g, or t
  misc_feature (1595)..(1595): n is a, c, g, or t
cgcctccttactcctcattgtacccattctaatcgcaatggcattcacataatgcttaccgaacgaaaaagtcgtaggcatagcatagaaggtacgcagacagggcccaacgattgtatgcgcgcgtacggggctactacgaaggcctttcgcatgacgccgataataacatcattcatccaggaggatgcccactaaaacacacgccagcatcttgacctaatacaaaaccatcataacaaattcatcacgccgcgcggactcgtgtgagggctgcgtgcaacctattgctgacttcctctcatgagctaatttgcaagagcgcacgcgccttgcgcgcgccatgagcacgcaaaatcgcgcgcgcgtgagataccacagcgcgtacgagatgcgcgtaaaccgcctgttcacgtaaataatcactctggcgtaatgtgtctagccatgcgtaggcacctctacgcaccgcggcgtggaaacctcacaacatagcacgtcagtacaaatgcatgtgggnctgaaagacaaatccacaaaaaaataccaatataactgggctggtcgcgcgatggaaccttcgggcggtgtggagcctttgcaccgagggccgaagatgtgaaggggtcgcactggagaggcagactttcgtggcgggttgaaatcgggaccagagatgggacctccacctaaaactggtcccaactggccaagtggtcccctaaaaaccttcaggtgggataccccaatccttaattctgggaacctcccaaaagatagggaacttacacacatattataaataatctctttacgataaccacaagctgcgggttttaaataacaacaaccgaggggggaagagaaaaaaggcaaccacgccaggctatacccttcggacacttatataaaccattcacaccattaagacacacacaataccaaagttggggaactcccgcgggaaggcacacgccggaggtgaagcagttaaggtggcgaacccctgtcagtacttttcctccacaccaaggttaaaagaaactcgaggggaaagacaaagaaccagagaagagctggccgaccaaaaaacacggagggggcattttaagcgccgcaaagtggaggagacggcacaccaagagaggttgagggaccatacgagggggaccctaccaaaacagcagattttgggaacccataacggtggcccgaccctggggcacaccacccttaagcgggggcaccactaaattgagacgcgaccagaacaaacaggtgcggtgcacgctccacacaccaacacgacccaactacaagcatcgacgggggagggaggagcgcggcgcacccacaaaagaaaatatcaaccaccaagaganggagggcgggcgcacacaacaaatacgacacaacggcaacacaccaacgccgatcctccctgtgagaagaccaaacgaggtggcgcgcccccaattaaataggggagagagcacaacaaataacacagacgaatagcaaaaaacggatggcgcgcgggtaattaatcaaaacagcctgcgagctacacgggtcggaaacacaaccagagactntacgaaggaaggaacacaacatctagggtggaacgagaagcccacacaatacacagacagagaggcgcgagacaaacacaactgagcagagcaaagaccacccatagacaggccgaatacgcccagccaccggcagcgaagatagaaacgaaacagcacgccgcaactagcgatacatacaacacagaacggagagtcgggcgagagaaacgaacagccgcgaggctaacatatagaccacacacagctgacgccacacagccaccagacaatatacagctagccatcagcaggaagcagcacgcaagagaagtagaactcacaactagctcgagccgcaacccatacctaacgccctcacacacagcgaacacatcgccgacgagtagcaaagtaacctgacgcagcagcaaccactcagcacct

SEQ ID NO: 647889 - DNA, 404 bp, Homo sapiens
gcttgaattagttggtctcgattgttctgtactagactatggtgagctcaggtgattgatactcctgatgcgagtaatcagcatgtgtttaggagtgggacttctaaggcatttagcagggtgatgcctgttggagtccagtgccctcctagctcataggtagtcactaggctggagtggtaaaaggctcagtctcatcgtacgtgctcaggtcgtgtgtgctggccctgtgtatgtgctctctcgtgttacatcgcgccatcattggactatggttagtgtgttggttagtaggcctagtatgagctagcgttatgctagtggaagtgacatcacatggctaggccgcaggtcattactaggtctgagagggcccctgttagcggtcatgggctcggtttcac

SEQ ID NO: 647890 - DNA, 365 bp, Homo sapiens
tttcaaaaagcccttgttgaggattaggtcccccatgggataaaaatctattaacccttttaaataaaaagagccccagggttgggatgggcaagaccctctcttggaggttttttgcaaagcaattaaagggggggtattggccaggacccctttttttgcagtgatttgaagaccaaagttgttttccagcggggttcccgttaaaggttttttttttttaaaagaattaaacccatttatcactgtttaaagctttgaaaatctgcaatcttggcccagggacttttttatttaaaaaaaaacaaaactttgtaaatattaccccgtaatattatataaccttaataaacccttttaagcta

SEQ ID NO: 647891 - DNA, 434 bp, Homo sapiens
  misc_feature (126)..(126): n is a, c, g, or t
  misc_feature (152)..(152): n is a, c, g, or t
  misc_feature (208)..(208): n is a, c, g, or t
  misc_feature (215)..(215): n is a, c, g, or t
  misc_feature (241)..(241): n is a, c, g, or t
  misc_feature (298)..(298): n is a, c, g, or t
ggtacgagggggttctgaaggttgcgattaggttaaatgagattaaattctaggaattactgtctaggttaactacttgttagtgctgtagagattaaagaaatctatagttataggaaaaggagnttttttggatatgcccagctttaaantgtctcagggggaattggtatagcctttatatagcccacccctttttggcctcacngtggttnggaaattggccagagggtccacatcntgcccaaaccactctccttttgtcccaaggcaaaggtgatgccttgaggcttagggntggataaagcccagctttggatgctgctaacccactctgctgccccaccccatcctccaatttttatactaggctctttgccattgtgacgtcccatgacatagtctgatgcacgataaaacaattatttctttaa

SEQ ID NO: 647892 - DNA, 804 bp, Homo sapiens
  misc_feature (380)..(380): n is a, c, g, or t
  misc_feature (657)..(657): n is a, c, g, or t
tagggcccatttgagtatttggtttccaattagggagatagtgggaataaggataaggatggtggtgaagtatagtacggatgctactgtgtccaaatgatggtaaaagggtagcttacgggtggtcctccgattcaggttaaaatgaggaggctcgtgcggcttaggagcccaataaaggtgattgggctttaggtgggcgaaaatattagtgcttgggtgtggttgggaatattagtggaggagtggggattttatgtgcgtagagattgaggagtggaatagataatagggcaagtgacgcctctcctataagttgggtatagaggcacggattcgggaacaatggggtgtagcgcagaaataggaaagaatactcnatctgcgggcttgagtgtgtgggggagcggggtgttatataaaggggggtttgggactaggggtaataatggggtcgtggggctcgccctaggggagggctccgtgggtgagcacctagtgtgtgttaaagtggctccatataagggaaggagcaaaggtacagagcaaaaggttaaggccggagaggggcgtcttgtgagtgtggtgtctaatgtacagggtgtggcgacagcgttgaattttaatacgcggaaatgtgggagtgtgagtatcccnctaggggggggttgtgttttgaggaccccccgtttttcgggtgcaaggaaatattaagggaggtgtggcggagtgcgcttcgctaaagggagctgggcaataaaattggaagcgggcaacgattggcctttggaaaatgggttaaca

SEQ ID NO: 647893 - DNA, 186 bp, Homo sapiens
  misc_feature (17)..(17): n is a, c, g, or t
  misc_feature (123)..(123): n is a, c, g, or t
  misc_feature (164)..(164): n is a, c, g, or t
tttgaatgttttaatcnccagatttatgaactttttttcttgagcaattggtaaagtatacttttgtaaacaaaaattgaaacatttgcttttgctctctatctgagtgccccagaattgggnaactattcatgagtattcatatgtttatggtaataaagttntctgctcaagttcaaaaaaaaa

SEQ ID NO: 647894 - DNA, 298 bp, Homo sapiens
caccggtcctcatagcttacctttggtgcgcggtattctctcgtggctattggacgagatgtgataagcttaagaaaagcaaataagaagacgtggagcaggctgatgcctggtcccgcagtgtggaagagtccccattgtgaggcctccctggggatgtggcggtggccactacagcactggccgtcgatatagactgtgattgtcgttgtactggcaattgattatcatctgtcctcaatggtgacaatgctgactcacctggaggtggaatgatggccatggtgacactgaggag

SEQ ID NO: 647895 - DNA, 101 bp, Homo sapiens
catgtggagggggcattttgtccgacgactccccggaccgggcggcgcgctgggagaggctgcggagtcgcggtcgctgccctcggaggcactggacgccg

SEQ ID NO: 647896 - DNA, 463 bp, Homo sapiens
  misc_feature (14)..(14): n is a, c, g, or t
  misc_feature (67)..(67): n is a, c, g, or t
  misc_feature (94)..(94): n is a, c, g, or t
  misc_feature (119)..(119): n is a, c, g, or t
  misc_feature (143)..(143): n is a, c, g, or t
  misc_feature (152)..(152): n is a, c, g, or t
  misc_feature (156)..(156): n is a, c, g, or t
  misc_feature (161)..(161): n is a, c, g, or t
  misc_feature (164)..(164): n is a, c, g, or t
  misc_feature (166)..(166): n is a, c, g, or t
  misc_feature (170)..(170): n is a, c, g, or t
  misc_feature (177)..(177): n is a, c, g, or t
  misc_feature (225)..(225): n is a, c, g, or t
  misc_feature (257)..(257): n is a, c, g, or t
  misc_feature (277)..(277): n is a, c, g, or t
  misc_feature (323)..(323): n is a, c, g, or t
  misc_feature (427)..(427): n is a, c, g, or t
ccccccaggctggnaccaccatggtctagaccccaagtgggcctgaatgctgtggatcacttccttntccccttccacagtgtttggggatttngggaggaagggaagggagaggagtnttaacgttcgcagtgagggggtcntgggacaantcantttgntancncggnagggggnagcagacagtggcccgcacgggctgaggggcctcctgtctgtggtgcncatcccaccgagaggattttggctcgcgagcnggcagacactttttttttcngaaacactatcgtcgtttccacgggcggaaccaacaaaagcaagtntctccaagtcaaaaataggttttggattcttggtggcggcagtatccgctgaaaaaatagactgaacttctgaaattatcttagtagcaaaacaattacaaganaaaagttgcaacttcagtgctatgactggaaagggg

SEQ ID NO: 647897 - DNA, 169 bp, Homo sapiens
aagtagagatggggtttcaccatattggccaggctggtcttgaactcctgacctcaagtgatccacccacctcagccttacaaagtgctagggttacaggtgtgagccactgcgcctggccccttccctattctttaacaccaccttccatcccttctgtcgtcttctc

SEQ ID NO: 647898 - DNA, 532 bp, Homo sapiens
gccgaccataggaaacatgggaaaactttatttgtgctgtgtggctacccgggtgttcaagccctggttacgggccccttttttaatatcgggaaacaattgggggccggggtccccttttttcccccccgttgggaggagttggccttaaaaaagttggttaccttaatgtgcttggcaccgggtttaagccccaaggaggtgttggtttgttggttgcaggggtcaaaggaattgccccgcaaaaagtcctttatttgggtttccggggaggggcccagccggggccccccccctttttttgtgaccagaattttgggggtggaacccaaggattgaaaaaagggggacccttttttttgaatggtgggccagagggccctgcgggtggcttttaccaaaaaaaccattggccggttgggggggtaaacccccccatgtcattgtttttttttttatgggggggggggggggcccttgtttttgagcggccggcttgtccccccccttgaataaattccttgttccccca

SEQ ID NO: 647899 - DNA, 694 bp, Homo sapiens
ttctcgacctgcaggtagtcctggccgagccagcccctggaccccctgatggcccccaccttcccatccagacagccgagctcgctccggaacttgtcatctccaacgacaaaaggagcttttgccactgactcggccgtgtcctgacacctccagaacgcaggtgctggcgtcccgttctgcctgggaccccggtgaacctctcctgctcggaagccggacggcagggatgggtccccaatcttcgccctgcccaacttgacttcatccaaatgcccttcctggagactgaacctggtgctcaggagcgaaggactgtgaacttgtggccctgaagagccagagctagctctggctcaccagactgggcgacgtcaccctgactcccatcccatccccaagttctaaggtcttttcagagcgtggcaccggtgtggacagcgagtggctgcgtctcccaagatcgtatgccaagagggcggcggcagagcgtggtctgtctggtctccttggagacaaggttctgttgccctgatttatgaactctatacatagagtatataggctagtacctttttgtacaggaaggtgactttctgtaaacaactgcgatgtgatattagactttttatacaaagttaacaatttgcatataacgatttttaaacacttgtgttacaacacaaaacacaaa

SEQ ID NO: 647900 - DNA, 966 bp, Homo sapiens
gattgttgttcgcaacgcggttgggcgccagaacactaggtgtcgtggaaacagtagccctaaaagccaaaatgggaaaggagaagactcatatcatacattgtgcgtcgattaggagcacagtcaatacgagtgcaagtccactcgacgtatctgggtgaatcttgatcgtataaattggggtgggattggactaaagaaccatggaataaatttgatgaaggatggctgtctcgatgatggtgcaaaaggggtaacttcaagatagtgcactgggcactgtggataaagtgaaaagacatgtagactgtcgaacagtgtgtattcatgcgattggatgatctgcgcattgatggaatagttgagagaacagtaaggtacgtattgtgactataatttgatgcccacgagtgacacagtagagtttattgacacaaagaatgtatcacagggacatctcaggctgaggagggcagtcgtgatcggtggtggcatggtgttggtgggaccagagaaatggtatctccaagaatggtgcagaagccgaaagcatggccttcgggttagcgctctgggtgggaaaggataaagtgtcgggtgtgtacaaatgtggattcccatgaagccatcctacggcgagactgagatatgaggagtggtaagggaaagtgcgcgtacattgagcaaactgcctgttactccgaccatgatcattgtgcatttctggtggatggtgcttctgctggagcgcaggtaactgctggtcacggtggtgctgccgtaggtgtgagtcggcacccctggttggggggctgctcgttcacatcgccgtagaactgcgggtccgattcacaggggggggggcttccacgggaagggggcaccttgtctcccggaatagtgaagtcgcacggcaacttggcgggcggccaccgctctccttcttttccttcaccctcacgtccc

SEQ ID NO: 647901 - DNA, 897 bp, Homo sapiens
tccacgcttaatccactttatttttctggtttaaaaaccctttgttgtacccacagcttggagcctgagttccgcttgcacggagaactcgggggtgtgggtcttgacgaggtggtctcagtgaactccgtgatagggagactggcgtgaatacagtctcctctccagaggtcgggggctcaggtagctgtaggtcttagaaagtggcttcaaggggtggcctgggcgaagtttgcccagggtgtggcaggtgcacgccccgggctgaggtgtagcagctcactcgattcccagccatcttgagcagctctctataggcccggggtgcggagacgattgccagtgccccgtgggttgcagggattgaggcgttaccagcacagagccgaaggggcctgtgtcacctttgcaggggacagtgtgtggggctttgccgactctgtgtccccccagatagccttctgtgcgcacggggacagatggaaagcttgggccaggattgaatggccccacggattggcgggtgggccaccttcctttggagcatttaaacacccagaccgacgtgtggccattggtagctccccgattagcaacaaatgtgcctttgaccctggtgcgctggccggcacgggtctgcttctgccacgggcataatcttcaaaacctcatccttgagagaggcccccaggaagacactcagggatctcggatcccttaaggggcaggacgaacagatagatctcctccaggacttgatctccatgtccttgaccaaggggccaatttgggagacgggcatccatccttatcctcggctagcctcgggagctccggcgccggcccgggcccgcaaggccggacccgggccgatgccttgcgaactccgggaaccag

SEQ ID NO: 647902 - DNA, 441 bp, Homo sapiens
cttccataacactacatccaacagccgctggataagtgctaggaatatatacgagaaggatgaaagtagtcccatctgtagcaaaaatataggtccctaggcatagagtgggtcagacagactgaacaagggcagtgcagtatcacaggatgctgcggaggcaaaacagatgcataatctcacagataagggcttcagtatcctgaaggggatatcacctgagtaggattttgaaagagggtcatgattggccagtaaaaccaatgagggaagacattccaggcagataacacaggatgagcaaaaggtaacaggcacaaaagcatgcggggtgttttgggaaactcaggaagatgggaatgatttagactttggtaaacacagaagggtgtgggaggtgagagaagaaacgcaagagggtaccaggtcataaggagactc

SEQ ID NO: 647903 - DNA, 711 bp, Homo sapiens
  misc_feature (516)..(516): n is a, c, g, or t
  misc_feature (571)..(571): n is a, c, g, or t
gtattattgtattgcactataggagcgggaagatgggtattctaccgaccctatcacttcgaattctagaagacatctgtgaggatcgctgttacatctactaatgacatatcctttacgcagtctggattacgaacaggatgtgcatttatgatccaggtatgccttatattagggtatagagttacattatttacacatttgagatatctttgaatgcgtggagctcaaggaattgagcggatatttctatatcatgtttacttaggctttagaattaaagcaagtgtatttattaccttgatggaaatatgggaaatgtctaatacatgcaatatacagggatgatacttgagctgagggaaaattgccgctttttatctgtgtggaggggtgcatatataatctttcacctgacagactaagaaacccatgaaggtctgcactggttagagatactttttcgcttcgtcagatgcgcctggtgtctagcgcgaattgatcactagatactgnttcaaggacaccagaacgaggcctcccaggtcctatacacaagagctgtcaatgnaatacgacacgcagtgatttattgcatgatgcacaggaatatggctgttccttaagacatgcacgttcagactgtccataccagacgcaaagattctatgtttatttatacggctaccattgaaaacctttatgtgaggt

SEQ ID NO: 647904 - DNA, 123 bp, Homo sapiens
agagaaaaaaggaatagaaaccagaagaaaaccatccataaaatgacaggagaaggctcacttatcaataatcaccttgtaatgtaaacggattaaattccccctttaattcaaaaggagact

SEQ ID NO: 647905 - DNA, 419 bp, Homo sapiens
actctaagatcccgccacggaaatttctaactgaaaatctcccatataataacagattactaaaatacagacaaggcacatttatttcaatacaatatctgctagagaaacgctctatttaaccataaaagaatcagaagagctcctagagctcacttttctccattatcattattgtagttgtcattgctattatcattattatcattagcatgacaatcaccattaattaagtgcttattctatgctagtgattgacatgcaacaactcattttatcatcacaatactattatgagaaagatattaccatccctatgctacttaaaggacactggggctcgaagaagtaaagaaactaatcaggccgggctaggaggctcacatttgtgatcccagcagtttgtgaagccgaattgg

SEQ ID NO: 647906 - DNA, 541 bp, Homo sapiens
tatctcaaaataactatattgagtgacaagaggaagatataaaataacacatgccgtgtggttttattcatgcaaaattttgtaaaatacaaactaagttataatgacagagtgcagatcagtggtttgttcaggtgacagaggggtttgttcgggtgacagaggggttagggttcggaagagtgagattacaaagagctatgagaaaactattggggacaatggatatgttcactatctttattgtgtgaatggtttcacaggtgtttacatatgtcacacttaccaaattgtatacttaaaatatgcaaaatatttctggtaaaatttcactttgttttaaatgaaaagaggctaagatgtacatttttaccacctcgagtctccattatgttagagaacctgggcagtacaataaagaaagagggagaaagaaagagagaaggaaggaagaaaagaaggaaggcaagaacggagagaggggaaaaagaaacggaaagagaaagagagagggaaagaaatagagaaagataaaggagaa

SEQ ID NO: 647907 - DNA, 319 bp, Homo sapiens
tctcaaaaaaaaaaaaaaaaaataccagaaatactcgtcatttaggattaccagctaagaagcggtgactctgacggcccccggaggaataaagtgagggtgcgggggtgtacctagcatgggttgggagtatcttaaaatagatcccaatttacagggtaaactttcctagggttatatggagtgaggagattggttttaaattctaaaagtgctttttatcttagggggggaatgtctatgtgcgtctctatggggaaattggggaaatggtcttacctggtaattttcacaaacaatgccagtgtgggaaagaggg

SEQ ID NO: 647908 - DNA, 272 bp, Homo sapiens
ccacgcgtccgtctggcaataccaagtgttaaggaagttggccagaaccctcatatgttgctagtgagagtgtgaaaggtggtacaaccactttggaaaatagtggcagtttcttatgacattaaatttgtacttgtcatatgacccagtaattccaggtatttataggcatctacccaagagaaataaaagcatatgtctaaacaaagacttgcacctgaatattcataaagcttttgtgataggctgagtaatgcctccctcaaaaaaaa

SEQ ID NO: 647909 - DNA, 333 bp, Homo sapiens
  misc_feature (35)..(35): n is a, c, g, or t
ctgttgccacaaagatctgaagaattgctttaatnaaaaactccaggccgggcacaggtgttacgcctctaatctcagcactttgggaggccaaggcaggtggatcacctgaggttgggagttcgagaccagcctgaccaacatggagaaaccctgtctctactaaagtaatacaaaattagccgggcatggtggcgcatgcctgtaatcccggctactcagaaggctgaggcaggagaatcgcttgaacccgggaggcagagtttgtggtgagccgagatcgtgccattgtactccagcctgggcaataagagcgaaactccgcctcaaaag

SEQ ID NO: 647910 - DNA, 154 bp, Homo sapiens
ttctggactgacaattccgaccctgctggccccaggtgctgcctcctctgtgctgtcgaggaggtggacagcaagaggaggtggacaacaacctatttagctgttccccaaccttttcctccgaccccctaacaacccccctcctctgtgctgt

SEQ ID NO: 647911 - DNA, 222 bp, Homo sapiens
tctggcatccttctgatgacacgtgatgctcgctcatgcagctctccctgtgtatggatctgttccttcacacctattaagggcgcctcaggagctctctctccctccaacatcagttttcctctctgcaggttactcccattagcacaaacacatgctctcataatgtccatgtgacgaaaacaaacctccctcaggagcttccacatgcatgcacccagg

SEQ ID NO: 647912 - DNA, 86 bp, Homo sapiens
cgggctccggctccggctccggctctggctctgcgcggtggcagcggcggcggcggcgcggggaccgagcatccacaacggggtga

SEQ ID NO: 647913 - DNA, 96 bp, Homo sapiens
tagaggatcccgactgcaactctgtgctccaaagtgctgggattacaggctgtgagcaccgacctggcttatcttcttttaagaataacgtttgtt

SEQ ID NO: 647914 - DNA, 269 bp, Homo sapiens
gaacggaatgtaatggaatgtaatggaatggaatcaacccgagtgcaggggaatggaatggaatggaatgcaatggaatggaatcatccggaatggaatggaatggaatgcaatggaatggattggaacggaataaacccgagtgcaatggaatggagtgaaatggaatggaatggaatggaaacaaccagaatggattggaatataatggagtgtaagggaattgaataggaggaatcggaatgtaatgaaagggaatggaacggaga

SEQ ID NO: 647915 - DNA, 232 bp, Homo sapiens
  misc_feature (94)..(94): n is a, c, g, or t
  misc_feature (96)..(96): n is a, c, g, or t
  misc_feature (115)..(115): n is a, c, g, or t
  misc_feature (117)..(117): n is a, c, g, or t
gtacagacaaggtttaccatattactttaggtgaactcctgacctcaagtgattctcctgtcttgccctcccaaagtgctgggattataggtgngnccctggcctggcctaaagngngatttaaatgttcttattacaaataaccatttatcgtgagaagatggatatgttattagcctaatttatattctacaattatcatggatataattgacccccaataaatttgttg

SEQ ID NO: 647916 - DNA, 1146 bp, Homo sapiens
  misc_feature (224)..(224): n is a, c, g, or t
  misc_feature (257)..(257): n is a, c, g, or t
  misc_feature (334)..(334): n is a, c, g, or t
  misc_feature (470)..(470): n is a, c, g, or t
  misc_feature (1146)..(1146): n is a, c, g, or t
gcgcggcgtgagaagccatgatgcatgcaaagtctctcgcgagaccctgtagcgaggcggttgcgggagagtccgtgcgagcgggtaatccgagcgcgataggtcgccgcaacgttccataggagacaggatgtcgcagttgcatgatccaagcttgcacaggaagcgtactgaatcacccatgaaggcacccaggcgcattcgtcgcgagcactcgtctaggncatatgaagctcctacctcaccgcggcacacantaagttctctcatgctgctgattgtctcatggagtgcgagcctatgtccagcagctgctgaactgaggtctgaaggngcgatggaagtatccgccgcacaattggaacatcgtagggacggcttcgaaagaagagcatctgaatctaagcacacttaaaaaagactgggatccaatgtaaagcatgggcctgaaggaagcatatggatgtgtngttgtatctattgggccctgtctgggaccgatcgtgcttgaattcaaggcatggaattcgcagcgcatattctcgtcgggagccagagggtgttaataatgaatggggcaggtgagaacgtttctccatttcacctgtgctctacagacgaactagatcggacaccaacatggatgggggcaaatagatgggtaatgacgggtgggatagctaccaatcgaattcaatgtttccacactttgactcgaaatggtcgtaaattgtcttggcatgtagactgtttgggtcaccgttgaacgattgacagaccgatgaagcttgttgtattaagcatttcaacctgggcctggtcaactttacttgggtgtcattgcttcaagaagaaactgggcagaaatggtccgggccttatattatacaagagcaccatgggcaagcccccagcgcctattaattaagggcccattttgcactaaattctattaccagtcacaaaagcaaaaaaccaaaaaaaagaacaacaaaaaaacccgagggacacataagagagggggggggaacgaaggagacatagaaaagagacgcagtgaaaaccggggggcagcaaccgacatttgtgcacaagggggaacaatagggggaaccacaaaagaggaaaaaaagcagaacgggacgn

SEQ ID NO: 647917 - DNA, 712 bp, Homo sapiens
  misc_feature (5)..(5): n is a, c, g, or t
  misc_feature (78)..(80): n is a, c, g, or t
  misc_feature (82)..(82): n is a, c, g, or t
  misc_feature (84)..(85): n is a, c, g, or t
  misc_feature (121)..(121): n is a, c, g, or t
  misc_feature (123)..(124): n is a, c, g, or t
  misc_feature (127)..(127): n is a, c, g, or t
  misc_feature (139)..(139): n is a, c, g, or t
  misc_feature (163)..(165): n is a, c, g, or t
  misc_feature (176)..(176): n is a, c, g, or t
  misc_feature (182)..(182): n is a, c, g, or t
  misc_feature (198)..(198): n is a, c, g, or t
  misc_feature (222)..(223): n is a, c, g, or t
  misc_feature (228)..(228): n is a, c, g, or t
  misc_feature (234)..(234): n is a, c, g, or t
  misc_feature (248)..(248): n is a, c, g, or t
  misc_feature (260)..(260): n is a, c, g, or t
  misc_feature (264)..(264): n is a, c, g, or t
  misc_feature (266)..(266): n is a, c, g, or t
  misc_feature (336)..(336): n is a, c, g, or t
  misc_feature (405)..(405): n is a, c, g, or t
  misc_feature (454)..(454): n is a, c, g, or t
  misc_feature (459)..(459): n is a, c, g, or t
  misc_feature (489)..(489): n is a, c, g, or t
gtgtntatatgtgtcataataaaatgagctagaggcacaaagccagtaacacatttatggtctgttcatctggaaaannntnanngcgcactccccactccttttttcccttttggaagtngnnagntttatttttggnattttaattttagagaaaatttannnttccatgttgntttgtngttttggttaatggtntttttttttctagttatggaatgnntgagnaaattngggtgtttttgatntttgtgtatttnggtngnttagtttattgattgttctcattttattctttttccaatcatgggaaatatttagttaattttggttttnaagattcatattaaatttaaagttcctccctccttttggtgaggaagacaaccctttagagcgaaacanaaaagagcaaatgtaaaatccatctggggcggggcatggtggctcatgnttgtnattttagcattttgggaggttaaggcaggnagatgacgaggtgaagagattgagaggatcctggccaacatggtgaaaccccgtctctactaaaaatacaaaaattagcttggcgtggtagcacatgcctgtaatcccagctactcgggaggctgaggtaggagaatcgcttgaacccgggaggcagattttgcagtgagtcgagatcatgccactacactccagcctggcgacagggcgagactccgtctcc

SEQ ID NO: 647918 - DNA, 287 bp, Homo sapiens
  misc_feature (163)..(164): n is a, c, g, or t
ccgctgacaagctgcagctcatccactgatgacacacgacgcttctgagagaccatcccaagacagagtcagcagacccccagaccctcaagccatctgttttcatgaggatgaccccttcttctatggtgaacacctccggaaacgggggctgttgtcgcanngtgctgtcatcacaggcatcatcatcctcaccagtggcaagtgcaggcagctgtcccggttatgccggaatcattgcaggtgagtccatcagaaacaggagctgacaacccgctgggcacccg

SEQ ID NO: 647919 - DNA, 109 bp, Homo sapiens
caaaagattgaggattagactttccgaggacttacctgtcttattggagtaggcaagcactatccactaaggagggggtggcggaaaggaatgacacatgacatacatg

SEQ ID NO: 647920 - DNA, 105 bp, Homo sapiens
tcgaaccggtaccgacagagtgaccttgtctaaaacaaaaaaagtacatagatgtgataatatatgcgtaacagtatcaatgaataggccaagtgtgatggctca

SEQ ID NO: 647921 - DNA, 354 bp, Homo sapiens
gggagtcatgcagcaattctcattcatggtcgctgcgggatcccttatagagccgactccatatgtatggcgtagcgtggccccacctccctcaggctgatctcctagctggccttcaaatttctcatggagtccaggtcgctctccataggactggcctgtacgtctcagctactgtgagcctcgtctcagcagctccaaacctcagcagactgtgagtgtagaccactgtggggctctcactcaatctgctgagacacagtacttgtctagctcctctcggaacttccgagccagctcgtcataaattgggcccggatgtctgccatgatcttggcgaggtcctgagatttg

SEQ ID NO: 647922 - DNA, 276 bp, Homo sapiens
gagagggaccaggggttgcgccacagctctcatttcagtctgacagttcagctacagtctgactctggacagggtgtttcgttgcaaaatacaaacaaaagcgataaataaagcgtttcatttggtaggcggagagtgaattaccaacagggattgggcttggcctatgctttctgttgtagttgggcagtcaaggaacctctggggtgtgaccaaggcactacttgccacctgccacagtaaagcatcttcacttgacttaattgctgcccggag

SEQ ID NO: 647923 - DNA, 104 bp, Homo sapiens
tgagacagagtttctctcttgttgcccagggtggagtgcaatggcatgacctcggctcactgtctttctatgaactcaattataccatcggtcccaccttgtct

SEQ ID NO: 647924 - DNA, 793 bp, Homo sapiens
agcgggtcggctcccggccgggccgcgggcgccgaccgttgagccaccggctgagccgcactgctgaagtccctccctcaggaacccctccggccgaccctccaccgtgccgaaccagctctcgcggcaggccgacccatgtgggggttcaggctcctgcggtcgccgccgttgctagcatccatgcatgccaggagcgtgcggaatcgggcaacacgccagtcgtccatgcatcttcaggcaccgaaccgatgaaggacggtgcggcagcggacggcgcgcgatgctccagtactcggccgagggtgcgccagccgtcacgtgcctgcacggttgccaccgatgccttggagccgatccgcaaggcgcagacagccgacatcgcatcactggatagcggcggccgggcacgggcgacgcggacctgggaaggcgggcccgcgaaacctcacacccgcggagcaaccacacgccgacaaggacggacagcccggcagaccgaacgcaccccaaggcacatcacacgctccttcgttatataccactgagcgcgactgtggcgaggcaaactttaagccaatggaaaaccatacacgtgacgctcccggtccagtcccgtggcacggcacattgactgcaacacctgagggggacagcaaccgtgggaaggatcctgagtacaacaacgtggtaggggactcacaccaacctacgctgaagggcgcacaagcagggggtgtacgccccaacacgtcgaggtctaagtcactatgcgggggcagggacagtgacg

SEQ ID NO: 647925 - DNA, 453 bp, Homo sapiens
gagaaataaagttttgcctatagtaaaagatgaaataagccaggcatggtggcatgcacctatagtcccagctactcaggaggctgaggtaggaggattgcttgagctcagaagtttgagaccagcctagccaacatagcaaaaccctgcatcaaaaaaaaaaatggaataggccgggttgcggtggctcacacctataatatcagcactttgggaggccaaggcaggtggatcacttgaggtcaggagctcaagaccaacctggccaacatggtgaaaccctgtctctaccaaaaatacaaaaattagctgggtgtggtgtcacatgcctgtaagtcccagctactccagaggctgaggcagaattgcttgaacccgggaggtgaagtttgcagtgagcagaggttgtgctactgcactccagcctgggtgacagagcaagactccggctca

SEQ ID NO: 647926 - DNA, 343 bp, Homo sapiens
atgagtggcatgtgctagagataaaaagcagtgacatcactatacgagactcggtgaaaaaacagaacaaaatgaggtctctgaacgttcgactgaaaaggagactttggctgcaaacgtatggaaactgtgacatatttcaagaaacgtcgctacaagggactccggtgagtttaaatataggttaagacgtctattctgtgccagtcatagcttaccttacggggagggggccacatctggaaacagggagttttagtggtaagcaaacgagtatgtaaacaatcgaatccattaatccccaaacatccaagaggccctagcagagcaggatgcacataca

SEQ ID NO: 647927 - DNA, 894 bp, Homo sapiens
tagaaggaactaaggactcctgccaacagcagacacaaagctgtgacctcctgccaacaggcatgcgaatgagccattgagaagcggagcctctaaccatgttcaagctttcaagtgattgcaagcacggctgacatgctaaatgcaggcatatgagaaaccctgaggcagaaaaacccaggctagagtacaaatgtgattaacatctacatgccagtcatgcaggagttattcaatatgcactgatgaccccaagagcagtgaaaataaccgtgacagaagcttcctgatgactggtattcttaaatgggtgacatcggattacaaatggccagcatgaagaggcatcagaatgggcaagatgcagtcttgctgtcacccaggctgagtgcacgcggcaccaatctccagtcactacaattccacctccgggttcacagcgattctcctgcctcagttccctgaactagttgggattacagtgaagcctaaagagtcatcctccaaccttgacaaccttcaccattataactgcaacaagtcccagatgagaaacaacagccatctcaggcagtcacaattttctgcagtcgacattcaatggagagctctgactggataccaccgcactgtgtcggaagctgcgggaccagatcgaccggacccaggatgaccttccaagaaataaaacgaggcaagagtctaccaagagggaccaccctaccagcaggcacgcgatcacacgctgacgccaacttccgaaagcgcggccccccgcacctcagcaactcccagcatccagcaaccgccgcctcgtggctccccaaaacgcgcgcgccccacaaaccctacgcgccaccagcacacgcgcaaccaggcacgcgcgcatcctca

SEQ ID NO: 647928 - DNA, 963 bp, Homo sapiens
gaaccccctacacccccaccactttcacaggtaatccatttctccctccagtaagtatctccttggaccagaactctccagcatcatggttccgagttcctgtctctcatctctgggatatgcattcagggagaaggtcatttcccccctctttgctccctggctcagcatctagtaggcggtacgaactctactttgtcccacctggcttgtatccgtcatgctgccgcagcgcttctggcacccatctgcacggcctcggcactgcacggcgacactcttataccccctacttcctcttggcaccgcaccgcgccctttagttcaactttcatactaccattgggcgtacacgcccaagtgcctacttcgtcatacctcctcttaccgttgggtccccaatgcgtacatatatgcttacatcaccaattctatgacgcccgctctctgtatgcgtacttctcaagcgctggccttagtgcgccatttctaaacctctgcggccctatatcggcccatttacgctgtctcggaccgaagtcttaaacgacttctacgcacaggctccacatccccaatcgcagcaatcttggcaggggccttcattccgagcgccggccttctcccacgagatgcggtcgtccgcttgtgctccacgcggcacacgctcaatttacatcgtcccgtgggcacacacccctcctcccagagccctcctacggcttacacagccaagctcactttgtccacaaaacacaccacttttcgaaccaacgcgcggccactttccaagtcgacgtacggcaccccacggggaccaacagcgcaccctcttagaacaaccaccacttgggcaccccctctcaacaccaatcgtcgaactggtggcaccgcgcgccataccgtctacacgcacactcctacgtcaaccacaaccattccgcataacaacgctaaacagga

SEQ ID NO: 647929 - DNA, 251 bp, Homo sapiens
acatggatcagatattttgtattttaggtagagatggggtttgccatgttggccaggcaggtcgtgagctcctggcctcaagtgatctgccctcctcggcctcccaaagtgctgggattacagacgtgagccgccatgcccagacacctatgtatgtcttgatgcttagtcacaatgttctgattagttgaggcggtctttttctttcaggaaaggtatgtttaacattccacactgaagatgtaattgtc

SEQ ID NO: 647930 - DNA, 308 bp, Homo sapiens
ctgaagtgtactctatgaacagtcataacacactccagtgaagggttctctactgaacatgcttacacactccagtgaagggttctctctgaacaggcctaacacactccattgaagggttcccttctgaacaggcctaacacactccagtgaaaggttctctctaatctggcctaacacactccatgtgaagggttctctcttgaacaggccttacacactccagtgaagggttctcttttaacaggcctaacacactccagtgaagggtttcttctgaacaggcctaacacactccagtgaagggt

SEQ ID NO: 647931 - DNA, 207 bp, Homo sapiens
  misc_feature (165)..(165): n is a, c, g, or t
ctaagatcacgccatgactccagcctggtgacagagtgagactccgtctcaaaaaaaaaaagaaagttatgtaggataaggaataatcattttttaaaaaggcaaggagtgtaatcgtgaccttgtgttaagagtggtttcttactggccactacattttctctnggttatatataactctttaaaacaacttgtgacctcactggt

SEQ ID NO: 647932 - DNA, 808 bp, Homo sapiens
agcggggcatgagtgcagtgtgggttggggccgggggtggggggcagaggggggtggtcaggtgggctgggaccccccctctgtgtaaaatgagtatggattacagcgggattgatgttcgcgtgtatgccgatacaccccccgcatggatgccagcggaaagtccttagccatccatgctctcggcgtggcgctctagtctcttcgttgatccatctaatagacaatcatacaagtggcgaacaattgactgatgggaaatggggctttctccacgaaaaagccgatttgacaatgattgagcgaaggtgggtgtacgctccagatgccaatggcctgccacagtcgacgttaaagggccctcacatggctggtctcgctgcagaagctgacgggggtcaacgaagtggatccacaggtcacaccatcggaactacttgggaaggctcctgttgtatggttgattctaatcctgctcgcagctgcgatcggcgtggtacctcgctcgtctttcctaccattggcaactctactctttgattgcatagcgtatggaccggtcatggattctccttacatatgccgcgtgagttgtatcagtccagtcgaggccagacctggcaggacaatcgaggcgagggaagtcaagtcgagggcgagttcggctgctaccatatagcgaagcggaagggtggctggaagtacaccttaccgggacgagaaactccacgacgataaagccacaatgccacgtcgtgacgccgtagtcgccaacgagtcggccaaagccaagaaaggatggtacagg

SEQ ID NO: 647933 - DNA, 138 bp, Homo sapiens
agggcaggacatgggcttctgggcagctggggcaggttcgggctccaattccatttaattttggtttcttggttggtctttcctcaaatatacagtccatcaccttggtcagtgcctggcccccacagggtcctggcc

SEQ ID NO: 647934 - DNA, 937 bp, Homo sapiens
  misc_feature (31)..(31): n is a, c, g, or t
  misc_feature (70)..(71): n is a, c, g, or t
  misc_feature (105)..(105): n is a, c, g, or t
  misc_feature (121)..(121): n is a, c, g, or t
  misc_feature (125)..(125): n is a, c, g, or t
  misc_feature (138)..(138): n is a, c, g, or t
  misc_feature (154)..(156): n is a, c, g, or t
  misc_feature (160)..(160): n is a, c, g, or t
  misc_feature (215)..(215): n is a, c, g, or t
  misc_feature (237)..(237): n is a, c, g, or t
  misc_feature (310)..(310): n is a, c, g, or t
  misc_feature (313)..(316): n is a, c, g, or t
  misc_feature (360)..(360): n is a, c, g, or t
  misc_feature (521)..(521): n is a, c, g, or t
  misc_feature (555)..(555): n is a, c, g, or t
  misc_feature (576)..(576): n is a, c, g, or t
  misc_feature (749)..(749): n is a, c, g, or t
  misc_feature (780)..(780): n is a, c, g, or t
  misc_feature (789)..(789): n is a, c, g, or t
  misc_feature (798)..(798): n is a, c, g, or t
  misc_feature (805)..(805): n is a, c, g, or t
  misc_feature (843)..(843): n is a, c, g, or t
  misc_feature (858)..(858): n is a, c, g, or t
  misc_feature (869)..(869): n is a, c, g, or t
  misc_feature (876)..(876): n is a, c, g, or t
  misc_feature (936)..(936): n is a, c, g, or t
gcactgggggaatgggacacaatcttgcctnccatgccccagccactctctcacatgcggaatcaccaannagggaaagatagagtccctgagcaatcaggaaanggtgtgctcccggatnaaanacaggtagtaggncacatcggtgtagacnnntggnttgttgcggtcaccacagcccgatccccagctgatgatgccttgcagggtgagcnggcgctctgcagcttggtcctnacacaccagcgggcctccggaatcaccctggcacgcatcggtgccgccctcgaggaaccctgcgcagagcatnttnnnnaggatggaggatccgtgcacgtccggggctgagcagcgctccanggagaggaacggtacctgcgcctcctgcaggaaagctaggcatatatcctccgccccctcgaactggtggccccagccggccacctggcagagcgtggtctcggagggtcgcgcggcgccgcttggcaggcacaccggctgaacgtaaggcgacaggagcncgcactgccgtccgcatcctcctgaaggcgcaanagagccaggtcgtgctggtanctgacgggcgagaaggccatcgagcaagcggtaggagcgcacggccaacgtctggcacggctcacagctgtggttacggcgttcctggccgagcaccaccgtcagaacctcgggtgcgggcctgcggggggggtaggggagaggcagcgctctcagacctggccacaagcgtnctggggaagcccctgctcccgaaccccaatnacgtgttcnaaaaaaaanccgggancaccggaggggcgtggaaagaagggtggggcgggaganggtagggcacgggtncgggtaaaaanaaaaacnccctgggagacggagagcgcggccctgggcggctctgggcggcgggtctcgcggtctgcng

SEQ ID NO: 647935 - DNA, 647 bp, Homo sapiens
cgacgaccgaacgcccccgagagtaacaccgtggaccccagagctcggtcccgcgccctgatggatccgtccactggggcatagataggcatgcgtcgagggcgcgggacgcaggaggtgatgctgggctgctagggagccagaagagccacccatgacctggccctttgcctccagacgcacctagcgggaaccccagaagacaggcgctcgaccatccctaagccacgccacaataacatatcagattattctactacgctgtagagcaaatcggtggacgtacctaggataagataccttctgtctatcaaacttgatggcacataatccagagcactataccacatgcaccacattgaccacttggaaacccttcatagaggaggtgagctagcaggacgataaacatgtttgcctgccctactggactgccaccaagaacaggattgcgcaacaaaagagccatagttggggaaggtaaggagtacaccctacctaggtatcacacgaacaagaggttagaccgaacaacctaagggacgaccacacaatggctttgacggaagtagccctgggagatgggccttggaacttccccacccaagggacccgaacaacttctgtgaatagggtttggatactgt

SEQ ID NO: 647936 - DNA, 170 bp, Homo sapiens
ttatccccacaagcactttctcggcctatccggaatgccccgacgtttactcggactaccccgatgcatactaccacattaaacatcctatcatctgtaggctcattcatttcctctacagcagtcagttaagtatttactaattttttcagtgagttttgtacgaaggc

SEQ ID NO: 647937 - DNA, 761 bp, Homo sapiens
  misc_feature (31)..(31): n is a, c, g, or t
  misc_feature (67)..(67): n is a, c, g, or t
  misc_feature (97)..(97): n is a, c, g, or t
  misc_feature (116)..(117): n is a, c, g, or t
  misc_feature (124)..(124): n is a, c, g, or t
  misc_feature (188)..(188): n is a, c, g, or t
  misc_feature (205)..(205): n is a, c, g, or t
  misc_feature (290)..(290): n is a, c, g, or t
  misc_feature (406)..(406): n is a, c, g, or t
  misc_feature (701)..(701): n is a, c, g, or t
ctctctctctctctctctctccggaaggaangctgttagcctgagactcaggaagacaacttctgcngggtcactccctggcttctggaggaaaganaaggagggcagtgctccannggtacanaagtgagacataatggaatcaggcttcacctccaaggacacctatctaagccattttaaccctngggattacctagaaaantattacaagtttggttctaggccctctgcggaaagccagattcttaagcaccttctgaaaaatcttttcaagatattctgcctanacggtgtgatatggggaggcaccttgctgcaattgtggatcactgcagggctcctagtgacttcgcacaactgatgcttatacaagctcgcatctctggacttgtagagactcctnttaaaggacgatcgtcggtcacttgactacctcagaccagaatcctgcaggagctgggagaagttggctgaggaaggagccagaggcctgttgacctggtccccagtggctgaaccatatgatgtgtgatctgtgcaaggggaaacagacgtcatagggtccacgagaagcgacggacgaatggttgaagacagagcggtcatagcacggttgctgaaaggtgtgactgtggacctcatgaggccaggcctacttgggggccggtccctcgttagcccgcgggctggacttggcngtggctctagtcacaactgtgtcgtgggaatgccgacctgcccaatgaacctccccaacc

SEQ ID NO: 647938 - DNA, 578 bp, Homo sapiens
  misc_feature (515)..(515): n is a, c, g, or t
  misc_feature (552)..(552): n is a, c, g, or t
tggctattatttattttttttgagatagagttttgctcttgttgcccaggctggagtgcaatggtgcaatctcagttcaccacaacctctgatcctgggttcaaatgattttcctgcctcagcctcacaagtagttgttgggactacaggtgtgtgccaccacgcctggctaattttgtatttttagtagagacggagtttaaccatgttggtcagactggtctcaaacttctgacctcaaatgatccacctcggcctcctaaagtgttgggattataggcatgagccattgggcctaacccagtatatctatcattaattagaattcagtattcgttcaattttttgaggtataatttacatacagtgaaacttaagaatcttaagtgtacttttggatgagttttgatcattgcttccaatttggtaatccaaagccctatacaaatatacacataaacatcattacagacagtcactggacacttcttcctattcagtccttccctgaattntttgagacagggtctcaacttctgtcacttccaggcntgagtgcagtggctggatcacggctt

SEQ ID NO: 647939 - DNA, 549 bp, Homo sapiens
  misc_feature (31)..(31): n is a, c, g, or t
  misc_feature (67)..(67): n is a, c, g, or t
  misc_feature (97)..(97): n is a, c, g, or t
  misc_feature (116)..(117): n is a, c, g, or t
  misc_feature (124)..(124): n is a, c, g, or t
  misc_feature (188)..(188): n is a, c, g, or t
  misc_feature (205)..(205): n is a, c, g, or t
  misc_feature (290)..(290): n is a, c, g, or t
ctctctctctctctctctctccggaaggaangctgttagcctgagactcaggaagacaacttctgcngggtcactccctggcttctggaggaaaganaaggagggcagtgctccannggtacanaagtgagacataatggaatcaggcttcacctccaaggacacctatctaagccattttaaccctngggattacctagaaaantattacaagtttggttctaggccctctgcggaaagccagattcttaagcaccttctgaaaaatcttttcaagatattctgcctanacggtgtgaagggagacctgctgatcgacatcagctctggccccactatctatcagctcctctctgcttgtgaatcctttaaggagatcgccggcactgactactcaaaccagaacctgctggagctggagaagcggctgaagaaagaaccaacagccttttgtctggtccccaggggggacccttttggtgtgaccttgaagggaaccacatttacgggtccagaataaggaggcataattttctgacatgctgttaa

SEQ ID NO: 647940 - DNA, 284 bp, Homo sapiens
ggacagtgtctctcacccagtctggaatgcaacagcgtggtctcggctcactgcaacttccacctcccaggttcaaaggattcttgtgcctcagcctcctgagtagctgggactacaggcatgtgacactatgcctggctaatttttttgttatttttaagtagagacggggttttgccatgttggcccaggcaggcggatcacttgaggccagaatttgagaccagcctggccaacatggcgaaaccctgtatcactcttttagacccttctgtcgtcttctc

SEQ ID NO: 647941 - DNA, 346 bp, Homo sapiens
ccccaccccccatttttattttgtgaagggcccctcgaggggtaattcccccccccccggttttccctgaaaaagatcaccccccttgggatcacccaagggaaatgtttcaacaagggccccggcccccatggaggggggggggttttttttaggggggggccaaaacccctttgggggggccctccccctagccctgtttggggggccagccctttgggcatttaggttaaggccccgggggagggatgcccccccggttctttgggggggggggccctccccccccctggggcccgggggttgagattccccccgttggcccgggaaaagcctttttggggca

SEQ ID NO: 647942 - DNA, 660 bp, Homo sapiens
ctcagtggctcacacctgtaatcccagcactttgggaggccgaggcaggcagatcatgaggtcaggagagcgagaccatcctggctaatgcagtgaaaccctgtctctactaaaaaatacaaaaaattagccaagtgtggtggcgagcgcctgtagtcccagttactcgggaggctgagattataggctcgagtcaccacgcctggctctgagcccttttcttaaaaaaaaaaagttcgtttaagttggttggtttggtttttgagacggggtctccctctgtcgcccatgctgcagtgcagtggtgtgatcacagctcactgttactccagcctgggcaaacagagttagaccctgcctcaaaaaaaaaaaacatacaaaaaaaaaaaaaaacattttgtggggagcgccgcctgggcccacgggagagaagagcttgttacagaaccacttgcgtggggcggccgaggcggccccaatgaggggatcagtaacaccctgggcacagacgtcgcccccaaaagaaagcccggcccaggaagcaggggctgggattctccccccgataaaaaagccccggggacacagcgggttcggaacactccacaggggtcagagacacggggaccatcacgggcccaagacgcgaaatagcgcggg

SEQ ID NO: 647943 - DNA, 868 bp, Homo sapiens
  misc_feature (738)..(738): n is a, c, g, or t
agcggggtgcgcgcctttgagtcagcaaactccgcggcgcggaatgcccggtcggcccggccctggtctgtgctgggccggaggagccgcccattgatcatgtcctgtgcctgccagagatgttctccgcggacacagagagcaataaggaggcaacttgtgtgaagctgctcctggggttccgaggactcctagcgtattcacgagaaggcatgggactctcgtggcgatttctttacgattgggacctatgcatgggatatggtattcatgactatagtgagtcgacttgtgctttgaacaagatgaaaacatccctgtggtgacgagaggaacgatcatagaggaatatcagtagtagcgttgcgacgtgctagagactcccaaaaagtaattggcggtagcgtggcgctaagaacgtgtgccaagcaagtgtcctgtcttacatacacaccgtgtttgatgcaacaattgaagaattcggcacagcgacagtaggactcaacgccgattcggcgcaagagagtacgttggcacaagggagtatgtcccgtactaggaaagagacggtcccctatcgcgaaaagttggccatcctttgtgctaggccttgtactccataggatctgaggggcaacgcgctgctttccgaagccctaccatttttccctttttcaaaccgaaacagtaaaaaggcgcccccccaaaagtatttcccttggtggggataaaaatttntattccccagtaggaaaaccaagggaaaccacatttcggtaaacgcagccgagtttgtacggtaacctcctgggaggcgccgatggaaccataaaggggttagcatccattggttgcggaaaggtacatg

SEQ ID NO: 647944 - DNA, 351 bp, Homo sapiens
agtgtggtcgtgtggaatgcattgtcccgtcttacaggcacgttttctcaagggcgccagtccgtttgtacggtgggttgactgcgcccggctgttctggtggcagagcgtcgccccttcgagaggagggctcggaaggggtgctcgcgagctcagagcgggctgctcaccttgagctgtgaggagctggtctggtggaacttgagctggcagggtgactgagtgctacgaggaagcccccacagcagggtgcccactgcttttgtccagaggaacccctgcctgggagcctaagttgagctttgttacctgagaagaaagaaggatgtaggacagaggacatcacaggat

SEQ ID NO: 647945 - DNA, 263 bp, Homo sapiens
aatgggcggtattttgatgccgaacacgatcggctaatgctggatttagctaatggtatgatcttccgttcacgtttcccggccaaaatgttaacgccggacgccttcgatgaatgcgctttttgcgtggatgacgccgccctttatttcacctatgaagaacagtgcaagcagatcaaactcagccatgagcagcgcgccgagctggtgttgaatgcgctggtcgcctaccgcttcctgaaaccgctgatgccgaagagctg

SEQ ID NO: 647946 - DNA, 267 bp, Homo sapiens
ctgtttaaaagctctttagcgaggtcccacttttctatttctgtttccattgcaattgcttttggagattttatcatgaaatgtttgccaaggcctaggtccagaatggtatttccaaggtattttgctagagtttttatagtgataggtcttacgtttaagtctttaatccattttgagttgatctttgaatacggtataaaaaaggggtccagtttcaattctctgcatatggctagccagttatcccagaaccatttgtcgacg

SEQ ID NO: 647947 - DNA, 130 bp, Homo sapiens
tgtgtagactgccttacttctataggttctcgtctcctctgaattatacctaacagtttactctccgattatctaccgtgcctccctttaccaggttctccacaccaccctttccagtccattgactgcc

SEQ ID NO: 647948 - DNA, 260 bp, Homo sapiens
ggattaggtgtgcccaggcctccagagccgggcttgctagttaacccctgcatgtcaagctgcctggtgtcccaggtcctcaccgcaggcctgtgaagtgggagcttctggaagttgttttctcctctgcattggctgagttggccctagtctgtcttggaaagtgtaggcagtcacagatgtccccaaatcagagtctcacagtgagtgagcgccctaagcttcagtctgaaataacagaatccccactgaaagacaga

SEQ ID NO: 647949 - DNA, 168 bp, Homo sapiens
agcggggaagcggaaggctgcaggaagctaaggagggagtccaggggctctgaatggggtgcatgcttacccggacaggggagagccacggatggtacagttggtcactggccgggggaaagagaattcagagaagcggtcacttaaagaagtgatggttccccgctg

SEQ ID NO: 647950 - DNA, 503 bp, Homo sapiens
  misc_feature (44)..(45): n is a, c, g, or t
ggggggggggtctcccacggaaaaggggtaattttttttttttnngcccttcttccttggcggggggaaaaaatttttttttcaaaaaaaaagaggggggggggggcgcccccccccggtgttttataaaaaaaaaagggccttttttttttgtggggaaaaaaaaccccccaaataaaaacaccctttctaacaaaaaaaaaagagggcgtggtttttttttataaacaaaaaaatttttttttaaaaaaaaaaaatggggggggatttttcaaacaccccaattgggtgcccccccaaaaaaacaaataatttttttataaggggttgggggaagaaaaatttaaagcttctcccattttttgggccagggggggaaaaaaatttgcgccgggtgtggaacagcgcgccttcgggggtatccttttgaaagtaaaaactgacaacttttcagtatggtgctcacgtagcattagatatgttgacgactactacgtctcgat

SEQ ID NO: 647951 - DNA, 511 bp, Homo sapiens
aatccccagccatccaagggccctttttcacccaaaattgaaatcaggcaaggagatacctgtgtttccataatcaggcgtttaatgaaaatgaatcgaggaattaaagccctttccaaagtgaaactgatgagatttgatgatcccctgttggggcctcgacgagttcctgtcttgggaaaggagtcccccgaaaagccccccatttttgagcatgctgttttcaatgtggccctcatgagcaaaaaaattcttttgattgaaaatgggataagggtggatattggcaatccaaaaatctattgggttcattaaactcaggcccattggagatttatcctggttttttaggaaaactactactctgattgggtttactgatgggctatcaaacccttaggggggccctaaatagattgatttcatttttacccacccaatttggcaggtattcataattttaccaagtcatttttgattccgggcccaaataaattttttttccctttca

SEQ ID NO: 647952 - DNA, 310 bp, Homo sapiens
caaacccccccctaaaaaaatttttagaatttgggcccgttcccccctttggggaatttgaaatttaggggcggaaaaccctgaaggaaacccctgttccccgaagtctttccattgaggggggtggaaacttttgaaaaaggccccgttttaacaaaaaaaaagggtttccccggggggggttttgcaaatcccccggaaaggagttaaaagcaaatgtttttgggccggttttttcccccattgtaagggggcccgggtttttactgtggcccctggcccccttccaaaaagcaaataaatgttttta

SEQ ID NO: 647953 - DNA, 547 bp, Homo sapiens
gcggggcaacgtgtgtggggacatgcaatgtctgaccctgccgcattgagtgctgctcagttcacctcccagtgtcatcatcctgaaccacccgtgggcagattagctgcctgtgctactcccctgtgtcatctgactgccacacagcccacatctgcctgcaaggtttgctggagcttgaagtgagaatgatttgacctgtgcgctctgtgcaatgaatgctggatgtgacaaccccagagtccctgaatgtctggagactgctggccatctgtggagatggtgcctgggaaagcccatgtgttgatggagatgcttctcccatggtaccctgcctctcggcctgcgttctgcctgttgctgctgacattgatggcagactgtgtggcctgtaaggctgttcactcaatgaacctgtgggatgaatgacatgatgcgtgatgtgcgcccgtgcaatggtcaccaatgtcggctgcatgaatggccgcagatagggctgggcaatgttgacagctgctgggcgcccccgtggcgcggaccctccccg

SEQ ID NO: 647954 - DNA, 869 bp, Homo sapiens
ggcctccgcaaaaaggggtcctggtgacgagtcccgcgttctctccttgaaatccactcgccagcccgtcgcctctgccgccgaaccctgaaacccgcccctctcctgtgccaggaacttgtactaccagcaccatgcccttaccaatatccagcactgacccccggagcagaaagaaggagctgtctgacatcgctcaccgcatcgtgcacctggcaaggggcattcctggctgcagatgagtccactgaggagcattgcaaagcggtgcagtcccatgtgccaccgagaacaccgaggagaaccggcgcttataccgcaaagtgttgcttgacagttgaacgacccgtggttgaacccctgcattggggggtgtcaatcctctttccatgagacaatctaacagaaggcggatgatgggcgtcccttccccccaaagtatcaaatccaagggcggtgttgtgggcatcaaggtacacaagggcgtggtccccctgcagggacaaatgggagataacaccaagggttggatgggctgtctgaacgctgtgccagtacacgaaggacgggagctgactttcgccaaagtggcgttgtgtgctggaagatgggggacacaccccttaggccttcgcatcagggaaaatgccagtgttctgggccgtatgcagtaatctgccagcagaatgcattggccctcggtggaggctgagatctccctgatggcgacatgacttgagcgctgagtttggccgaaggcgggggggcacaagcccgatgaccacattactggcgcctttggaccatggccggcctgtgtccaattctagagacacggcgcaaggccaagccgagaacctgggaagagc

SEQ ID NO: 647955 - DNA, 245 bp, Homo sapiens
atatttttgggataatgaagaaaacccaccccttcagggaaaaattgagattaacttatttttcttaaaaggttcatttcaaggagggcaacaaagtccagcttgggcccccaaagggttttacatgatcaaaccgggtacagctttttgggtgaacggttgactacaaacatttaccaaaaacataaatttcttttaaaaaagcccttttaaataaagcgagaccccgttttccagaaaaagga

SEQ ID NO: 647956 - DNA, 991 bp, Homo sapiens
  misc_feature (149)..(149): n is a, c, g, or t
  misc_feature (553)..(553): n is a, c, g, or t
cccttggaacccgttgtaaaagcgttgggcccccccgggtcctgataccctgcgaacacttccattgggagcttccctcctatgggggtcttgctccccccccgtggggggtagtcctctcccccggtgtctcttggtatcacggaggnctgttgggcgcccacactttatccccgccgccctcttgtggggggggtgacacttctccccgcttagatttcccctctcgcttgggagacttgtataaccacccccccgagaggagagattgtccccccccagagggactctctctctgtgaaaggcacacacctctctatagggctcttataaaagagccctctttcagcacactttgagtgccccgcgcgctcgtttgggcgccctataaaattggtggccccacacgaaacatgggctccacaagcacacccacgaatcgcgctgtgtgtctctcgagacgctctgggcgccacgccgctgtcgccctcttctctcggagagggagccccaaggctgtgctttctgggccagcgcgagactccacacgctntatacacgagccccttctttagacccctctgcacggcgctcgccgctatacacgcgagactttccccgcgagaccctctataccccaccgcgctataccccggggcccacagcggccacaccccgtgaaccacctcggttgaaagtgagaagcacacctctcttttgaggagcccacgggccgagggcccctcggccgaacttgggagaccctatggcccaccgcccaccccttcgaaggaaaggtgtcacacctggagcccccttcacattccaccgcgagaggaaactcgaggccaccacagggagagcggccacatccccacattgggaaaggggccaactccccggagagaccccgacgggcttttgcaacccttccctctttttgtttttaaaataaattgtatttttgaatccaagggaggataaaggatta

SEQ ID NO: 647957 - DNA, 103 bp, Homo sapiens
ggatttgctggtgcagtacaactaggcttaatagggatcgaattcgagcctcgaattcgaggctcgaattcgaggagcaaggctccgtctcaaaaaaaaaaaa

SEQ ID NO: 647958 - DNA, 187 bp, Homo sapiens
gttaaaaaaagtaaaaaaatagaatcagctgagcatggtgacatgcacctgtggtaccagctactttggaggctaagttgagaggcagtgatgggaggatcatttgacggcccagaggttgaggctgcagtgagctgtgtttgtgtcattgcactccagcctgggtaacagagtaaaaccttctgtc

SEQ ID NO: 647959 - DNA, 110 bp, Homo sapiens
attatatgcgggacgtatacgatttccgggtgtagtaggtttctctaattcaggcttatactcatgaatcttgtctgaagcttaatgagggcagactgccaagtcctgga

SEQ ID NO: 647960 - DNA, 114 bp, Homo sapiens
attgcctttatttcctttcatatggtaacaccagcagtgtatgatatttgtaaataaaatacactgctggtgttaccatatgaaaggaaataaagtcaattgataattgcctca

SEQ ID NO: 647961 - DNA, 109 bp, Homo sapiens
ttggtgttcctctaattctccaagtcccccaacaagcacaaccgggtgtacattgaaggcgcggcccttccccgacggcctggccgaggacattgataaaggcgaggtg

SEQ ID NO: 647962 - DNA, 879 bp, Homo sapiens
ggtattgcgtacacttcatagcacatgcacgtctgtcccagactttgacaacctgcacaagacaaggcattcctaaagcaggagagacctccctagggtttagtgtgtgtgcacactaccctcactccccaactggccattaccctagttctgcccttgtctgtggagttacagcctcaaggttgtagcatgtgtgctggcaatcagggccgcagtgtgttctgcgcctgcccagagctgactcctgatttaaccgctggcgtaatcgcgcgggtcgcacgccatgcgtgctgaaaagcctttcaccctcacgtggtttcttattcttaaccaggtcatcaaggcgaggctcgcgcgcaggccctgcgttggaaacatggcggggaagctgaacacctctgaatgtgcgaggcgccagaagctgctgaggaggctgaaggtagtgagggcaagtgggctgcactcctttctctccaaccagggcagaaacggagggaggacttcgtcccagttacaactaatgaaataagtgatagttctaatttttgtctaaccttagaacatgttagagccttccgttacttgaacgaaacaaacaattttataaaccgttcagcacacggtggagataacttaacaggcatattcttatcaccgagattaacgtttagtcaactgtagggtatacgtcgtcgagagtaaacaagatgtagttcagtacgaaagtcttcaaaccaaaagtggggcggtgggggatgtcctcataaccaatcaccgtgcttgcagcacccccttaattaagcaggaattcccagggtccgccaatttcacaccttaacacctctgacaccttgatggactcgtaaactcttatcgaaa

SEQ ID NO: 647963 - DNA, 367 bp, Homo sapiens
  misc_feature (297)..(297): n is a, c, g, or t
  misc_feature (312)..(312): n is a, c, g, or t
  misc_feature (357)..(357): n is a, c, g, or t
aaaggatgatggttagagttccggggatgccccatgcactggggtgaaacagcaatgcttttttttcaataggttcactaccccactttggcacagctgctaaaaaccatgtgatggtaagaattaccccccataccctgccagccatagtaaaaaaatagggtttaataaaaggctgggcccgggttttttaataaaaccctggggtccttggggaacccttaaattgggcagggatggatgcattgcgggctactcgattttcaagcaaaaatccaatgaagaaaattaaggatnccatcatgtagcagnctgcataaaatataataggcctttcaggaaaacggacttttgtgncctccatcca

SEQ ID NO: 647964 - DNA, 132 bp, Homo sapiens
ctcggttcatgtgacaggaaggtaaactccatcattaaactagctaatgattataactaataaataaataaggtggggagaggtggctcacgcctgtaatcccaacaccctgggaggttgaggcgggcagat

SEQ ID NO: 647965 - DNA, 464 bp, Homo sapiens
tcagactcgtacgcggcgggcgatggcggctgagatagcgtgcgctggtgtgtaacaagaggttgacggagcggagatgcaccactgcactccagcctgggcgacagagagagactccgactcaaaaaaataaataaataaaaataaaaaggagatttatttgagaaacacttaaaaacacaacggaaacttcataggccagtttgcagaagaagataggtaataataacgtatgtatttttgtgactgtacacactgaggtgtactgatgacagtcacataggtgtaacagttacgagaagatgaactatattcataaggaagtaggtctaaaagcaaaatatataaatgcatatcactatagttggtaattctgtgcaacccagttttgtaactggtcatctgacataccttgatggacaacctaagtcttttgatgagattgatcaaaaattgtgacggat

SEQ ID NO: 647966 - DNA, 148 bp, Homo sapiens
gaaaagctgggagtcatttgtaaaggcatttaagaaaatctctgtccaatcattagctgacaactaagctaactgggctaactgctctaacagagcagacttcagtggctgcactttagtctgggtgacagagtgagaccctgtctca

SEQ ID NO: 647967 - DNA, 1288 bp, Homo sapiens
  misc_feature (212)..(212): n is a, c, g, or t
agcggggtgctgtgtccgggcgtgtgttatgcgaggagtctgagtgtgtgagcttgagatgcggggcgcctacgagctaaccctggaggatggagtgcgaggccaacgaggagctccgggctgacgcgagcccacgggcaagcatccgtgcatttctgcgtgcctggatgaggtgctcgaaaggtcgcgctgaacgttgagacagcgtgacncgggctttgttgaatgatacaatctaccaggaaaacgacgagctagtggagacgagccatccatgagctcaagcgcatagagaaactatctcggtgagaacgaggtgatgtattagatgctagaccgtgggacatgatatctctcgatgagcctcgatgccctaatatactgtcgacgcatcgtagattgcgaggagcctcggggagaaggacgccttgtttgaaccagaggtctgggtggtgcccacaggtaccccaagggaaggtacaattatgggtggcttggcgtgtggctatccaggtgttgtacttcgctcgaaggtgacatcaacctttgcaattaattgcttttctatgtccatgtgtaatttacttttatctgtgtctaagaccgttcgtgcatacgcgctgcgttcggggtacaacccgtgttgaagtgattaggtcctttcatatgtctcctccttgtgatggaaccgtcgctgaatcttcgctttgcctggtttcttctcaatcgcaatatcgtgctcttctgccccttttggaagcccaattagtatcatggttcgtgactaccacgcgaactcattggccatcgagggattctaaaagagcattccaccgcgtagcagacttggtcgccttgaagtttagttagagggtctggtagcgtatggaacgtcgtgagccatgcagagccctgtggaaaaagctaccatttcggggagttagagattatcttttcacaaccattacaccttagggagagactagagcatattcacacgacaagcggtctccctcgagaggaccagctgatggcgcaattccttggcgcaccccatagagccgggcgcaccagtgggaaccggttacatacgtgggtggtggcgcccagcgttatctagcccctatggtgtgtggcgcccttcttgggggcgtggtttttgccttgttgcgaaggccaatgggcgttagatattcctggaggccgcactatagcgtgggactgacacgaggttgtccaagcggatgttttggaacaccgagccgggtagaggttttccgcaagtagg

SEQ ID NO: 647968 - DNA, 290 bp, Homo sapiens
tatatagcctcacactcttggaatttccaggctatggcgggtagccccaaaaggaggaatctcctatggccaataaggtatcttgacttctatcaaagtagaagagagggccacttcgccagctcaaactcatacactagcgccttatgatgccttcaacttcattctttcagctttcacttaaccagctaacctacctaaaggcaaagcgcttaaccaacctattccgccctctaaacaacggcaactcaaacaccctagcgcaagctcacctcacttctaacaaaccg

SEQ ID NO: 647969 - DNA, 635 bp, Homo sapiens
  misc_feature (499)..(499): n is a, c, g, or t
  misc_feature (508)..(508): n is a, c, g, or t
  misc_feature (527)..(527): n is a, c, g, or t
  misc_feature (531)..(531): n is a, c, g, or t
caggtggacaaagtcaacttccacatgtttgacgtggtgtggcccagcgcgatgcaacgcacgcaagtgtgatcccagtgcttcaaacgcatgtggaggtgcccatccatacttacgtggctggcccagccagccagctcaccacacctgcgtccattccgagtgcaggcaccaagcctagcacccaacccagccatgccaggcagcgctcctgcaacgctccttccaagcagaccatctagcgacacacaccagcactgcggcttgcagccagcccatcctcctgatcgataccatgtgtccctccacaccagaggccacaggcatctggcatacgactagcagcaaacagctcacatgtacactggggcaaacatccgcaacgcatttggacgggacctcacatattgcgcatgacacatatgtggcgtccggactcacacaacatgagcatacacatggagcgcaatggcataacatacgcgcggacgaccaccgngcacgcagngcagcacgacagacgctgnaccncgtgcgaccacaggtcagctctacgagctgccggcacggaactggcaagactatcactacacttagggacagagggcgaaattacacaagggacgacccattgg

SEQ ID NO: 647970 - DNA, 275 bp, Homo sapiens
gctgaccctaactgcagaccatgaagtaaatattgtaactaggtttttgcttctccagtggtgaccaccccccccatcccgttcacaacttgggttctcttcagcaggcgagctgagaagcgtcaatgagcacctggggattttagtaagcgtgtcttctagattggaggctctcttctagagtgctacatagtggtaatcttgatgcataggtagatgatatcaagcaatctcttactgaggacctcctcaggttatagctaagcagtggctga

SEQ ID NO: 647971 - DNA, 190 bp, Homo sapiens
tcccactatggtgctttcagggcagttgtctgtagtagcatggggaacagttgtggccttcaagtgtcgctgtgatggacagtggtacagctcatcccttgtggctgaagtcagatgacactcgcagaggtgcatctcacggctcgagctggttggcatcatcaccaggggtacgagctcgatcgtatcg

SEQ ID NO: 647972 - DNA, 229 bp, Homo sapiens
cgccctgtcgtagcactcccatgctggtttatactctcttggtcgtggattgtcgtccgtgcgcgacctactgactgtctgctttgtttctgtggcgtgtgggttacgtacctggggtttgtggggttttcttcctaccgccttctcctactttactgggggggctcctctacgacgtcgcccagccggcctagcccgcttgagccctggccgtcgtatacccccgtcg

SEQ ID NO: 647973 - DNA, 1208 bp, Homo sapiens
gattgcgagagagcgggtatgccgacggatgacaggtgtcgctgaataaggctacccctcaagatagtacatgatgggagttaatagcgagaataggagtgcattcatcgatctgtgtggtccgtcaatgtaggcacatacattttgaatatacagggcgttagtcacaatattgattgtgacatcatagatctaatgatgttgcgaggttggtatctgaatgagagagtcgattgcaatatatttgtgagtaaggagagctagtttggatagatgggacagagggtctaccgtgtacgatacgttgatagactctgagggtgcatctgggattcaagatctcgcaatggcgtagaagtcagtggtaagcagatgcgatatcaatggaatctgaataattcgttattatgttgggaaaatttttgacgaatccagaaaacgttaccatatgtagtacatatcaagttgatggctccgcttagggacataagaagtaggtctttactcgagaaaaacagtcgatgtaatataccatgggtacgatacatctagtgggcattgaacatagattgcctggatgcacatgcaatgatggttggctagacatggggttgataaaggagtgcacatgtttggataagctgggatagttcttcaaaggtcacaattggggaggaacaaagccctggaaggagtacatttgggcctccgttctcctttgggaacatatttatactactaggagaggaatggttgtagagaaacaaatgcttaaagttgatggttccaggggaagatttatagctaaaacataattagggtattttcccaacttgtaagacacacactctcgataagtgaaggcccaaggaaaaatggaaagaactcaattggacgggggaaagaagtataggtgtaagaggggaaaacggtacaatggacgaacgttttaacgaattttaaaggaaacaaacattttgtgagttgagtatacaccacgagaaacgataaagatacagacgatttgaggttgaccctaggatttacacatgaggttcgagggaactggatggtggaacacaaccaatcttggattctaggagagcccagagcagaatggcctaaacacttggccttgtggggttttcgaaagggggaaaattgtatgcaaaatacgatcgagaaccacgagtacacggtgacatgag

SEQ ID NO: 647974 - DNA, 167 bp, Homo sapiens
gaagtaatgctggaggtagtataacgaattacccctaatacttagaggctgcaaagtaatcacgtttcttatgcttgtggactctgggttagggattgggacagggcactggggagtggcatctctgtgctctatcatatctagagtttcaacgagaagcggcgaag

SEQ ID NO: 647975 - DNA, 335 bp, Homo sapiens
  misc_feature (66)..(66): n is a, c, g, or t
tcctgtgaaaataggtaagaggtggccctgccctgtaaaattgaatactaggcccgagtgcgttgnctcatgccctgtaatccccagcacatcatgaggccgatgctggtggatcatgaggtcaagaaattgagaccagccctggccaacatggtgaagccctgtctctactaaaaatgcaaaaattagccgggcatggtggtgtgtgcctgtggtcctagttactcgggaggctgaggcaggagaatcgcttgaacctgggaggcagaggttgcagtaagccgagattgtgccactgtactctagcctgggtgacagagtgagaccctgtctca

SEQ ID NO: 647976 - DNA, 397 bp, Homo sapiens
  misc_feature (40)..(40): n is a, c, g, or t
gcaagccccacctgttccctttcaaggtgacaggcccctncgggtttgtggtgggcgcctcatccctgccccccgggggcctgggattgtttccgcccctgtgcctaaaaaactgctcattatgggtgggatcgatggctggtaccccccaggccgggggtgccctgcccccctggggaaatttgcccaggcccccttttatgcccttttttagacccccagctacctggccccccccctttggaagggggctggtttcccccagtttccccttccgggggtccctggccccctcgtccagacccccccccgagtttccgggccgcgggctccgggcccccctgggggttccacctaggggtttttttccaaaaaaataaagtgaatttagggggga

SEQ ID NO: 647977 - DNA, 1172 bp, Homo sapiens
agctggctgtggggtgattcagctgccctggctgaggcggatgcggccgcaagaggaggaggggagagcccgtcctgcgcctgtggctccctgtgtggtgtgcactgatgccctgctggcctgtgatgtgctgatggctggagtgcgaggatgtgcctgctggtggactgggatgtgcgatggcctggcctggtggccccctgaagccaatggatggaactgctgctactacctgatgacctgtgttggagggacgtgtttgctgtggccaacagttctgagcgtcaaaccgagacgtacgtggggcttgatgccctgtgaacagggtcacggaaaggcttaacggacgaacgcactgggggctccaaacggaggttaccgtgctttgagacgacagggaaaaaaaccttttgcctggaaacctttggtagacttatgaggcaaggtttgacacgacctttggcataaggtatacgggactatatatagtttaacttggtgcatgcgattgtaattagtcgtatttggtattatggggcgtgtggggtttttggaacggacacacgtgttgacgcggacaaacagattttacaatgcgcttttgtgtaggaaacccttttttggtaactttttacctcaatacttagtaggccaaagtgcaactttgtggggttgtacttggggcagtgacaatgaaacttgcgttgaaaagatttgccaatccgaaaggccccttttaaagcgacacttattgaaggccttggaaaaagtgtgcaacagtgtggtattccggaccacggggacccaggaacaggaagttggtgcacgcggcgcttacaaggcttaaccacgaacactaagatgtacttggtgcactaatgtggacggacaacatttggggttgggattggggtggaagcacaaggtttcccatcggggtgagagacatataaagggcgttaaaagctgttaccaatagaagagtttattccaccgacgttattcgagttgttggcaccgatggccacagaattcaacaccagggggtgagaacactcgagtgcgctcttgtggaacatcatcaggcgacaattggtagaccaccgcggcactgtgtacccacaggagaacttggggcaccaccagtaatcaacagagatcgtcgggcctct

SEQ ID NO: 647978 - DNA, 973 bp, Homo sapiens
cactgaagcacaccaaccacaaaaaaacataacacaaaatacaatataaaataaacaataacacatccacatcaccagcaaaccaacacaaccataaaaaacaaacaaaaaacacaacaaaatacaaacacaaaaatcatccaacaaaacacacacaaagaaaaacaaaaaatacaaaacacaaaaccaaaacaaactacaacacaaacataataaaacaacaccatacacaaaacaaaccagaaaaaatctaacaccaacaaaaacacaactaaacaacaaacacaaacacacaataaacaccaaaacacatataaatcaacacaacactcaccaattacaaacaacaacatacatacacaaccaacagcaaatcaaaaaacaatacaaaaaataccactaaacacacacacaaaacaaccataccaaacatccaaaataaccacacaacaacattacacacgaaacaaaccacaaaaacaagaaaaaacacaaagcaacataaactcaaacatccacaaacaacacaacatatacacacataactacaatacacataacaacaccacaaaacaccacacaaaccaatcaccaacacacatcacactaagtccacacactcatcaatcaccacatctcaaaatcagacacacaataagaactcaatctacacaaacaacaataaaaacaactctcaaatacaacacaacatcacgaaaaaacaaatctatataactaaaaaaacataactataaaatcacaactcaaacaaatatctacacatacaaatactaaaactaaatatctatacacacgaaaaacgcaaaaccacattattaacaaaacaaatacacataaacaaacaaaaacaaacaaacaaacacaaccacacaataaccatacagaacaaaaaataaacatatataaaatcaacacacaaaatatacacaaaacaacaataaaaatacacaac

SEQ ID NO: 647979 - DNA, 743 bp, Homo sapiens
  misc_feature (1)..(1): n is a, c, g, or t
naggtcggtcccgggccgggtcgggaccaacccccccggtgcgctccccccttgtgccccaattcccctggggtgaggcgccccctgtgcgccacaacacctggggccttttcatgagcattgggccagacttgtggcccgtcacaggggttacactccacgcaggccgcgaccacccatgcggccgcacacgaggccgcccgctctacaaacacgacagaacaagaagaagaatcgcacacacgagacttctccatcgttgtccaggacaagacaccaaacggcacgtgcccccccagcagcccgcccgtgctggggcctcccccctccggccgtctagagagaagagagtggttgttctcccaggcgcctttctctggcgagctcgcccgctctctgcccctctgtcttggggagttccacccccctctcgtcgttacatgtctctttatcgcggtgcgagcaccctccctcgtgcgtttattgcggagagtcccggtggtccccctggccgcctgcgacttgttggtcccctcccagcatagcacgccccacgtccgcccaccttcttcttgatggacagtccttggcgcagcaagggctcccacttgaggggagccattctcccccacgtctgcgcgctcctcctcctctccctctatgcaacgacgccaccttgttacgcgtcgattcttctaacaaaccacaggcaaaaaacaacaccaacaaatagaaaaaaaata

SEQ ID NO: 647980 - DNA, 198 bp, Homo sapiens
  misc_feature (166)..(166): n is a, c, g, or t
  misc_feature (173)..(173): n is a, c, g, or t
tacacaggaggttgaccatcttaaccattctagagtacagttcagtagcattaagtacattcacattgttgtgcagccatcactaccatccatctaaatgactcttttcatcttgcaaaactgaaactttatacccattaaacaacagctccctattccctcctgnccctgtntctggcaagcaccattgtactttgt

SEQ ID NO: 647981 - DNA, 152 bp, Homo sapiens
  misc_feature (41)..(41): n is a, c, g, or t
  misc_feature (103)..(103): n is a, c, g, or t
  misc_feature (106)..(106): n is a, c, g, or t
gaagactcggcggtcgcacctcttctgtccaggcctcggcnttcctgagcatctctccttcctctcccagatcgtcttctccttcagtttcaaagccagtggntcngcggccacctcccgggctctctctgtaaggatggtggggttaagcc

SEQ ID NO: 647982 - DNA, 249 bp, Homo sapiens
  misc_feature (67)..(67): n is a, c, g, or t
  misc_feature (233)..(233): n is a, c, g, or t
  misc_feature (235)..(235): n is a, c, g, or t
tgggggagcgggaccggacgaggaggggagggccggaccccgagacaccgccccgggcgtccggcgnccccggaaattgagaggggcctgggcgagcggctcgatagcctccatcaaggccaggttccgccgttaagctcctgtgccccccctgggcccggggcggaatgcggaaaatttccaagagggaagctttcgctttggaaaaactcacttaatccagggttttcccngnacagaagattttcc

SEQ ID NO: 647983 - DNA, 234 bp, Homo sapiens
caggatatgatgtctcgggcttcggcgcttctcgatagatagatgatggtgacagcagcagcactcagccacgatcccaggaagggccagagggcgtgcaggtggctgcgcacgcggagcgtgatagatggcctgagtcggagccccttggagctaggtgccgtttgcaccgtgtacatggcgcggtggtcgagcctccagtgttctaggttctcaattgtgtatgctctgacc

SEQ ID NO: 647984 - DNA, 801 bp, Homo sapiens
gtccctttatctgccatcttgcgtccccgcgtgtgtgcgcctaatctcaggtggtccaccctgagaccccttgagcacctaacccgtagtccccacgcgcggtcccttattctgctccgacaatgatgaacagacacaatcatgaaccaggaaaaactcgccaaactgcaggcacagagtgcgcattggtgggaaacggaactgctcgcagaaagaagaaggtggttcatagaacagccacagcagatgacaaagaacttcagttctccttagagaagttagggcgtaaacaatatctctggtattgaacgaggtgaactatgttgacaagccataggacacagtgatccacgtttaacgaaccctaaagtccaggcatctccggcagtgaacgtcttgtcaccattaacaggccgatgctgagacaaagcagctgagcagaagatgctacccagcatcttaaaccagcttggtgcggatagtctgactagtctaaaggagactggccgaagctcttgcccaaaccattctgttggatggaaaaagcaccacttgctactgggagaggatgatgctgcatgaagttccaggatcttgtgcaggaaactttcgatgaggcttcccaagaaattgagggcaaactgaattggaggtcaacttctgaagattaaaaccttgaagaaagttactggggagctgctattttatcttattgacctggctttttaacgacaatttgggtcactgggcatctgataacaaatcctagaatctctaatatttttcaagacccaaagccct

SEQ ID NO: 647985 - DNA, 267 bp, Homo sapiens
tctggagtgtgggctagtatgctccaagagcagctgccctgtcagtggaactccggcgcacttccagctgggtactgggcctgttaggccgatctgacagatcggcctaacggctcagatcggcataacggaatcaagtgttatggttagagtgatggcacgcagcagggccccaagaaacctctcagtgggagcgtcgctgtgatcgggacagtctccagggtgtcgtcttgagaattcgaaggacgatggtatgctgatgggtgc

SEQ ID NO: 647986 - DNA, 173 bp, Homo sapiens
ataatataggaaggtggggatcaatagagggggaaatagaatgatcagtactgaggcgggataggcctaggattgtgggggcaatgaatggagcgaacagatttacgttcattttggtcctcagggtttgttataattttttatttttatgggctttggtgctgccggtgaaa

SEQ ID NO: 647987 - DNA, 365 bp, Homo sapiens
ggtacatggtatggggtagacacccacaacaaggacattgctgccccctttgaagcttttgtgtgggaccccgctatggtggggatcaatgcgctgccaccaccctttgaggcgggggccctgtttgggtttgtaaatgaacccctcaaaaccccccgcttgactgtggatgctcccccaccaccaggccggggccgtggttggggccccccccctttaaaggccccccccccatcacatgggtgggggggtgtggggggcccttcccccccctgggttggttacttctttttccaaggaaggggtggtaattggccccccctctttttcctgggggctttttaaataaaatgtaagccttccga

SEQ ID NO: 647988 - DNA, 1508 bp, Homo sapiens
  misc_feature (275)..(275): n is a, c, g, or t
  misc_feature (492)..(492): n is a, c, g, or t
  misc_feature (734)..(734): n is a, c, g, or t
  misc_feature (1259)..(1259): n is a, c, g, or t
tcttgctggggaccgaactcgccgttaccgtaccagatggcgtgacaacaagagtggaatggcctggtacacaaagatgggttgtgtagtctccagtttattgccttagatggaagaggatatgcgataatagtattgcttggagacaagactatccctggacgtaagtagattccaagttataaaggataaactcatgttgcggtaaacgcatccgcgtcgatccagcgagtgaccccacaaggacactcacccatatggcatctgtatggttntccagagggtgctcgctgagtgctgtttgatacattgctagtgtctgtgtgaccttgcagtctgtagcgagtcatagtcgtagtcgcacacgtctagaaattctaagacagaagtgtccaaagggctcggatttcaccgtggacacgggatcgtctccaggggtgttatgtagaaccgtgcactgcacataccaggctctccctaactgagggcaantggagaagtccatttcaagcgcacgtggtgggaagcgaatatacaccttggtaggttttcccccatccgagatgtggatacagaatagacttggtgcctatgtaaatcgacacgttgaacgatatggtacaagacgttccaatggggctgtgatctggtgttcgagagggaagctttatggcggaatttgaggggtaaaacgcatttggcgcttcgggatacgtgtatccattggtgcatgntgggatctatagaacataaccgttgagacctgtgcaagacaagatccagggcgagctgagcagggaaaagggaacccgttccatttacttggctttcacgggaacacgaaaagcgaagagattcccggggtccaatagatcgccggggtaacagcaacagactgagtgggagaaaatcaattgaacgctccgggaagcaacggggttgctccatgacggacaaaaattagtaacttttcgcaagagacgggatacgctttgggatcgaaattcaccacacttgtggcaattttccctaggcgaaccctggccactttcggtgaaacacaaacaggaaccacttatgcgcacaaacatagtggccttttcgagctcgaacagtcttgaatttttgactccccctttccttctccactagtattggtttcgtcccgtggtaaaatagaaacggtgagaaacaataccttgtcgttggcgacagcaaaaagaccccaagaggtctcttgcgacattttcggcgaaaanacgaccttccatttgggagggcatactcattggggaggcaagcggggccagtcacaggtgactcgggggaaacaccgtcacacctgtcggtgtgcacctgtcccaaacaacgggtgtgctttcataggcttgtgaccgccagtcacgaactgtgagtatttgcgacgtctcacccagttctaccaaagaaacatcgatgttagacagagatagcaacccctagcactaacatggtctcgcaaaacaggc

SEQ ID NO: 647989 - DNA, 890 bp, Homo sapiens
gtcaggggtctatggagcgggaggcgagtgagtggcgctgagtgctaatgaggaccttgcgctgacgcgagtaaaatcttcaacaggggagcccctaaaacccgccacatctaccatcaccctctacatcaccgccccgacttagctctcaccatcgctcttctactatgaacccccctccccatacccaaccccctggttaacctcaacctaggcctcctatttattctagccacctctagcctagccgtttactcaatcctctgatcaggatgagcatcaaactcaaactacgccctaatcggcgcactgcgagcagtagcccagaacaattctcatatgaagtcaccctagccgatcattctactatcaagcattactaataagtggctcctttaagcctctccagcccttagtcacagacacaagaacaggctctgattactcctgtgcatcatgacccttaggccataatatgatttatcctccacactagcagagaccaaggcgaacccccttcgaccttgccgaaggggagtccgagactagtctcaggcttcaaccatcgaatacgccgcaggccccttcgccctattgcttcatagccgaatacacaagcattattataataaacaccctcagcatacaatcttgcctaggaacgaagatatgacgcaatctcccctgaatctacacaacatatatgtcgccaagacctacttctgacctcccgtgttcttatgaattcgaacagcattaccccgattccgtacgaaccaaatcataacctcctatgagaaaattctaccaatcaccctagcattaagttatatgatatgtctccataccattacaagctcagcattccccgtcaaacctaaaagaaaaaa

SEQ ID NO: 647990 - DNA, 500 bp, Homo sapiens
  misc_feature (39)..(39): n is a, c, g, or t
  misc_feature (184)..(184): n is a, c, g, or t
  misc_feature (229)..(229): n is a, c, g, or t
  misc_feature (406)..(406): n is a, c, g, or t
gatcttaaggcagtcgggtaggacgcttgatgcaggagntggaggctgcagtgagctgtatttgcaccactgcactccagctgtgcatagagtgagactcagtctcaaaaacaacaaacaacaaaaaaagaaaatgaagattaaaatgggaccgcaggatgtggctggatgggtctgtggctgnggtagtgcggcgaagggagaatgctatggcaggctacacacaggncaaagaccaaggaggcattggttgatgcctctgatacatcccctaaggtggttacggagagtgaacaatggattttcaaacctggaagactagcagagtcccaatcatcttcatacaaaaacttgaggactactggactagcctggagccttagactttccaggccacacacatgtntaccatacacagtggccccaattgtggccagagagtgtggccactgtgtttgtgtgatgctggcttaccctattctgggtcccattcagatgtg

SEQ ID NO: 647991 - DNA, 410 bp, Homo sapiens
  misc_feature (14)..(14): n is a, c, g, or t
  misc_feature (117)..(118): n is a, c, g, or t
  misc_feature (149)..(149): n is a, c, g, or t
gacctagagtgacnccgatttgacgcgtctcctggatgggcttatatgttgatatctctcatccctaagcatccttcaatcaaaaacatttttaagttggttatagctctttgtgannagcaaaacagcaaacactgtgaagttatatntggctgctgataggaaaccaccacagcacaggtagcataaataattagcttaaatttattagcctgcattagaggtacaaaatacagaggtaagctgcttcaagactggttccttcaacaaggaaccaggtttttcctatatttttatttccaacatacacagcagataaattttatttttagtttgtctgcctcaatgttacaagattgcagcttcagtaacaagtgtcacttacagacaggacaaatagaaggaggcta

SEQ ID NO: 647992 - DNA, 1243 bp, Homo sapiens
ggagagagagagaactagtctcgagttttttattcattctattatttaaaacctcccccaccctttatcctgaaagcttgtgtttcacaacgcttgtgaatggggtttttagtggtgaggaggttggtattacatttaacaacgggtagtagtagtagtcgtagcagggtagtagtagtgtctagagtagtagtagtaagtagagtaccccgatgagtcatccatgtctggctactgaccgcctaccgacccgattatgcaacacaccccacaaccacttgacaagaatcaacacaaggcagagcacacggagaaaaaccccaactccaaccaatcaggcacaaatacccagacggtgcacccaagtggacacgagcgacaccaaagtgcgccatcgatgaacaagagaaaacaaacgcccgagagagtgacaactcccctacaaatactacccacgcgacgacccaaaacaagacagctaaccgcgagtgaaagagaaaatcgcataacaaccacaaaaccacaaagaggggctataacgagcacacggcgcccgtacacaagccactcagagtggcaacacaagtgggcaccaaaagacacaggaggctatactcaaacagggggggcgtggagaaaacgcgcaaacaataacacgcgacaacaacagaaaacacaccagctgggagagaacagaagaccaccatcgcactggaaacacacccaggaaccaaaaaagacaaaccacagctaaatcaccacaaacaaaaacagaaacaataaacgaagaagcaagcaaaacgaaacacaccaacgcagagaaacaatgcgtacaaaaaacagaagagggggaaccatatcagaacacggcggcaagcacacaacagaccaacacacaacctactaacagcaacagaggaggagcaaaagaaaacaaaagctaaactgtcccccagtagcaagagggagcagcggcgccctcacaagtataagaaacaagagatgtcggaaaagaccaaaacaaaaacgcgacaacaataagataaccacacacgacaactccacgaccgcacacacgcacacgagaaacacaaacctaacaacacacaaacgaaacacacagggaagaacaacaaaagcacgacactatgacatcacacgagacggcggcagaccatactcaccaacaacacaccgaccccgaaaacaaaaagagtgaacaacacgaagaggcacaacaggc

SEQ ID NO: 647993 - DNA, 1109 bp, Homo sapiens
gtgcaaattgcggatgactgccgtgtgcagcgtgggtggtgccctggagtgccctggtgtgccctgtggatggggaacctgcggtggcttcctgctgtgaggtttctggcagatggcattctggtggcctgggggtcgctggacgatggactgtgggccaggggtgcctgatgttgccagctgagagactcagcggagtgcaaagtgcctgagggataatgtgacgtggcatgccctgtcaaccaaggtttggagccgatttgagtcaaagtgacattgaagatcacagtcccttgtgaggtgaagaaatctatctcatatctccctagcccaattacaatggaaatcacgatgatcaattgattatcattaccttaggggagagcctactctcaagtgatcgagggtattcaagacaggattattgccaagtgcaagaaagcaggaccctgtgcctgagccagctgaaccagtgttccaatggcgattatagttagctaatcagcgagcgactaccaattggccacagtcaggtctcgggtagttaaagttgcatccgaaaagtggaaggttaggccaacactggccaataccagtagaggagcacaatctatttccataggaccaaagcttcttccgatacaggtaacacacagtagcagcaggaagagcttaacttggagaggaaccaaaggaatctgagccacaggaccccaacaacttgtcacctttgacaaagtggttggaacaatgggccgggttgcagggacttcttgtagcttgggtacgcccattcaattccccattgacaaaaccaaaaggagacaacatagtgacattcggtactcgcgaaaaacccttgttaaaccctaacaggacaagcacaagcgttcaatttgaaattggcaacttgggttaaattcgaattgaaaaattaggattaaacaaagccatcaagaggaccccagaaggatacatatggaacattagcacaagaacgcacatatagcaacaaaacctcttcagaagcaaaagggagaacaaaccgttttatgaaattgccacactacaacacttaagcgaaagaccaaaacaaaggggataagtct

SEQ ID NO: 647994 - DNA, 381 bp, Homo sapiens
cagtctcacagttgcgtgataagctgggacagagatggaatgatgcttgcgagagtatcagcaactatagttatcaagttgggactctctcaccgtgttattccttggccccctaacccaaaggcaggaagagagggaaacctaaaaaaagtcaggcctgggggcaaccttcaggaatgttcctgtctaggaaggcgatggaaggggtccaaggacagatctccctcctgatctccctaaggctttcagagcttgttgagtcgacactttatcctggccctgatgaagaaggcacccctcctgcccccatactcttcccatgtttagctcattttctaaggtgccttgaaatcagtgaccttgattaggattcccatctgc

SEQ ID NO: 647995 - DNA, 435 bp, Homo sapiens
atatcagctcggtaccgtcacgccacaggacttcgggaggcgaggcggtgatcacgaggtcaggagatcgagaccatcctggctaacacggtgaaacccagtctctactaaaaatacaaaaaaattagctgggcgtggtggctgggcacctgtagccccagctacttgggaggctgaggcaggagaatggcgtgaacccgggaggcagagcttgcagtgagccgagatcacgccactgcactccagcctgggtgacagagtgggattccgtcaaaaaaaaaaaaaaaagagaaaaaagagacgtggtcggggggtttacccttgtatccccggcatttggggagtccttttggggggtgtagggggaaccctcaaaagtcaaccgggtagggtttgagggttggagaccgggcgcgccgtttttacaaacggtcg

SEQ ID NO: 647996 - DNA, 1885 bp, Homo sapiens
ccagaacacaggtgtcgtgaatactacccctaaaagccaaaatgggaaaggaaacgatctcatatcaacattgtcgtcattaggacacgtagattcgcgcaagtccaccactactggccatctgatctataaatgctggtgtgatcgacaaaagcaaccattgacaaacattcgcagcaaggcaggctgctgccagcatgggcaaaagggctccttccaagtcatgcctgggtactaggataacactgcacagctgcagcgtgcaacgtggtcatccacccattgcatatctccttgtggaacatctgcagcactagccaagtcactatgtgactatcattgatgaccccaggacaccgagcactttatcaaaaacatgattacagggacatctcaggctgactgtgcatgtcctgattgttgctgctggaagtggctgaatctgaaagctggtatctccaagaatgggccagaccgaagcagcatgccacttactggcgttaccaccacagggcggcgccaccaccgtaacaagtcggagcaacacacaatggattcccacgtgcgcccaccctacacgccagacgagactcatgaggcaacgtaggtacaggaaagcccagcacgtacataagcacaatggggacaacaccagacacaaggagcatggggtgccactaacagggtaggaacgggggcaaaccagctgggagcaacggagaaacagcgcgggctcaagggaaggcaacatacacgacaggagaggaaggcaagggacacacgcgcagagggacccgagaggcaccacaacacggcccacggaacagcatcagccgccgcacgaggtgacaaaagggcgacagcacgcacacgcgcgccagagcaagggatgcacgcagaaggcacagcaaacgaacacagcacaagaacacacgacacaggaagacacagacaagacgacagcaacgcagcacaacaaaacaccccgataccagcatagtcaagaacagaaaaggacaagacagaagacaccagagcacaacagaacaaaaacaaccaaaacaaaaaaacaaagaaacaacaaaagcagacaaacagcaggacagacagcaccacgcaaccaaaaagaaccacacagacaagcccacagaccgagacaacaaggcagcaagcagagaagggagaatgacgaacagaccgcacggacagccgacgcggacagcacaggcccgaagcgcagacagaggacgaggcagacaggagagacaagagcgagcgaagggacagagcagacgaagagcgacggagaacagcgacaaggccaaacgagaaagcagaacgcgagaggaccaggccgaaggtcagcaagcgagaaagaaagcacgggacgcggaaagggacgacgccacagcgggaacagcggacacgagaggaaaacaaccccgccagcagaacaacggcagaaagagcgacagaaacagagagaaagaaagaagacggacgagaaaaaaagggaaggaaaagaagagagtacgaacaaagagcaacgagacgcgaagcggaagaacaaagaagggacaagcaaggacagaaaaagggaaaagcaagacaggagaagatacagacaccaaaaacgagcgaacacacacgcaaggaaagcgacacacagaacaacgcaagccacaaacagagaaacaagagaaacacggagaaaagagaaagagacacgacgaagacgcagaaggagacggagcggcacgacgacagagcgagagcggaaggagaggagaaagcgcaagcacagagaggggcgacacacgcacgaacacacagagaacgagacgacgagaaagaacgaaaacagcacagagcaggcgagcacgcg

SEQ ID NO: 647997 - DNA, 237 bp, Homo sapiens
tcggcctactaggagaagctgtaaggctatcgacagaaacaagagtaggagtgcagcatggcagaggccctggtagcccccaaacgagacaacccttctgctgccaggagggtgtggagtcagccaggacttggtgaccgtgtatgatgacagcattggtgacagtgccacccagcagtccttccacctgcatggcactggccagcccaactttcatctatcctctttccagctgcc

SEQ ID NO: 647998 - DNA, 417 bp, Homo sapiens
cacgaggcgtgcccccatccaggccgttgcggcgcagaggatcaggaggacacccccgaggagccatgcgccgagccgcagaccacgcctacccatcgctgaacacctccgcctggatgcgccgggtaagcgctccgggcttccatgcccgattctccagggtcgcgatgggccacagccggatgacgctgtttacgagaaaagcttcctccgcggtgagcagctcgtccagggtcagatcccgcacttcgagggggatgcccgcggcgcgggcaaacgccatgatccgctcccgttgcactccttcgaccccgcaacggctgagatcgggggtcaccaggcgaccatggagcacgcagaacaggttgctcatggtgccttccaccacccgtcccccatcgtccaggagcagccctt

SEQ ID NO: 647999 - DNA, 206 bp, Homo sapiens
caagctttatttaggcttttgaaccaaagttattccttaaaatttccagggatcatattttcaatgtaatgacatctgttttattggctattgaaaaaatagcatttttttaaatcttttattttaaggttcacggggtacatagggccaggattgttacatatataacggtgggtactcgagcttcgaatacgtaactccatggt

SEQ ID NO: 648000 - DNA, 297 bp, Homo sapiens
gcgtcgacatggactgtcagtaacctgcaagcccagtcgattaccgggctgttcacctccaacggcatccagttcttcaccaccagcaccaacgccgtgacctatccgacgcaaaagggttggtacctgccgctgatctacaacaacgtcgcggccggcgagcgggtgatctacccggcacagatcaccctcggtcggatcattttcaccaccgcagcggtggataccaccgacccttgcgtcagtttcggtaccggcaaggtggtggaattggatgcgtttaccggcaagtcgacg

SEQ ID NO: 648001 - DNA, 814 bp, Homo sapiens
ctttcttggcggaatcaccatggggtgcacctgtacacgtatcctgaaaatgagggcctcaaggctctcatcgctgctcagtacagcgggctcaggtccggtgccctccgacaccccattccatttggcaaaccaacgacccttgaatttctccgcaaatttcctgccgcaaggtcccagcattggagggtgatgatggattctggtgtgctggagagcaacgcattgccttactatgtgagcaatgaggagctgcgggaagtactccagagttagcagcccagttgtgcagtgggtgagcttggtgatccgaatatagtgcccccaagccagtacctgttgtccccacctgtggcatcatgcacccacaaaaacaggccactgagaatgcaaggagggaagtgaggccgaatctggggctgtgaatgctacttgaagacgaggcctttctggtgggcgaccgagtgacattggtgacatcacagttgtctgcaccctgttgtggctctataagcaggtctagagcttttccgccaggcttcccaataacacggggtcttacctggataacagcccagttcggctgcctgggcgatgaaatggttgtacaatgggcctttgtgccaaaacgttggggggccccccttaagggacccggcagacggtccggaagacaaaccccggttggcagggaaaaggctcctgcctaggaagaatttgccgtgtgcacaagcccccctccaacttgttgtgagagaccagcactgtttgtatagaccggacgtacaaaactctcgtcgtacactttcacttt

SEQ ID NO: 648002 - DNA, 217 bp, Homo sapiens
accgcgctgcttcataataccaatctttatacagcggatatttacttcggccgcatcggtttttattgggcgcctgggtgcagacggtatgagacctaaaatggcgtcagcaccaaatgagtgctgagcaggggttttacagtgtcctgtaaacaggaagtgttccagtctgacgggactgctactcagcaaccggatggtctctcgtgatcctcag

SEQ ID NO: 648003 - DNA, 495 bp, Homo sapiens
  misc_feature (233)..(233): n is a, c, g, or t
  misc_feature (251)..(251): n is a, c, g, or t
  misc_feature (258)..(258): n is a, c, g, or t
  misc_feature (313)..(313): n is a, c, g, or t
  misc_feature (431)..(431): n is a, c, g, or t
  misc_feature (462)..(463): n is a, c, g, or t
agaatgccgaatgtgatgttcttaaaatttgtatttcggtgcatagacacttaaggtggacttattttttaaagcagtctattctgtttttcattttggatttcctctcctgcactccctcgaccattgcaggagcatcgtgcatcaagtcaccagggtggtccattcaagctgcagatttgtttgtcatccttgtacagcaatctcctcctccactgccactacagggaagntgcatcacatgtacaggntgagagnttttgcagatgctctcgtgttttcacatctgaggataaaggtcctgacctggaanaattgcctccatagccagtgctccctatactccgtggctgttagaataatcattttcttgtcgcaaactccgtgtttggcgcaaatagtggtggagaaggttgaagaaattgccacangatgtgtttttataaaacctctcgaattaannaggtatctatcttatttgtggttttaatctta

SEQ ID NO: 648004 - DNA, 511 bp, Homo sapiens
ggtcatgggggcaccctcctgaatggttggataccattcattcatgctgtgtcaagcctggattggtttgtaggggaatgcactagttactgggagcatggttgtgataaagccaagccgtccctcgggtttggctcactgcccttgaccttctctgccctgtttgacacagcaaatagtcctcaccagaagcaggtcagatgccagtgctatgcttgcacagcctgctgaaccatgagccaaataagcctctttctaagttacccacagcctcagatatgtagcaacacagacagactaagacaccaagcatgatggaaaactgggttatgggcaggactgcaagtactggttaggcagatacctgtatttctcttcctaactctcagaacgtgttctgtgtcacttagggcaacttatgccctcctgtgtgaaaatctccactcccaatgtctgagggttcctcagagtaagataaaatattaaaggaccaattgtattaaaaaaaaaa

SEQ ID NO: 648005 - DNA, 321 bp, Homo sapiens
  misc_feature (5)..(5): n is a, c, g, or t
  misc_feature (15)..(15): n is a, c, g, or t
  misc_feature (37)..(37): n is a, c, g, or t
  misc_feature (111)..(111): n is a, c, g, or t
  misc_feature (273)..(273): n is a, c, g, or t
  misc_feature (281)..(282): n is a, c, g, or t
  misc_feature (284)..(285): n is a, c, g, or t
  misc_feature (315)..(315): n is a, c, g, or t
  misc_feature (318)..(318): n is a, c, g, or t
ttccnctttggaaanggaaaatacttcggggccgganacttggtcttgcaggttagtgagaactcggcttcggccccctgtgacgcgaagcaccctgccgtgtaggttttnccgagcgcgaactgcagcgcgggggtcatcaggtagcgcacgctgccttcgtagttgttgaaagcatcgcgccgcccgtctgcaggttgaacagcgaactggtgtacagcagcccgaaggtcgcggcgccccacgcatacgtgccgcccgcgccccagaatnctgctganncnnaacgcccttgatgaacgtgtagtagttgtnggnacg

SEQ ID NO: 648006 - DNA, 1545 bp, Homo sapiens
  misc_feature (295)..(295): n is a, c, g, or t
  misc_feature (1076)..(1076): n is a, c, g, or t
  misc_feature (1093)..(1093): n is a, c, g, or t
  misc_feature (1158)..(1158): n is a, c, g, or t
attctgttcgttgtcttgttcgttgtgttctttttcttcgttgtctgttgcttttctgttattacttctgtctgttgtttgtctgtttgatttgtgtatgctgtgtcgttttggtgtgttgtctgttttgtgtttgttttgttgtgttgttcgtctgtgtcggttccgtttgtggctgtatcgtgtgtttgtttgtttgtttggtttgtagtttgtcggttgtgtgtggtgtcctgtcatggtctgtgcgtttcggtctgcttccgtcgtcgtcgctactggatcgagtttcgcnccccattaacccaccgccttgtgttgacaaacccccccaccgggttttgggcgcgcccccccttttgtgggacctctcgtggaggtgccacacatgggtggacccaacgagaaagcacgaggggcttgtgttatactccgcccgccccctcttttcttattcccgttccctataagggtaaccagagcccctttggggtggccgcaaattttcggccccacgaaggggggtgtcctttgtaatccccctggtcgtgatgttatataaaaaggggagagattgccccccttttcccgtggaaagaaaattccactggggcaaactcccccaagaaaccaagttggggccacaagaatggaaaagcctttttccctttagaggaaactttttcgctttgccaccaaagaccaaggaatgtgcacccacctttttttgagggaaaccccccccggggcttccaagcaagacccactgttcaagaggcacctctggaggggccctctggcgccctctcgggatattttgattgggacccccgggcaccaacccagtgggcaccccggcaccattggccccccaaggtttgaacgacccatggtgattacaaagaactgggcttctcctcttggtgtggatagaagattttttaagggagctctgtgtgtgtacccccacccacgatgtcacccctctctcctgagaagggagaatagttttcccccaaagagtgagatacaccactcgattatatgtgagaagggtttctctggagacgccaaanaaggcgcaccaaaaggntgggagagtatattccaagaaagagaggagagcttgagaagaccccacacaatgccgccaaaggngtaccctcgggcacaagttcacctgtggcccactcgctgagaaagaggcctcgtccgcggcttatcgcggctcgaaagaagtggttctgaagaagccacggagagctttctggaaagccctcaccccagcaccttccacggagctgacccgaggccgcgcgtcccagctgcccttcccccagtgtggcccaggctgcctggccttgtcctccagcccagtttaaatagtgtttttcctgagcttaggaagagtttacccgcacacataaagtcgagggactttaagtttttgaggctttctgttgccctggtgatggtgtagccctccccctttgctgttcccctactttactgccctgaattaagagccctaagtttgtactatta

SEQ ID NO: 648007 - DNA, 1071 bp, Homo sapiens
tcagcgagaataacaaaaactttgctcaggacatttgaggtcaaattgaagactggaaacctggaaaccgttttcatttgtagagcccactagagcgcgagcactcagtgtaaaggcatacaatcaggtagaaggggagaagcgcaggaggacagtggcacacatcaagaacatcgaagtattgatgccacgatcttatgcctgtctattttgaaatagggcatatctataaaggatttggagtctttcgagtgtctggtttataggggtatcggtgaactaagaaatcctgtgattaggttgtaagactgtaaccatggttgcaatttgaggtgtgtaaattattgttaaatggcctaacaaaatttaaaatcattggtttggcttcttggggaaggagtaattctagtttttctttgaggcactttatgaaatgtcttgtggtaaaggaaagcttgctcagaagtccagttcgagcaatgtgttcgtaacacacgtgtcgaaagttcgatatatgtataaggaaggtggtttccatcgctatatgaggccactgtaagtgctaattctgcacgctttgtatgaaaacaaccgtggcataagacaaaaagttactagaataaggaagctttgttggccccctaattgtaaacttcgtttatgactaaaggtcacattgggctacctacaatatgtgacatgggtgataaacgccctaacaattaaacagccgcagtttgggcgtaaacatacccaatgtgctttagacaagggaagcgaggacaaacctttccgttgaggttttaaccacgccttcgagggtagacaaaggtccgatggcaatgaacctcacgactggctaggtaagggccaattatacctggaagcacactagggatataaagacgcaatgaatgactggagcaaaacgataaaagcgtacatcttgggactgacttaccgtgtagtcgcccgtcatggggtggaaacaaaaagcctataaaacgggtggagaaaacctttgagtgcccccgttcatctaagaccacatgtccatctgtcgcaatatcc

SEQ ID NO: 648008 - DNA, 346 bp, Homo sapiens
tgaactgatgtgatctgatcatgctcccagacctactggtggccccatataaaatctgtgtgtgccagctcccccgagcagcgccagacgacccctgtgacacgaagagtttgagcatctgatgagccttggagaagaggaaccaatgcgactgagctactgctcctggaacaggggggacattgttccaatgaggccagacttacaccgaacagacgttgtgtggcggcaagcgtgtcatgcccacctgtgcttgtgtgcaaaggtgacagatgttgactccaatcaaaaacatccctatcctggatcaaaataacaaacactcccaaaaaaacgtttgcggccg

SEQ ID NO: 648009 - DNA, 526 bp, Homo sapiens
gacgtgcctgtggcctctccagcagtccctggaccatacctgaagcgctgagcccatcgtgagtgaggaggagtgggccacacaatgcagctggtggatgacgttcaggcctcaggaggtgtaggggagcgcctgcagaaggggctggagcgtcgggccaggaagacggagaactggctgtctgagtgttggctcaatgagcgcctacctccagtacctgccagcctgtggtcatctactcgatgcccatgtcgtgattgtacccaagcaggacttctgtggacctgcaggttcggctccgatttgctgccaaactcattgagggtgtgttggctttcaaaggtcattgatttgacaacgataccctgccctgtgatgaccttgggggagaaagccactgtgcattgaaccagtactatcagatcttgtcctcctgcctgagttgcgggcccacgcaaggacacagtcaagcacttctgcaagaccaagaagctcccacgcacatcacgtggtaccacaactacca

SEQ ID NO: 648010 - DNA, 114 bp, Homo sapiens
acacatgggaatcctcattcacacggagaaaacaccctcatgtgcatacagctatcccccgagtctcctcctatccctcgaaccccgacatcattaccgggttttcctcttaag

SEQ ID NO: 648011 - DNA, 137 bp, Homo sapiens
acttgattacatcactctgcggctcaggtccaccccagaaacccgctgtttcgcataaccatgaggtaccagatgaacttcaatcgcgaggcggactatgcacactctctgaactgccactccccgccagtccgggc

SEQ ID NO: 648012 - DNA, 226 bp, Homo sapiens
  misc_feature (20)..(20): n is a, c, g, or t
  misc_feature (27)..(27): n is a, c, g, or t
  misc_feature (102)..(102): n is a, c, g, or t
  misc_feature (201)..(201): n is a, c, g, or t
  misc_feature (206)..(206): n is a, c, g, or t
aggaggctaagcgagcgcgnggggacncatgagcaggcaaagtcgcagggccgccagcatgttctcccgaaaccaccggagccgggtcaccgtggccagggntccgcgtggaagatggagttcaaacgcggccgcttccgactcagcctcttcagcgaccttgcccgaggacacggagttgcagaggaagctagaccaatnagatnctgatgatggaagggggcct

SEQ ID NO: 648013 - DNA, 340 bp, Homo sapiens
  misc_feature (183)..(183): n is a, c, g, or t
  misc_feature (218)..(218): n is a, c, g, or t
  misc_feature (220)..(220): n is a, c, g, or t
  misc_feature (242)..(242): n is a, c, g, or t
  misc_feature (336)..(336): n is a, c, g, or t
acaagccacgcttacttgctgggtttgggtggaattttttcctctgtcccctccagtttcctcattggagtgacctgaaggtgtggcttccccccctttttttcagtattactttgccttagttttccccaaaagggaaggctggaacttttaactctgtaccccttgaaaggtatttaattntgtttttcctagtggttcccaattgaactgaattnanatggggtcgggtgggtaagganacccctcccctctccttccccattgggccgcctttatcaattgcctgttttgttttgtttgttttttaactttccataataaaaaggagttttnttca

SEQ ID NO: 648014 - DNA, 1218 bp, Homo sapiens
gctgcgcgctacaccgtggtcgctgtccacgtaggcgctcggccgggggcagttgcgcccatggaagctggctcaagcggtactggcgtggcccgcctggagcagcgcctcgcagacgtctcgccacctgctcgggcgagaagcggaggcccgtgtggcggttctgtgaagccggactcgcgggagtgcgacccgggggtacgcccaggggatcccgggccgcttctagcgtcccgtcagccgtctgcgcctcgtctcggccccggtcgccgcagcccgcctcacgccttcggccgcttgctaagagtctcgcataagagcttgagtcgcgtctttccgtgcctcacttcgctcttgcggtctgtccggcctcgccgcctgtcgagcgggtggtcccatctgctagtcacgcacgggcctcctgtgccgtcaggggtccacgagagggcctagggcgaggctacactcgatttggtgccaacctctagtggcgcaccgtggcgcgtaaccctcttgcctcatacttcgtttcgcccgcttcgaggcctgtcttgcctgccttggtacacctctgcgtcagcacaccctctgcgcgcgcactacgccagcgcacgcggacaagacctccaccttcgttgagaccgccattatcacccaaaccgcggtcttgcacgcgccaacaacaacggccaccttccttaggcgcacccttgtggttgtccacgaaggcgcacgccaagacacccctaacccaggcgcggttgcaacacgactttcaacacaggctgcggccaacgctggaacgggcgtcggtcggcctcggggtacgggtcggggattatcacatcaaccgggggacaggttacacacgcattagcacttcccagggccactgggtcgtctcgaaaagtatgagcgacctccaccctggagcacactcccccttacacaaagcaggacacaaatcacttcttccaggaggccccacgtggggcagcatcaacactccaaccccgatcgaaagcgcccacaatccacgcctggcttgacttacctggggctcctctggcaccaatgggcgcaatcatccctatcgtcccctgggcatcgcttacctcgtccgcccttacctcacggacaccgccctaaacggtaccatcacctatagggggttcacctcatgggctatgccgcccgccacgcggtccttatttgggc

SEQ ID NO: 648015 - DNA, 304 bp, Homo sapiens
ttacaaatcacttaagtgtacatataatctgctgttacaccagtgtactgaatttcattcaacactggttattatatttcttgattctacaatatctgtttggttctatgttaaacggtatttcatatttaacagtttcagagtactagtaaaattttcaaacttagcttacattttcatcaacatagtaagcataatttttcatttttttttattgaaattgatctcacgtcacccaggctgaaggccaatggcacaatcatggatcacagaagtcctgacctctatgaccatcaattgtgcc

SEQ ID NO: 648016 - DNA, 119 bp, Homo sapiens
acgaatcaatcagctcacacccagtctctcacaagtgtcattccataaaagtggtactactttcaggatgagtggtccggggatattttgctgcagttggttgaggaatggtttgcaca

SEQ ID NO: 648017 - DNA, 329 bp, Homo sapiens
cacctagggacaagcatataatgggcgaaggattatacgaggaaaatagaatcaacaggctgggattacaggcatgaggcatacatgccacaggactgggaggatgaatcttcggggatatcttgtaacttctaccggctcttgctaccagcgatatatactttacaatctatgtgccagattttccccattttcttttgcacgtagttcatggaaataacaactttggtatcatttccctcgaaaagggaagtggactctccttcctatctgcagcagatgcatgagtctaagcctacggtgagagcaatgcctctgtgaagttacat

SEQ ID NO: 648018 - DNA, 475 bp, Homo sapiens
agcggatgctgggcctggacgcgtgcgagctgggggcagcacggctgtctgagagactgctcgcggcctggcgactgtgcggcgccggaggtccgtccgtggactgtatcaaggaaggtgtgggctccggcctggcgccagatgcgacgatgggtggtgggattgagtgcttgtgtcctcgaggtaccgggcagccggtggggaggaatgagtcctcttgagaatcattccggcatgcttgagacctcggtgacggacgagtgagacctggcgcaaaggttactaatgtcgggttgtcgtgcttgggagcccacgtggccaactcggtgtccagctgtgacaccaatgcacgtgctcgcgaaatgttgcaagggggtgaccgaaggccttggaaccagatcgcctgatcagtggaagcagggacgtctcgcgggggcctcgtgcgttccaatggggagttcgttccaacaagggg

SEQ ID NO: 648019 - DNA, 111 bp, Homo sapiens
attaggagcctcccacttccttatttcattcattttcattacggacaatcaatcaacttcctttttctttatacatttaagtcacggcacacaacaacataaatatctgtc

SEQ ID NO: 648020 - DNA, 207 bp, Homo sapiens
tcttaactcaaaatctatcatctggtgactgtgatcacttccaactacattccatacttactctatccacattgttaccatcaccaaagcaaccaagagcttcagatctttgagctaataactctcctaaagactgacgttaattactggcattatctttactccaaatctgatgtgctacgttgatttcctcatgcagggaggagt

SEQ ID NO: 648021 - DNA, 107 bp, Homo sapiens
tcatgtcctaggagggtagcagctcagtgtagggctagggcatgaggccctaaggggtctaagggtcttctacaactcccactaccggagttcccaaagacccccag

SEQ ID NO: 648022 - DNA, 248 bp, Homo sapiens
cgaggattcaaagcttacgaggcacaaagactgtcactatgccttgaacgagtcaagaatcagtgtcagaacagaaaaagatgctccttgttttacggaccttatcctggggtgccgggacctttgacaggagggagataccagcccctgatctgaattgtccctgctcttgaggcacttggctggggagaagccgctttctttagcgacagggaaccccctttgcctcacctcccccttccctcgtt

SEQ ID NO: 648023 - DNA, 243 bp, Homo sapiens
cgaggtggcgaggaaatattgccgagcctcccgttcagatagtgtccacgagccggggtcgcgctctcgtcagtccgaaatctgtactctggacctgcagtcggtaggagtccaggcgctgtggcctggtatacaactgcagttgatctctccaaactgctacacaacgagcgcgcactatccgagctagaggagcgccttcgctccgtgctgcctcaccatcccgcaacgaagaatctttcg

SEQ ID NO: 648024 - DNA, 432 bp, Homo sapiens
gaaaggatgggagaggggctggaagcattggctagtagatgatcgaggctttctataccaccaccaaggtgtgtattttctcatcatcctggttgtgtcaggctgtccctagagatcaccctgacctcagtgtttaagaagaagggccagatgcagtggctcatgcctgtaatcctggcactttggaaggccggggcaggcggatcacctggggtcgggagctcgagccagcctggccaacagggagaaaccctgtctctgctaagggtgcaaggattagccaggcgtggtggtgggcacctataaccccagctacttgggggctggggcaggagaattgcttgaacctgggaggcagaggttgcagtgagccgagaccgctgtgttgcactccagcctgggcaacaagagtgaaactctgtctcaaaaaaa

SEQ ID NO: 648025 - DNA, 264 bp, Homo sapiens
  misc_feature (254)..(254): n is a, c, g, or t
tgttggtcacacctgtaatcccagcactttgggaggccgaggtgggcagatcatctaaggctgggagttctaaaccagcctgaccaacatggtgaaacccctgtctctactacaaaatacaacaaattagcgtgggcatggtgtgtgcatgcctcgtcatcccacgctattctgggaggctgatggaaggaggcggggcatgcctcaggatccatggctgccccagtgcacaatcccgctcaagtctacccggnactcgccggt

SEQ ID NO: 648026 - DNA, 278 bp, Homo sapiens
gttgcagtgatctgagattagtgccactgtcactctaggtctgggcaatggagtgagactctgtctcaaaacaaaacaaaaaacaaacaaggccaggcatggtggctcacgcctgtaatcccagcagttcgggaggctgaggcgggaggatcgcctgagagcaggagttcagcaccaggctgggcaatatggcaggacatcgtctctactaaaaaaataaaaaattagccaggtatgatggtgtgcacctgtggtccccagctactcaggaggctggt

SEQ ID NO: 648027 - DNA, 1569 bp, Homo sapiens
tgattctaagctctcgtataacatacgtctcgctggagtgatgtccttgtcattccctctcacatgataggagagagcaaagaagggtaggagactgaatcaacgaagacgcctgaggtgacttatgagaccacacattcccttgaacgtgtgcactgtgaattggtagaaactcgtcgccatcgtaatgcataatattaactcaaccatgaggtctgtgtacgcttgagtggcgacacatacggcgctagtaaatgctcgatgttaggtctggcgtaccagctgatccctcgggacctatcgtataggggacgcgcaagagaaggcgcacggacgtctactaccgagagggagtgctatctcattcggcgcacggcaatgcacgtcacatacacaatgacgctctgaaagtctaagactcgcagtgtgcgtatgaccaaatctcaaaataaacacaatattggagatatagatagataggaataagaaagatatataatagagagattatgaaaattattgctgaataaaagatatatataataatagggacaattcagagaatagacataataaacggataagagtttgcccaacaatctgtgccttcgccgaaaaaggtggctgaggattaacagatccgtgagacctactgtggcgatccagtgacgcgtagagagctgaaagttgtggcgtaggaattgaattggaatagacaagtagggtccgtttgacatacgaagaataagtgagctatgggttgtaaaatggcccgttaaataattacgtaactttaatttaactttaagagatgtttaattacactaggaggtggataaacatggttacaggaggtaaccttaataaggcagtgaacaataactttattggcgttatgcaaggtaaggtataacctgttaggagacgatataaagtgtgtgaaaatagtaaataaccgtgtaagttagccccatgggcaaaataattaggacacactggaggaaacaggaaacaggcaagcggcgcaaaccggatgttatgaccagcacaccgaggccgagcaatcgttacacaaaccacaacagggggggggcacatgtgaccacccaaacacaccggggcgatgccaaccagcaatcataacggtagagccccagaaaagcgaaaaactacgaacacagataacacagctaaacaacacacgggcccagcgtgtgtacccgacaaaacctacagatcaacagccagacaacccgttttcaacaggccaaaaaacaaccaagaggatgttgcaacccgaggacaaacagatgggccagaacgacgacaaacagccggggccacacacgagcacgggatcatgaggcgctacaactaagaagcagggtagacaaatcgacacgcaggccacgacacgggacgcgcgagcactacgagagcacgagatcaggcgagatgacaaatgacaagacaagcacgaaccagcgagcagacagcaaatgacgtagatactgtgtgttgtatgtcccgtccttcgtctgcagtacgccggggcagagggggaagggc

SEQ ID NO: 648028 - DNA, 572 bp, Homo sapiens
actccttttagacattgttgtgggtctggagggagacgtggtgtcaaggtcctcatcccatcctccctctgccaggcactatgtgtctggggcttcgatccttgtggtgcatggcagggcttggtgacactgcggctttctctcccagtccctgccttgtggcatccgtcaacaagatgccaatgccagtgcagcacttagtggatcttcccaggctgggttagtggcagcggccttgtgaaactgtgcattttgcagaaactttctgacgcggtcgttgcaatgactgtgtagcagtgcctaccagtgtccctttcatctttgacgagggacatggcccttgttttctgcagcttccacgcctctgcactccctgcccctggctaagtgctcccatctgcccggtgtccaccatagagctcccatgcatcctgatctccaccaccacatttcaagggcagcctggaaccagtggctagttcttgaatggagccccatcaatcctattaatcctcagaattccagtgggagcctcctctgagccttgtcgaactgggagcgagaaaaccgag

SEQ ID NO: 648029 - DNA, 98 bp, Homo sapiens
aagccctttaatttttttttttggtcggttccgggaacttattttccaacaattgcttccaactgaaataaaacaattaaaagcctgttcaggaggga

SEQ ID NO: 648030 - DNA, 327 bp, Homo sapiens
tcttttaatgtttacctaaatttggcatgcttacaggacagggttgcctcttactttttttaacattgtagaaatgtaatttattaacaatgctcactacaccagtttaaaataaacgttctcctttataatatttttccaatttggtcagttaaccaaacttaatacccccatttaaatatttttacaaattagaaaggttaccattttaattttagaacctgttttggatgggattatatggacgaaaattgtgtaaccctatggtcatggttagaaccggcattacagaattacttgaattaattgtgctgttagggatggaaa

SEQ ID NO: 648031 - DNA, 101 bp, Homo sapiens
ccctacaacgtatcctgtacggtcatggtaccggggtcgttaaacatgatgtcactagtgcaggcgtgtgcctcgtatctaactgggtgatgcgtagacgg

SEQ ID NO: 648032 - DNA, 881 bp, Homo sapiens
  misc_feature (344)..(344): n is a, c, g, or t
aggtaagtcacgcgatgttcataggctttaaaatggttaaaagtggctttaagatggtgaccagccttggcattggtaacctggtgattctcggtgaatctagataaagttaagaacgtgaaaataatttaaatatcaccgtaatactgggattagtgcggttaagtggtgctggtttaagaaagtcagtaagagatgtgtaggaactaggttctggcagtctaatagaattgaacagatggtcctaagtcgtagagagttcatagtactgttcttcacttacctgatggctttcccatgacaatagagtgtgctcaatacgatacactggtgattctattaanttgatgcaagaaacattggtttggtctgaatgcacggaagttaagtgaaactgggaggttcagaatacatgagtgaaccagtagagtagaataagagagatgtaaacgaatattcatgaatcagaataatcgtgtttcttggatctggtttattagcaaggtaggggatattaaagacaagagtaatttctatatgtggaggacatcctgtatagtaaatttccctaatcctagagttggcatagactttaagaaacgagggtagatatagaacatgtcagggaatccagctatgtgaaagatgggtcgggagtaaggtcatgcgtgcacagtgcagtgagtgtggaaggtgggcgggcacacatttgggccttgaaactcctttgggagcggtctggtgagcccaacaacttacgaagtccagtgacatgggggttgtaaaaccggatctggcataagggatccaatggtagtggagcgagcctgttggctcggcttggccgtaaagttacccttatatgaatctttccaccccta

SEQ ID NO: 648033 - DNA, 208 bp, Homo sapiens
  misc_feature (12)..(12): n is a, c, g, or t
  misc_feature (14)..(15): n is a, c, g, or t
attcgcgggcgngnngaccaataagatacatttatttaattaatggctggtcttgctttgtggcccaggctggagtgcagtggtgccatcatggctgactgacctcctgggctcaggcagttctcctgcattggcctcccaaagtgatgggcttacaggcatgagccaccatgctcagccagaacacattttaaaaagtatcattgtg

SEQ ID NO: 648034 - DNA, 1391 bp, Homo sapiens
gttttctgataaccagaagctgtgggagcgaaactataaaactctcactcttgcgaactgtccatgaccaagacaacttaacctgactgttcttgaaacttggggtgtgcgggtgggtgtaaacgttataaacggaacacgtttccttttttacaacgaatggtactaacgactactctcttggcacgccgcctcttttctctctctttctcttcagtccttcctcttaaaacgccatccgcagctggtcacacttaccttacacactgacgcagctcctgacacactttacgcacgcgctaaccttccatgctcccactactcccaagacccccaaagcacactcttgcctaactttcccgctagatctccactgctgacttacgcttatccaaaacggctttacccggattccactaaacacgacaccctcacacacactgcgtacccttttcctacagaacactctgcactactctctctcactacgcacccaccaaaccttaagtaacagccacccattttaacagcaggcggaaaagccacaacagctctactcgctcctactcttacacacacctgacatagccacagctctacacctcctcctttaaccctccccctttattatacccctacacccctcggctctggcctccccagcgaagcacgcccctcttctgcaccacccacgcgacgctctcgctctcggggccccgaacccgctgcttccctgacccctattcgccctgccccgctcccctctccgcccttcccttacagctctctctcccctttatcggccccctttggccccggcccccacgttcaccctttcacctagggttattcgcctcggcctattcccgcggggattccacgacgctctgcgctccttaccgcgtcttccgccccatgtgtaacccctcgtcgcactctctgcgcatctgttcaccctctccccttcatgcgggtcgcgtgcccaagcctcactatgctcccgcatggaccacccctctgcgtccccccgtacctccgcttccgcaaacgtcgccaccctcacccaccgaccaactacccacactccctaaacacttccccccaccaacctcgcgcaacctctcagcacccgcggtcccttcaacaagacgccccccaacaatctggcttcttcgacagcctcggcgcggcacacccacaacgcgctccccaagaacccacctcctcagctgactacaaccgacctctatgtcgccagctccaccccctgacacactccacgtcgtgtatgctcacccctccctctcctcatcatcacttactgtatggtcatgatgttccggcccactgcacgagtagcaagccgtcccaggcgaccgacctgacaagcg

SEQ ID NO: 648035 - DNA, 813 bp, Homo sapiens
agcggaggcaggaggaggagggaccacggggtggaggggagatagacccagacccagagctctgagatggtttcctgttgcctgtctctaaaccactccacatttcccgacggtccttcagactgcccggagagcgcgctctgacctgaacgacatgccatgcctgccacatgaggtgttcccagccaccatgagggcctggatcattctttcatccatttagccctggaccgaggagggccattggcaagcacccatcagcaagaagacccatgcctgatgagacagaggtggatggacagaaactgtggacagcaggtgactgacggatcatcatgctgggagcataagtccatgataccaggcgtggaccacgctagagagacatatatgatgcatggctgcacgaggaaaaccgaaagaggagagtggaaggcggaaaatcacactggcaccgagaaaaccaagcacaaattggacaaacgaaacaggacgaaaaggtgatgcagaagacatggggaatggagagaaacagacaaccccaccagtgatggcggtgatgcccaaagagagcccaacacaagaaaggaacgcagagcaacaacaaataggaaggagatagagacgacaaaggagatgacacgaaaaaaagaacaaaacagaagaaacaaaacgaagatcaaaccaagacacaacatacacaacggacacaaaaacgatggaagaccgagagaagaggacacgagaagaaaaggggacacgaaagacacaaaccaaggaagaacaatagaagacaaggagacaaaaaaaaga

SEQ ID NO: 648036 - DNA, 820 bp, Homo sapiens
  misc_feature (277)..(277): n is a, c, g, or t
cctctcaacggcccgcttttgtcccggggcgtgcgtcgcaacgtccggctcaacaagtgtttgtctaggcgcagatgagccgtcttttgttccgctttcctccccgcgctctctgtaggaattttcccctctctaaggtcggggttcacggtgcgcccccgtgtctcgcccattatatgtgtctgtctccctctcgctgcgcgcccataaattgtgttgtgagcgcgcgttcatgagatagcgagcgcgtccttatatattgcggtggcagccctcncggtggtcccccacgccgcgggtagaagcgatttcttattgatctatagggggccctatacaatgggaagcaaaacccttctaaatccgttccttgcagccgttgcttttatgtctatacatgccttggggtctctccctttcccaagggggaaacacgaattcttttccctgtcgttgccgacaactgtgtttgtttatatacgctgctcgcaagactaccccccctgagctaggtatactcgcgggtgtatacaacggacgagatatcttgcagtgtaaattcctagggcgcgtccctgtgagcaaacaacaacatgatgtgcagcacaatgttaccaggtttccgtggtcatctttggtatgatcatgttatgaatgcccgttgagatgttagtagcaccgctcctttcccagatccccacatttggtggtcccagcatctatctcacacacatgggacttcatggaccttgttcatgggttcaattaacgacgccccgcccacgggcatcattttggttgccgccgcccacaaagatca

SEQ ID NO: 648037 - DNA, 137 bp, Homo sapiens
  misc_feature (48)..(48): n is a, c, g, or t
ctccgtggcagaaatatcgttatggggataatttggcgcacagctgcngcagcgtgtagactttaacttcgtgacatcccatgccggaaaagaaactgtcgattcagatttgacttctcaatggtgtccatgtctat

SEQ ID NO: 648038 - DNA, 345 bp, Homo sapiens
aaaaaagggggggccccccgggggggggggagaagcccccttaataaaagggggggaacccccgggcccccgcccccccaattttggggttttttttcccccgggtcccccgggcccaaagggggggggtttttttttaaaaaccggggccccccaaaaaaaaaaaagggggggccggaaatggtttacttttggcccccaaaaataaggggggttagggaaggggcccgggcccaatttgggaaggggcccgcctttcccccccgggggggttttttttttggggtgggcccccccccaaaaaaaatttttttggggccccaaaaaaaagggccggccttggga

SEQ ID NO: 648039 - DNA, 155 bp, Homo sapiens
gaggatcccttgtcactcctggactacaaatctcaggttgagatttcagcctatagacatatcaacaagattctatatagctctacatatatagcaaggacatggggcggagtgctagggcaacattgtggaccaggggcctagtaatatcttac

SEQ ID NO: 648040 - DNA, 1016 bp, Homo sapiens
ggtgcagttcccggagttcgtgcccaccaggccgccccggaggatcctttgtgttgacaagggcggcgccgcccccgccccgctgttacgcgaggtgtttgtgagaagcaacccgcgcgctgcccgccagtttccgtggtttttatcggacggggggtcgccctgctagccgcaagaaaggatgccacttttgtttacgtcgggggcgggtaaaagacgaccacaagatgtgggttgttgtttgtccccctcctgtcgggcgacacacaaccgagcggctgtccagagcatgtgattgtaggagcccctcgttctttctctctagcaccacgctcggtgtggtggccgcccgccagatttggtgtcgccccacaacaaggatgaatgtggggaagaattcgtggcgacaacaaagaggcgatgctcaaatattcacagaggggggagcgacgcacaccccaccgtcgacggttcgttactgctccgctcgctcaccaagaagagaatgttctgctcttcttctgggggagatgcaaagagagccgccccaccaggagacaagacgaagcgtggccgcctcttgtgtatatcacccccgcggcgcgcccttgttcgcagaggtgtctcaacatgtcgcccagaggttatttaatcgatcattgcccgcccatcgatgctgtcactcaagacgagcatatggttgtgtatggagccgctcccggccggcgcgcccacgtttagagatgttttctgtcgcgcccccaagaagaacaccaaccatctctcatcagatgatgatgtggggtgtccacccacgtctgcattgcggtggagttgattttataaagcacgatgggtggtgttcaataaagcccggcttcatccaaccaagaaggtggtgggggggaagaaaatcaaccacccggggcccctttaaaaggggggggcccccccacaagggggggtccaattccccccccttttttttttccccccttttttttttttttccccca

SEQ ID NO: 648041 - DNA, 727 bp, Homo sapiens
gacttgaggaacacaatcagtacttcaggtatcgtaaatagtgagctaagcctcaaattttctatcacccagttgccctatttcagtgaatctaaagcaaattatctggtgtgattggcattgtttctaagccacggtcagcgtgcgtcattgtataacacgtacttctctgagtttgtatgactacacttattgtgatatagtatttacttattgtatagactcagtgtgctgaccacgcagacagtctgtaatctctaagacctattaacatgacacagttctatacttatgtgaattgttaactttattaatcattagagcagagtacatagttattctctagacattccgcttacttttcatatgtggtatagaattaaaggtaaactttattgacatctaaacacctacgaaatcgtctgcccatagtctccattgacttctttaccatgcacacacttctatttcacatagagtgactagtcaaaggattcactttttgcactataaatcagtgcagcattgatgatctaaccacgtatagcttcatgcttgtgtgagagattatgccgatcgcagtgatatgtggccggtggtaattcaatggtcaagacttgaataccgcaggaattctgcctacgcaggttttcctaatatcgctaccagtgcttgttacctatttcctttctggcttcctgacatgtggagtataagtacactgatg

SEQ ID NO: 648042 - DNA, 380 bp, Homo sapiens
cgcctttgtaaaaaagttaaaaatgaaaaaaaaaggaaaaatgatttgtatatttaatgaatgaacatggccaatttgcccctgggaggaggttcctttttgttgggggagtttgcaagtgaatttccctgaggttgaaattcattggggggagttttatttcggtcccagccccgtttccttttattttggagctaaagccagcggggggtttagttttgagggcagtaaaaaagaatcagcaaatcccttttatttttcacccttttccgggattttttgggttgtttttgggggagcaggggaccccaacttttcctgtaaattgcctttttgctggaaaatgttgtatgttgaaaaaaattttttataaaaattta

SEQ ID NO: 648043 - DNA, 301 bp, Homo sapiens
gtctgccatgtcaaagagaacatctcagttgtgcagaaagaattaacatagcaggcctgattgagactgatatgcttagcgaggtctgcttgcaaggttggcccttggctggcatctaggaacttagatttggggagggttcctacatttccagaaccaaaaagagtggcccattgtgcctaagctgtttgtataaacaatgtggtttatagagaacacctttctttctgggagtctggaattttgctgtgtagtaggcagagggtgcttatgtgatcaccccctaagaagaaccttggag

SEQ ID NO: 648044 - DNA, 382 bp, Homo sapiens
ctaatttcacccccaccccaccctccaggttaggggggagcagggaagcccagataatcagagggacagaaagcaccagctgctcccgcctcatcccgcgttcagccatccgtgcgcgcctctccctatttatctccttactctgctttccccacagtccccgagactgcttgcagacagctcccaagcccaactcccttgccggttgataaatcgaagtatgcagcacctccatgtcagaccacaggtctgagaatcggatagtattcatgggacaagggtcctcggcacaagacgtggtgcgcaccgcattaactccaggttcaccccaagccacattttcccaattatcagcccgaaaccaacagggtccgccatcttt

SEQ ID NO: 648045 - DNA, 358 bp, Homo sapiens
  misc_feature (170)..(170): n is a, c, g, or t
  misc_feature (178)..(178): n is a, c, g, or t
  misc_feature (312)..(312): n is a, c, g, or t
  misc_feature (351)..(352): n is a, c, g, or t
agttccccatactcccccatgtgtccgtgggagggacccagtgggaggtgattgaatcatgggggcggttaccctcgtgctgttctcatgatagtgagtgagttctcacaagacctgatggctttatatgggacttttccccccttgctccacgatcctccttcctgccnccatgtgnagaaggacatgtttgcttccatttctccatagttgtaagtttcctgaaggctccccagcactgtggaactgtgagtcaattaaatctctttcttttatacattaccctgtcttgggcaggtctttatagcagcntgaaaacagactaataaagatggaatttctggtaaaaanntataaa

SEQ ID NO: 648046 - DNA, 912 bp, Homo sapiens
ggttccaatctgggaagctgctgcaatggttcccgcacggaccggtggcgatagtaaacatgggccgttctggacttcaatgcatagttgcgtaacccgatcaatgacttctcatctgacatctcattgaggcgtcaatcgcaatgcgtatgtgtgtgcattcatggtaatgacgtggtctccacctcagagagtcacttgctgacaagaggcatcacgcgaagagtatggggccgaatgcaacggccgtatggcgaacctccgatggaatgttcggcgtttgatcaccagggtactactaaagtcttggtactgggtgccacgcgggaatagtattctggagactcgttgcgcaatacccgaaacattcccgattgatgccgagacgtggttgctcgagatgaagcgtacactgactgggactgaaagaattttcagacaacaatacacggcttataaatatgctgatcgggatgtaaccgtgtgtatatccgctaggtttacgccaacttatctacaaaagaaaatgcttaacccaagtaaaacaccggaacacatctgggtcgagatacttggaaggaaacctcgtaaaacgtttcgcaccgttggacatttcggttctatggagctttcaacacttggagcacggatcctgcgtcacagcaacatctttcagcggagaccccattaaattatggataacagaaacatatcacatgggagcattcaagggtaaattgcaacccgtgcttttccttcgaagggcccttatatagacaacagaggtcttctccgccatttgaaaaaggtggtggtccttagagagaaaacacctcgtacgcgggaccggggaacgcgttccttgcgttgcaagttctgcaagagaaattgtcacgtaacattgatcgttcc

SEQ ID NO: 648047 - DNA, 111 bp, Homo sapiens
atagcgacggatattagccgtattacagtcgcctatatctcggatgtcttgtcgtcactgaggctgtggataatggctccggagcatatgaatagtattgctttgaagaaa

SEQ ID NO: 648048 - DNA, 467 bp, Homo sapiens
ctagaggattctgctgactttctcaggctctacaaaaatttggcactggactgtggcacttttgtatagtttcaatgagatgaaatctggacgttgcagaacacagggtcaggcgcacatacacgcacgcacgcacacacacacacacacacacacacacacacacacagagatatccagcagcatccgtggaactaccctgaacgtcaaagaaaggaacagctcgtgtcgtgcccagatagaaagaattccaaaaaacagccaagaggttgggccagagaatttccagagagagaaatcatacaaacgtagggggttgatttcccagttcctgtcatctcagcagtcaacacacagagaaggatttttctcgtgacgctgccacctccaattctgaaatactcccatgtttcagagtggggccgggacggtggcaaacctgcagaccctgacacaatctctacaag

SEQ ID NO: 648049 - DNA, 1681 bp, Homo sapiens
  misc_feature (380)..(380): n is a, c, g, or t
  misc_feature (956)..(956): n is a, c, g, or t
cctaggacgtcggactttgcatagaagcacataattggaatcaatcgactaatcaccacacagaccataattattagcatcattcacctcctactattattgtgtaaatcctagaaagtcaacgaatcacacccttcatcttacgcctggattcgctcctaaacgttttcacttctctgtagtcgcctctgagagcgataactccgccttacactgagattaactatagcttagcgtgatcttcctgacccgctctagtaatcattggcaaggacacaattcgcaccatgcatgtaatacacagaatgtacattccatcgtactgcaacgcacatacaaccaatgtgctagcactactgctatttattctatatgtactncacctactcgaacttcttccgttaatttgattctaccattttccaacaagacccagcaggacacactataggtacaattaactttctctccactaaatactttttccctttgctggaccaaacgcgattcgagcttttgagttctcgccccatccctttcgtgtcctaattccaaatcaaaccctcagcattggcatgcgtcggatagcgcacgtctcccacggtagagcgggcccttgaataccagcctagggtaaacatatagcttttccatatgttcttacaaaccctcctagggctaaggtctttccgcactttttgcctctccatagggttccaaatcgaccaccgtacaaatgtctagctaagcgtcatcataactatctcgctttagtgtgcttctaccatacatagcgagttgcgtaccattacgtcgagcgtcgtcatggtagtccccaacggaatccttattcataactgtccctgtaagacccaaagaaaaactttaagtactgaacctaaggcgtttagcgaccacatagacgctttggtaactacgttagacagtgacttacncggtaccgtatataacagcgaaactacacgaggtttagtcgatcgtccccgttacaatggcacttcaattgttcaggaaattcctccccactttgcgggttgggaggtcagacctaagctcaacgggtggccctggccagtctaactttcctttccaacacatcatcaaggggcaggggcccatgagggggccaccttaaaactcccgggcactcctgtgacttccaattttttcttcaaccgcggcgctccgttgatacaaaaagacggcacattaagagcctttaaaaccccatattgcgacgtgtcgtcgagtgcagatacacgccctaaattatacaggcgccgtatagacactcaattaaacaaagggcgggccaagctatttgtcagctaccgtcgacaacaaacatagagacctcacaaaaccgctgtgcttggagagatagctccttgtagagacagcagcaagatgaccgccgcgttgtatagcgagcgcaatttatcccacaaggcgaccgttaatgatttcaccgcgacagaacacacttagtctaatgccccggaggtcagtcgtcctaacaacagggtacaagcagcacaaagagggcacgcggccaaacatcactctgcggaacatagccagccagacttgtgtcacaaccgcatcctcccaggccgagagcgatgcgcgacctgcagcccagatcctagtgtcctcactg

SEQ ID NO: 648050 - DNA, 115 bp, Homo sapiens
caggctgtgaggggactgcttgctgtggtggttgctagcccagatgagcattacctaccaccttcccacttggctagctgtcctttggaatatgtgctggtaactggggaaggca

SEQ ID NO: 648051 - DNA, 981 bp, Homo sapiens
ctataggcaatacatcgaagtcacagagctgcattaaagtcatgaagttcttgccctgaagcccactcgcaagtgaagaagacttaaaagaaataccccaagtacccctgggggagagaaatctatacgttagaaggtgtgtggagtggagctccagtattccatgatttctgacttcccttggctgaggtcattacgatgctgcagagcccaacagctgtcgctcgatagcgagctttgaagacgatgaagaaacgcactcatctagtgctccgtagaaggaaaggacagactgtctgcaagacatctgtagtggatagatcgaataggagaggaaattgcagagatgcgtcaggatgaaggaagggtgtacttgtcaagcgagtatgtggcaattattgtatccactattgtgatgtcaagtggagagccgagttagaagatgagcgtacatttaagtgtggtcccatcacatgccgtattgcgcgagccgtattatagtgcgagtaagaggcacagtaagggcgcgatccagtcgtgccatgaggtgctccagcagggacttgaggcatgcaggtgggaggtcctggctcggtgtagcgtatagtagggaatatataagggaagatcgacattggtatacaagagagttgtacttatagaaatatattcaaaggacgcttcctagagtaccaacattgatagtgatatgtttatacaatttagatttaaaagattcattgtaaggaaagacagatagatttgaaagagttggtgtaaaggttgaccttgaattcatgaagatatgatcgctgtgaatggaggtatccaatgattgattcattcgttaatgaatttttgggtcaatccgcttttaaattgtgtggctgttccattgtttgagggaaagcttgtatgaggtaaaactgtggcagagttgagaaaaatacagaaaataataggaagagaagaaatgagacg

SEQ ID NO: 648052 - DNA, 284 bp, Homo sapiens
cgctactactactaaattcgcggcccgtcgactttattattttttttcctctaatcttaacttcacactttatttcataaaggtgatcttcaatctctgatatcctttcttctgctttggctgttgatacttgtgtatgcttcacaattcttgtgctgtgtttcagctccatcaggtcattagttcttctctaaactgcttatttaggtagcattcccaaccttttcaaggtttagctcctgcatgggttaaaatggtccttggcttggaggagtttattattc

SEQ ID NO: 648053 - DNA, 953 bp, Homo sapiens
  misc_feature (527)..(527): n is a, c, g, or t
caccacggtgctgaccatgtccaccatcatcacgggcgtgaatgcctccatgccccgagtgtcctacatcaaagctgtggacatctacctctgggtcagcttgtgttcgtcttcctctccgtgctggagtacgcagctgtcaactacctgaccacagtgcaggagcggaaggaacggaagcttcgggagaagatctcctgcacctgtgggctgccccagcctcgaggggtgatgctggacagcagctacagtgatggagaggtgaacgacctgggcggctacatgcctgagaacggagagaaacccgaccggatgatggtgcagctgactctggcctctgagaggggctctccacagaggaagggccagagaggcagctatgtgagcatgaggatcaacactcacgccattgataaatactcaaggatcattttcccagccgcttacattttattcaatctgatatactggtcaattttctcttagatgcctgtaatgtgtatgtctcagcatgtcctacagaagtngctgtgaaatgaaaattagggcttaaagccatcccactgggttttcactgtccccttttcagctattcaaagctgcactgacaagacacctctgtttgcacttattaaatatcagttctctacacaacattatactaggtgttgccggaagttgcatgatagtacctgacattaggtggtcccagatccaggtaaagcccgaggactatggctgtcgcaatcaggagccctgaatcggtccattgcgggtcctctcacggcggggtcctaacaagggggccggagacctcataaaggtctgtggcccggcctaaacctgtgaaggaggtgggtggcgcccccgagagaggggccagcccccggcgggctaaaccgagccccacagaatgcgggggaacccgcacactaaacaacgttggtctcggg

SEQ ID NO: 648054 - DNA, 476 bp, Homo sapiens
gctgcgtgcagccccactctagaagaccctttatgcgaacacccgtcaagggctgtgaacccgcctggggataaggcgctgttcttgtggaactgaacttatctctacaggggctgtacacgctctgtgcccacagggggggatgtgaatatttcgcgtctgcgcctcgggacacgggcccaagccgggcccaccctggtggaacgtccacgtctgggtgccaaaccaggccccttggccgaagttaagggtggtcttaagaatgatgtggaattaaagcgccattcttaccggtgactggtgccgcacctatcatgtttgacaagccgggactgccaagcacccctctccggtggtggggaccacattgaccaacgctttatttttcaagtggcagtgctccttttggacttttctctagggttggcgcttaactcttcttgggagcttaattcaccccttctttcttcctttaa

SEQ ID NO: 648055 - DNA, 222 bp, Homo sapiens
tcgcccattcgtccagacactaaccccctcattcacacaccctcattcacgagcactaacacactcacaggtaacccattcacacactaacccactctctctctctctttcacacacacacagcaataagaatggaataattctctctttaaaggacaaagaactggagttagagtatgaagttataaagagtcaagatgttcctaggatacagtagggaga

SEQ ID NO: 648056 - DNA, 496 bp, Homo sapiens
gatcaagtgttttaaacctttgatatttgacaaactttccaaaatcaaatgtaaaattctaacttaaatgttttcgacctcaagctaacttttggcattaaagcccttggaagtccaaatagggcccctggaagtccaaaagaaacatattaggctaatttggtatattaaaatcatacaggaagctgatcaaataaaaaatgttgtttaattttctttgagttgtatttgtataaatctgttattaatatgcatcccaaaattgtatcatattgctaaaatgttgatagatcttgttatatgttattggtaataattgttatcctgttaaattattgtataccacagaaataatgaaatttctttgtcaattgcatagtaatcatggctcttctaagtcttttgtcattcacagatgattattgttttacttggattcttttcaaaagtggtttgtaattcgctacagcctaaaatctgcttgttcaaaaaaaaa

SEQ ID NO: 648057 - DNA, 284 bp, Homo sapiens
ggggatctggtcgcacccgtgtaggcattcctgcccacagcggtggggcccgcccttcgctagggtggatggcgacttgcgaggggggcttcatgagcggctacaagatggatcccgcgggggtgcagaaggtgctccaggcggtgggcgaccgcgcgagcgagctcggcactgccctcgacgacgtcgagtcggcgacggccgacgtggtccagggtagcggaggcgacggcatcgtcggtcaggctctggcgaccttcctcaccgaccagaagtccgctctc

SEQ ID NO: 648058 - DNA, 116 bp, Homo sapiens
  misc_feature (70)..(70): n is a, c, g, or t
agagtctaagagctactttatagatattgacattgacacacatacacaaacaaaatgctacacacaggangacatcactgcagtataacacaagtaaaaataaaaacaatagaatg

SEQ ID NO: 648059 - DNA, 403 bp, Homo sapiens
tctctagcaggatcccctacacatcacgctcctacactatgaggctcctttctctcatacaaacagattctctctctatctgctgagctgcctagggctggggttgaggtgacacaagcacccatgtggctgttttaggccggaactgaagcttagcacagcacagagtcttgctcaaggcccactgtaatcactacctggctaccacctaagttcactccaggccccaggcctctacaatcagcaggtggtgaagccgaccaggcttgcatccttcccattagggtagtgagctcccccaggccccaggctggtccattaatgccgtccgggacctaggggctagagtaaaaaacttcataagtctgccttgcattctcctctgctgtgtatgaactggcca

SEQ ID NO: 648060 - DNA, 153 bp, Homo sapiens
  misc_feature (26)..(26): n is a, c, g, or t
  misc_feature (39)..(39): n is a, c, g, or t
  misc_feature (55)..(55): n is a, c, g, or t
  misc_feature (124)..(124): n is a, c, g, or t
tagcagtgttttgtattttttctaantctttagctttcnatattggattaaagtncttgtttgtgaatatagtttccgtatgggcaaatgatttcttgcttattagtcttttgttaaagaatgncttagtaagagctaagcttttaaaagtaa

SEQ ID NO: 648061 - DNA, 413 bp, Homo sapiens
tggaaatcagcctgggcaacctggtgaaaccctgtctctacaaaaaattagccaggtgtggtggcatgtgcctatagtccgagctacccaggaggctgaggtgggagcatcacttgaggctgggaggtcgaggctgctgtgagccaagattgtgccactgcactccagcctgggtgatggggtgagcttctgtctcaaaaagataaagaaaagaaaactcatactctggaacaatagaacccttatagatgggttgttgttcatagtaatgttgatatcaaaagaaggtaggctgggtgcagtggcttatgcctgtaatcccagcactatgggaagccaaggcaggcagatgacctgaggtcaggagttggagaccagcctgaccaacgaggagaaaccccatctctactaaa

SEQ ID NO: 648062 - DNA, 1334 bp, Homo sapiens
cccctggtgccgtccgctgtatcggtcgtgtgcttgtcaatctcttttctcacgcttgtggttttttgctcctgttgtgttctctcttgtggttctgatctgtcttgtcgtccgtgttgtaggtgccgtctcgctggttccgctccagtggttggttcttgtgtctcatggtttgttcttcggtttcgctcgatttgtggtcttccctagttaatgctcgctgcccttagatttctgtcttctcctccgtctctcccgcctcgtttccgcgcgttgtgtccctttctctgagtgtctttcctttgtgacttgaccttcttggtactttgtgtgcgtttttctactgtgttcttgtgctcctgtttcctctatccaggttttggttgatccttcttgttgttcgtgttgttcatgtctgttttggtctttttctggtttttctggtttcttttttggtatttttttgtctacaagtttactttttggtcttttttgggttctgttatctgtggtctgattccatcgttgggtattagttgtactctcgcgtcagttgtcgtcgtctccgtcgttgtcttccggtgtaccgtgtcgtgctttgccgggtgtcccccgttcgtcgtccggtccctgtccgttctcgtgttcgtttttctgctttctgtctttctccctcgtccttgtattgctttccttctagatttcgtagcttgcagccgttcattctctccttcatgtctctcccgttctctctccttctctgtttctcctgctcttctctcctgccagtctcttgtactctgtgtcctggtccctccgtatgtacccctgtctttctcctcctgactggtggtctatctgcccctacctctggccctcgctttaccggtagtaggtggtgggagagggaagtaggagagataaagatcagggtactttgaacactaggcctatctcactgaggccattttcacctcgcacctatgtgggtcagtgggagcatgctaggtgtcagcttttcgtctagtaacttaagtgagagagaaagggcagcagcacacagaagcccctataacgcacagccatcagtcatacgcccctccatccattctctcattggcagaggcccacgcacacaacacagcagcatcattcctacccagggacatgtgaacataacaagcagcatcccaggcatgagcagcagcacaccacacgagacacagacacagaacattagccagtcgtccccagtaatgcccatcaatgtgaatgattcattcagggaaataatttctcgcatttttattattataaataacaatagaacatag

SEQ ID NO: 648063 - DNA, 331 bp, Homo sapiens
gggccccccccccccccggggggtttttttttccccccccccggggggggcccccccccccaaaaaaaaattgggggggttttttttccgccgggcaaaaaaaatttttttgggggggccggggggggggtttttttttttttgccccccccgctccccccccccaaagtggtttttttccccccgttttttgggcccccttttgttttttcccctttttttttttccccccgggggggggggggggggggggggggttttgcccccccccccgggcctttttttttttttccaaaaattttttttttttttttttcccccggggggggga

SEQ ID NO: 648064 - DNA, 227 bp, Homo sapiens
tggggcccaaggcggggtagtagctgaatcatggatcacaaacacagaactcagttcctgaggacggctgcaaggagacaaccccgatgtactcctacatggccttcaccgctacctttaccaaatcatgttcacacgcttagctcacacaccataggacatgttcacacacctctgattcatcccggatgaatcagacctgacacaactctaagtaaaagcaggca

SEQ ID NO: 648065 - DNA, 211 bp, Homo sapiens
taagtaggagagagtggatagtagagtcagaagcgttatgtggatttatgcgggtaaagccatatcgggggtaccgattataaggggaactagtcagcttgccaaagcctccgattatgatgggtattactatgaagaagatagttacaaatgcatgggctgtgacgataacgtcgtagactgctggctcgccacctacacaggtgccagg

SEQ ID NO: 648066 - DNA, 102 bp, Homo sapiens
tgacatctagaggatcccatgtggaccatcaataacttaagctttgcgggagaacatgggtgacgtcattaaaagttctacattttcatcaggtgggtacgt

SEQ ID NO: 648067 - DNA, 150 bp, Homo sapiens
cggcacgagggatctgcctgcctcggcctcccaaggtgctgagattgcaggcatgagccatcatgcccagtcccagttataacgtaatataaagtgattttcttgttttaaaatttgtcaatattgaatttaagttttaaaaaaaaaaaa

SEQ ID NO: 648068 - DNA, 2156 bp, Homo sapiens
  misc_feature (128)..(128): n is a, c, g, or t
  misc_feature (186)..(186): n is a, c, g, or t
  misc_feature (424)..(424): n is a, c, g, or t
  misc_feature (458)..(458): n is a, c, g, or t
  misc_feature (1228)..(1228): n is a, c, g, or t
  misc_feature (1998)..(1999): n is a, c, g, or t
  misc_feature (2003)..(2003): n is a, c, g, or t
caactaacaaccgtactcaaaaaacttctagatcctaagcttatctccacaaaagagaacacacaaacagcaaaaaccatagggcccctctcaacccctccctgcacacacctcatcacttgaaaaanggtcctgctcacaacatcacttttaaacttctgaaatccgcccacaactgcccaaatnacaattgaaacccagccacccaaaatttctaaaggaaaaaattttcttctacttttccacaatttaccccaaaatctttctggctacatttggtacaaaaggcaaataacatacctctaccattacattacatcatatgtattaaacggtcaaaaaattatatatagacctacatacaataaaaaaaaaaaaatatattccaattcatcccttctaatccaaaatttcacgcaggaanatgcaggatctacacttacacatcgtaaaacgangcgatgggactggaggagtaactggacatttcaccttcaccttatacctggagactcccaagccctccatctccagcagcaacttaaaccccagggaggccatggaggctgtgagcttaacctgtgatcctgagactccggacgcaagctacctgtggtggatgaatggtcagagcctccctatgactcacaggttgcagctgtccaaaaccaacaggaccctctttctatttggtgtcacaaagtatattgcaggaccctatgaatgtgaaatacggaacccagtgagtgccagccgcagtgacccagtcaccctgaatctcctcccgaagctgcccaagccctacatcaccatcaacaacttaaaccccagggagaataaggatgtcttaaacttcacctgtgaacctaagagtgagaactacacctacatttggtggctaaatggtcagagcctcccggtcagtcccagggtaaagcgacccattgaaaacaggatcctcattctacccagtgtcacgagaaatgaaacaggaccctatcaatgtgaaatacgggaccgatatggtggcatccgcagtgacccagtcaccctgaatgtcctctatggtccagacctccccagaatttacccttcattcacctattaccgttcaggagaaaacctctacttgtcctgcttcgcggactctaacccaccggcacaatattcttggacaattaatgggaagtttcagctatcaggacaaaagctctttatcccccaaatnactacaaagcatagcgggctctatgcttgctctgttcgtaactcagccactggcaaggaaagctccaaatccatgacagtcgaagtctctgactggacagttccctgaattctactagtacctccaattccattttctcccatggaatcactaagagcaagacccactctgttccagaagccctataagctggaggtggacaactcaatgtaaatttcatgggaaaacccttgtacgtgaagcatgagccactcagaactcaccaaaatattcgacaccataacaacagatgctcaaactgtaaaccaggacaacaagtggatgacttcacactgtggacagtttttcccaagatgtcagaacaagactccccatcatgatgaggctctcccccctcttaactgtccttgctcatgcctgcctctttcacttggcaggataatgcagtcattagaatttcacatgtagtagcttctgagagtaacaacagagtgtcagatatgtcatctcaacctcaaacttttacataacatctcagggggaaatgtggctctctccaccttgcatacagggctcccaatagaaatgaacacagagatattgcctgtgtgtttgcagagaagatggtttgtatgaagacgtaggaaagctgaaattataatagagtcccctttaaatccacattgtgtggatggctcttgccgtttcctaagagatacattgtaaaacgtgacagtaagacattctagcagaataaaacatgtaccacnnaaanaaaaatcgagacacagaacagcaaaaaaaaaacatttctttggcactgtcggtcctctgtgagaagtttcttgggaaaaaccctgccgttgtggggccggggtcccgagaggtaactgtgacagtcggtccaggaaggtgtctcaagggagac

SEQ ID NO: 648069 - DNA, 2118 bp, Homo sapiens
  misc_feature (128)..(128): n is a, c, g, or t
  misc_feature (186)..(186): n is a, c, g, or t
  misc_feature (424)..(424): n is a, c, g, or t
  misc_feature (458)..(458): n is a, c, g, or t
  misc_feature (1228)..(1228): n is a, c, g, or t
  misc_feature (1983)..(1983): n is a, c, g, or t
  misc_feature (1989)..(1989): n is a, c, g, or t
  misc_feature (1991)..(1991): n is a, c, g, or t
  misc_feature (2004)..(2004): n is a, c, g, or t
  misc_feature (2009)..(2009): n is a, c, g, or t
caactaacaaccgtactcaaaaaacttctagatcctaagcttatctccacaaaagagaacacacaaacagcaaaaaccatagggcccctctcaacccctccctgcacacacctcatcacttgaaaaanggtcctgctcacaacatcacttttaaacttctgaaatccgcccacaactgcccaaatnacaattgaaacccagccacccaaaatttctaaaggaaaaaattttcttctacttttccacaatttaccccaaaatctttctggctacatttggtacaaaaggcaaataacatacctctaccattacattacatcatatgtattaaacggtcaaaaaattatatatagacctacatacaataaaaaaaaaaaaatatattccaattcatcccttctaatccaaaatttcacgcaggaanatgcaggatctacacttacacatcgtaaaacgangcgatgggactggaggagtaactggacatttcaccttcaccttatacctggagactcccaagccctccatctccagcagcaacttaaaccccagggaggccatggaggctgtgagcttaacctgtgatcctgagactccggacgcaagctacctgtggtggatgaatggtcagagcctccctatgactcacaggttgcagctgtccaaaaccaacaggaccctctttctatttggtgtcacaaagtatattgcaggaccctatgaatgtgaaatacggaacccagtgagtgccagccgcagtgacccagtcaccctgaatctcctcccgaagctgcccaagccctacatcaccatcaacaacttaaaccccagggagaataaggatgtcttaaacttcacctgtgaacctaagagtgagaactacacctacatttggtggctaaatggtcagagcctcccggtcagtcccagggtaaagcgacccattgaaaacaggatcctcattctacccagtgtcacgagaaatgaaacaggaccctatcaatgtgaaatacgggaccgatatggtggcatccgcagtgacccagtcaccctgaatgtcctctatggtccagacctccccagaatttacccttcattcacctattaccgttcaggagaaaacctctacttgtcctgcttcgcggactctaacccaccggcacaatattcttggacaattaatgggaagtttcagctatcaggacaaaagctctttatcccccaaatnactacaaagcatagcgggctctatgcttgctctgttcgtaactcagccactggcaaggaaagctccaaatccatgacagtcgaagtctctgactggacagttccctgaattctactagtacctccaattccattttctcccatggaatcactaagagcaagacccactctgttccagaagccctataagctggaggtggacaactcaatgtaaatttcatgggaaaacccttgtacgtgaagcatgagccactcagaactcaccaaaatattcgacaccataacaacagatgctcaaactgtaaaccaggacaacaagtggatgacttcacactgtggacagtttttcccaagatgtcagaacaagactccccatcatgatgaggctctcccccctcttaactgtccttgctcatgcctgcctctttcacttggcaggataatgcagtcattagaatttcacatgtagtagcttctgagagtaacaacagagtgtcagatatgtcatctcaacctcaaacttttacataacatctcagggggaaatgtggctctctccaccttgcatacagggctcccaatagaaatgaacacagagatattgcctgtgtgtttgcagagaagatggtttgtatgaagacgtaggaaagctgaaattataatagagtcccctttaaatccacattgtgtggatggctcttgccgtttcctaagagatacattgtaaaacgtgacagtaagacattcttaggcagnaattanancatgttacccccntttgnttaaaaaacacaaaaacacacacaacaaacaacacacacacacaaacaccccttactctcccacaccataccccacaaaccatcccctaacacaccacacaaaacaacc

SEQ ID NO: 648070 - DNA, 2310 bp, Homo sapiens
  misc_feature (128)..(128): n is a, c, g, or t
  misc_feature (186)..(186): n is a, c, g, or t
  misc_feature (424)..(424): n is a, c, g, or t
  misc_feature (458)..(458): n is a, c, g, or t
  misc_feature (1228)..(1228): n is a, c, g, or t
  misc_feature (2023)..(2024): n is a, c, g, or t
  misc_feature (2028)..(2028): n is a, c, g, or t
  misc_feature (2035)..(2035): n is a, c, g, or t
caactaacaaccgtactcaaaaaacttctagatcctaagcttatctccacaaaagagaacacacaaacagcaaaaaccatagggcccctctcaacccctccctgcacacacctcatcacttgaaaaanggtcctgctcacaacatcacttttaaacttctgaaatccgcccacaactgcccaaatnacaattgaaacccagccacccaaaatttctaaaggaaaaaattttcttctacttttccacaatttaccccaaaatctttctggctacatttggtacaaaaggcaaataacatacctctaccattacattacatcatatgtattaaacggtcaaaaaattatatatagacctacatacaataaaaaaaaaaaaatatattccaattcatcccttctaatccaaaatttcacgcaggaanatgcaggatctacacttacacatcgtaaaacgangcgatgggactggaggagtaactggacatttcaccttcaccttatacctggagactcccaagccctccatctccagcagcaacttaaaccccagggaggccatggaggctgtgagcttaacctgtgatcctgagactccggacgcaagctacctgtggtggatgaatggtcagagcctccctatgactcacaggttgcagctgtccaaaaccaacaggaccctctttctatttggtgtcacaaagtatattgcaggaccctatgaatgtgaaatacggaacccagtgagtgccagccgcagtgacccagtcaccctgaatctcctcccgaagctgcccaagccctacatcaccatcaacaacttaaaccccagggagaataaggatgtcttaaacttcacctgtgaacctaagagtgagaactacacctacatttggtggctaaatggtcagagcctcccggtcagtcccagggtaaagcgacccattgaaaacaggatcctcattctacccagtgtcacgagaaatgaaacaggaccctatcaatgtgaaatacgggaccgatatggtggcatccgcagtgacccagtcaccctgaatgtcctctatggtccagacctccccagaatttacccttcattcacctattaccgttcaggagaaaacctctacttgtcctgcttcgcggactctaacccaccggcacaatattcttggacaattaatgggaagtttcagctatcaggacaaaagctctttatcccccaaatnactacaaagcatagcgggctctatgcttgctctgttcgtaactcagccactggcaaggaaagctccaaatccatgacagtcgaagtctctgactggacagttccctgaattctactagtacctccaattccattttctcccatggaatcactaagagcaagacccactctgttccagaagccctataagctggaggtggacaactcaatgtaaatttcatgggaaaacccttgtacgtgaagcatgagccactcagaactcaccaaaatattcgacaccataacaacagatgctcaaactgtaaaccaggataacaagttgatgacttcacactgtggacagtttttccaaagatgtcagaacaagactccccatcatgataaggctcccacccctcttaactgtccttgctcatgcctgcctctttcacttggcaggataatgcagtcattagaatttcacatgtagtagcttctgagagtaacaacagagtgtcagatatgtcatctcaacctcaaacttttacgtaacatctcaggggaaatgtggctctctccatcttgcatacagggctcccaatagaaatgaacacagagatattgcctgtgtgtttgcagagaagatggtttctataaagagtaggaaagctgaaattatagtagagtctcctttaaatgcacattgtgtggatggctctcaccatttcctaagagatacagtgtaaaacgtgacagtaatactgattctagcagaataaaacatgtaccacatttgctaaaaaaaacaaaacaccanncacnacaaaanacacaaaaacacacaacaccccacaccaccacacataacacacaacgaatcctctactcactcccacaatcaaactcataaaacacactcaacacacatcccatacaacacttatccttgcagtcccactcccctccactcaccattctgtgctcctcaacaaaaaatccctctcctcacgccccaacaactacctgattacacaagacacacaacacctatgagactcaataacacacacacacctcctccccgtaccatagccatcttaatct

SEQ ID NO: 648071 - DNA, 918 bp, Homo sapiens
ggacacacccttgaatgctatagcttatccatgaagctctatgaagaaggggcagcagccagaggatggaagacttatgggctggtgaccagatattcagaggttaagtggggttgaccgtgtacggaatctccagaccacgtaagtaagccaatcacaaagccctggacggcatgagcgccaccagaaggtgtcggcgtggtggtgtatagcagatgatggctactactatcgctggtgatgaggagaacttggagattgtccctgtggatctgcagaagataatgctggccggtggcctgtggcctgagcatcgtatgggaaacgaagatgtgaagcggagtgtatatatatctgacatcgtgaaaggcggagccgcagacctggatgggagagttgattcagggatgatcagatctctatctgctgaagtggggaggacagtgaggaaaatgcctcataggatgacagatggcacacacagtacctcaatgtgtggcacaagaggaggtattgtagcgtggcatagacgaatatggacaagagttccgagactgaggtaccgtgggatcctgttgtgaggtagtgacattcatgaggaacaggttcaggggttagtcgaggagaagattggcaaatcgaacggatggtagctagttacaattcctcgtccttgtccgcatcacttgttcgagtcgagcagtggggcgcttgccaaaaaaccatgggttgtgggaccacaatagataacgaaggtctcaagagatcctttgcccaagaaaacaattggcaagagcaccagcattattgggaaactcatagggagctggactagacggagtaatacaggggcatgcttcagtaggtaggccccttgggaatccaagtaattggtgggagggcacagcaggaaagtcg

SEQ ID NO: 648072 - DNA, 321 bp, Homo sapiens
ggcacgagcatctagaatacggatataaaagaaaatactggccaggtgctatgggtcatgcttgtaatcccagcactttgggaggccgaggcgggcggatcacaaggtcaggagatcgagaccatcctggctaacacagtgaaaccccatctctactaaaaatacaaaaaaattagccaggcgtggtggcaggcgcctgtagtcccggttactcaggaggttgaggcaggagaatggcgtgaacccgggtggcagagcttgcagtgagccgagatagcgccaatgcactccagcctgggtgacagagcaagactctgtctc

SEQ ID NO: 648073 - DNA, 2448 bp, Homo sapiens
  misc_feature (128)..(128): n is a, c, g, or t
  misc_feature (186)..(186): n is a, c, g, or t
  misc_feature (424)..(424): n is a, c, g, or t
  misc_feature (458)..(458): n is a, c, g, or t
  misc_feature (1228)..(1228): n is a, c, g, or t
  misc_feature (2038)..(2038): n is a, c, g, or t
  misc_feature (2040)..(2040): n is a, c, g, or t
  misc_feature (2043)..(2043): n is a, c, g, or t
  misc_feature (2046)..(2047): n is a, c, g, or t
  misc_feature (2050)..(2050): n is a, c, g, or t
caactaacaaccgtactcaaaaaacttctagatcctaagcttatctccacaaaagagaacacacaaacagcaaaaaccatagggcccctctcaacccctccctgcacacacctcatcacttgaaaaanggtcctgctcacaacatcacttttaaacttctgaaatccgcccacaactgcccaaatnacaattgaaacccagccacccaaaatttctaaaggaaaaaattttcttctacttttccacaatttaccccaaaatctttctggctacatttggtacaaaaggcaaataacatacctctaccattacattacatcatatgtattaaacggtcaaaaaattatatatagacctacatacaataaaaaaaaaaaaatatattccaattcatcccttctaatccaaaatttcacgcaggaanatgcaggatctacacttacacatcgtaaaacgangcgatgggactggaggagtaactggacatttcaccttcaccttatacctggagactcccaagccctccatctccagcagcaacttaaaccccagggaggccatggaggctgtgagcttaacctgtgatcctgagactccggacgcaagctacctgtggtggatgaatggtcagagcctccctatgactcacaggttgcagctgtccaaaaccaacaggaccctctttctatttggtgtcacaaagtatattgcaggaccctatgaatgtgaaatacggaacccagtgagtgccagccgcagtgacccagtcaccctgaatctcctcccgaagctgcccaagccctacatcaccatcaacaacttaaaccccagggagaataaggatgtcttaaacttcacctgtgaacctaagagtgagaactacacctacatttggtggctaaatggtcagagcctcccggtcagtcccagggtaaagcgacccattgaaaacaggatcctcattctacccagtgtcacgagaaatgaaacaggaccctatcaatgtgaaatacgggaccgatatggtggcatccgcagtgacccagtcaccctgaatgtcctctatggtccagacctccccagaatttacccttcattcacctattaccgttcaggagaaaacctctacttgtcctgcttcgcggactctaacccaccggcacaatattcttggacaattaatgggaagtttcagctatcaggacaaaagctctttatcccccaaatnactacaaagcatagcgggctctatgcttgctctgttcgtaactcagccactggcaaggaaagctccaaatccatgacagtcgaagtctctgactggacagttccctgaattctactagtacctccaattccattttctcccatggaatcactaagagcaagacccactctgttccagaagccctataagctggaggtggacaactcaatgtaaatttcatgggaaaacccttgtacgtgaagcatgagccactcagaactcaccaaaatattcgacaccataacaacagatgctcaaactgtaaaccaggacaacaagtggatgacttcacactgtggacagtttttcccaagatgtcagaacaagactccccatcatgatgaggctctcccccctcttaactgtccttgctcatgcctgcctctttcacttggcaggataatgcagtcattagaatttcacatgtagtagcttctgagagtaacaacagagtgtcagatatgtcatctcaacctcaaacttttacataacatctcagggggaaatgtggctctctccaccttgcatacagggctcccaatagaaatgaacacagagatattgcctgtgtgtttgcagagaagatggtttctataaagagtaggaaagctgaaattatagtagagtctcctttaaatgcacattgtgtggatggctctcaccatttcctaagagatacagtgtaaaacgtgacagtaatactgattctagcagaataaaacatgtaccacatttgctaaaaaaaacaaaaaaaaaaaaaaaaaacctttntnggngcnnccngggccccacaaaaacgtttctaaaacacattggcgtggggccgcagggccccaaatagggaaagggaacactggcgcaaacaggtgtccaaagggaaaccgggggcacaaaacaaaggggtggggttcccccccaattaaaaacccgccggggggaacacacggagcgtctcgtgacaaaaccccgaaaagggcgagctccgagagagggcacatcacgaggggtctctacacaacgcaggggggctcaccaaagagaggtcccagaacatcaaattaacccccgcccagcgcggcgtgcgcaaaacgaagaagaagagacgaaagagcacaaacaacaacagcagagaagaaacacaaagcgaacaaagatgaggaagcgacaagaacagagaacag

SEQ ID NO: 648074 - DNA, 1646 bp, Homo sapiens
  misc_feature (128)..(128): n is a, c, g, or t
  misc_feature (186)..(186): n is a, c, g, or t
  misc_feature (424)..(424): n is a, c, g, or t
  misc_feature (458)..(458): n is a, c, g, or t
  misc_feature (1228)..(1228): n is a, c, g, or t
caactaacaaccgtactcaaaaaacttctagatcctaagcttatctccacaaaagagaacacacaaacagcaaaaaccatagggcccctctcaacccctccctgcacacacctcatcacttgaaaaanggtcctgctcacaacatcacttttaaacttctgaaatccgcccacaactgcccaaatnacaattgaaacccagccacccaaaatttctaaaggaaaaaattttcttctacttttccacaatttaccccaaaatctttctggctacatttggtacaaaaggcaaataacatacctctaccattacattacatcatatgtattaaacggtcaaaaaattatatatagacctacatacaataaaaaaaaaaaaatatattccaattcatcccttctaatccaaaatttcacgcaggaanatgcaggatctacacttacacatcgtaaaacgangcgatgggactggaggagtaactggacatttcaccttcaccttatacctggagactcccaagccctccatctccagcagcaacttaaaccccagggaggccatggaggctgtgagcttaacctgtgatcctgagactccggacgcaagctacctgtggtggatgaatggtcagagcctccctatgactcacaggttgcagctgtccaaaaccaacaggaccctctttctatttggtgtcacaaagtatattgcaggaccctatgaatgtgaaatacggaacccagtgagtgccagccgcagtgacccagtcaccctgaatctcctcccgaagctgcccaagccctacatcaccatcaacaacttaaaccccagggagaataaggatgtcttaaacttcacctgtgaacctaagagtgagaactacacctacatttggtggctaaatggtcagagcctcccggtcagtcccagggtaaagcgacccattgaaaacaggatcctcattctacccagtgtcacgagaaatgaaacaggaccctatcaatgtgaaatacgggaccgatatggtggcatccgcagtgacccagtcaccctgaatgtcctctatggtccagacctccccagaatttacccttcattcacctattaccgttcaggagaaaacctctacttgtcctgcttcgcggactctaacccaccggcacaatattcttggacaattaatgggaagtttcagctatcaggacaaaagctctttatcccccaaatnactacaaagcatagcgggctctatgcttgctctgttcgtaactcagccactggcaaggaaagctccaaatccatgacagtcgaagtctctgactggacagttccctgaattctactagtacctccaattccattttctcccatggaatcactaagagcaagacccactctgttccagaagccctataagctggaggtggacaactcaatgtaaatttcatgggaaaacccttgtacgtgaagcatgagccactcagaactcaccaaaatattcgacaccataacaacagatgctcaaactgtaaaccaggacaacaagtggatgacttcacactgtggacagtttttcccaagatgtcagaacaagactccccatcatgatgaggctctccctggatgagggcatggggtaccgagct

SEQ ID NO: 648075 - DNA, 1864 bp, Homo sapiens
  misc_feature (128)..(128): n is a, c, g, or t
  misc_feature (186)..(186): n is a, c, g, or t
  misc_feature (424)..(424): n is a, c, g, or t
  misc_feature (458)..(458): n is a, c, g, or t
  misc_feature (1228)..(1228): n is a, c, g, or t
  misc_feature (1307)..(1307): n is a, c, g, or t
  misc_feature (1333)..(1334): n is a, c, g, or t
  misc_feature (1381)..(1381): n is a, c, g, or t
  misc_feature (1384)..(1384): n is a, c, g, or t
  misc_feature (1403)..(1403): n is a, c, g, or t
  misc_feature (1411)..(1411): n is a, c, g, or t
  misc_feature (1416)..(1416): n is a, c, g, or t
  misc_feature (1419)..(1419): n is a, c, g, or t
  misc_feature (1427)..(1427): n is a, c, g, or t
  misc_feature (1443)..(1444): n is a, c, g, or t
  misc_feature (1449)..(1449): n is a, c, g, or t
  misc_feature (1461)..(1461): n is a, c, g, or t
  misc_feature (1468)..(1468): n is a, c, g, or t
  misc_feature (1499)..(1499): n is a, c, g, or t
  misc_feature (1774)..(1774): n is a, c, g, or t
caactaacaaccgtactcaaaaaacttctagatcctaagcttatctccacaaaagagaacacacaaacagcaaaaaccatagggcccctctcaacccctccctgcacacacctcatcacttgaaaaanggtcctgctcacaacatcacttttaaacttctgaaatccgcccacaactgcccaaatnacaattgaaacccagccacccaaaatttctaaaggaaaaaattttcttctacttttccacaatttaccccaaaatctttctggctacatttggtacaaaaggcaaataacatacctctaccattacattacatcatatgtattaaacggtcaaaaaattatatatagacctacatacaataaaaaaaaaaaaatatattccaattcatcccttctaatccaaaatttcacgcaggaanatgcaggatctacacttacacatcgtaaaacgangcgatgggactggaggagtaactggacatttcaccttcaccttatacctggagactcccaagccctccatctccagcagcaacttaaaccccagggaggccatggaggctgtgagcttaacctgtgatcctgagactccggacgcaagctacctgtggtggatgaatggtcagagcctccctatgactcacaggttgcagctgtccaaaaccaacaggaccctctttctatttggtgtcacaaagtatattgcaggaccctatgaatgtgaaatacggaacccagtgagtgccagccgcagtgacccagtcaccctgaatctcctcccgaagctgcccaagccctacatcaccatcaacaacttaaaccccagggagaataaggatgtcttaaacttcacctgtgaacctaagagtgagaactacacctacatttggtggctaaatggtcagagcctcccggtcagtcccagggtaaagcgacccattgaaaacaggatcctcattctacccagtgtcacgagaaatgaaacaggaccctatcaatgtgaaatacgggaccgatatggtggcatccgcagtgacccagtcaccctgaatgtcctctatggtccagacctccccagaatttacccttcattcacctattaccgttcaggagaaaacctctacttgtcctgcttcgcggactctaacccaccggcacaatattcttggacaattaatgggaagtttcagctatcaggacaaaagctctttatcccccaaatnactacaaagcatagcgggctctatgcttgctctgttcgtaactcagccactggcaaggaaagctccaaatccatgacangtcaaagtctctgctccttcaggaannaggacatcttcctggccttaatccattatagcagccgtgatgtcatntcngtatttcaggaagactggnagacagtngcttncanttcttccncaaagtatttaccatnnagctngcagtccaaaantggcttnttgttcaaggagatttatggaaaggtctctnacaaggactcttgaatacaagctcctgataacttcaagatcataccactggactaagaactttcaaaattttaatgaacaggctgataccttcatgaaattcaagacaaagaagaaaaatactcaatgttattggactaaataatcaaaaggataatgatttcataattttctatttgaaaatgtgctgattcttggaatgtttcattctccagatttatgaacattttttcttgagcaattggtaaagtatacttttgtaaacaaaaattgaancatttccttttgcaccctatctgagtcagaattggggaaactatcagggagtattatatgttaaggggaataaagtatttggacaagttc

SEQ ID NO: 648076 - DNA, 1414 bp, Homo sapiens
  misc_feature (128)..(128): n is a, c, g, or t
  misc_feature (186)..(186): n is a, c, g, or t
  misc_feature (424)..(424): n is a, c, g, or t
  misc_feature (458)..(458): n is a, c, g, or t
caactaacaaccgtactcaaaaaacttctagatcctaagcttatctccacaaaagagaacacacaaacagcaaaaaccatagggcccctctcaacccctccctgcacacacctcatcacttgaaaaanggtcctgctcacaacatcacttttaaacttctgaaatccgcccacaactgcccaaatnacaattgaaacccagccacccaaaatttctaaaggaaaaaattttcttctacttttccacaatttaccccaaaatctttctggctacatttggtacaaaaggcaaataacatacctctaccattacattacatcatatgtattaaacggtcaaaaaattatatatagacctacatacaataaaaaaaaaaaaatatattccaattcatcccttctaatccaaaatttcacgcaggaanatgcaggatctacacttacacatcgtaaaacgangcgatgggactggaggagtaactggacatttcaccttcaccttatacctggagactcccaagccctccatctccagcagcaacttaaaccccagggaggccatggaggctgtgagcttaacctgtgatcctgagactccggacgcaagctacctgtggtggatgaatggtcagagcctccctatgactcacaggttgcagctgtccaaaaccaacaggaccctctttctatttggtgtcacaaagtatattgcaggaccctatgaatgtgaaatacggaacccagtgagtgccagccgcagtgacccagtcaccctgaatctcctcccgaagctgcccaagccctacatcaccatcaacaacttaaaccccagggagaataaggatgtcttaaacttcacctgtgaacctaagagtgagaactacacctacatttggtggctaaatggtcagagcctcccggtcagtcccagggtaaagcgacccattgaaaacaggatcctcattctacccagtgtcacgagaaatgaaacaggaccctatcaatgtgaaatacgggaccgatatggtggcatccgcagtgacccagtcaccctgaatgtcctcccgaagctgcccaagccctacatcaccatcaacaacttaaaccccagggagattaaggatagagagcaagagaagtgagacagggacagaagattaaggatagagagattaaggatagagagattaaggatagagagattaaggatagagagattaaggatagagagattaaggatagagggcaagagaagtgagacagggacagaagattaaggatagagagattaaggatagagagattaaggatagagagattaaggatagagagattaaggatagagagattaaggatagagggcaagagaagtgagacagggacagaagattaaggatagagagattaaggataga

SEQ ID NO: 648077 - DNA, 242 bp, Homo sapiens
ttgtgcctagaccaccgaagttatactctcgaactgacactgagccacaacccatacaacccagctctcccataagcttcagactagactacttttccataatattcatccctgatagcattgttctgttacatggtccatcaatagaattctcactgtgatatcataaactcagacccaaacattaatcagttcttcaaatatctcctcatcttccttattaccatactaatcttagttac

SEQ ID NO: 648078 - DNA, 124 bp, Homo sapiens
cacatatcacgccaatgccgtgtggttttgtttgaatataaattggtgaaagtgttggtttgtttaaggcagtaatttttttgtttgtttttatgcgatttcattccatcttgagcctgtgtct

SEQ ID NO: 648079 - DNA, 211 bp, Homo sapiens
  misc_feature (182)..(182): n is a, c, g, or t
attcctcagttgaagaaggcacaggctgctgcaaacaagaaacagactccacgacgttgggtccctccctccgggcaaaccagccctgcaccccgggacagccctaaactcgactccttttcagaaagtacgctgcagggccaaggcgcggtggctcacgcactgtaatcccagccactttngggaggcccaaagtagggccagatccacg

SEQ ID NO: 648080 - DNA, 408 bp, Homo sapiens
  misc_feature (15)..(15): n is a, c, g, or t
  misc_feature (17)..(17): n is a, c, g, or t
gacctagaggatccncngctgctcccctcttaactgtccttgctcatgcctgcctctttcacttggcaggataatgcagtcattagaatttcacatgtagtagcttctgagagtaacaacagagtgtcagatatgtcatctcaacctcaaacttttacataacatctcagggggaaatgtggctctctccaccttgcatacagggctcccaatagaaatgaacacagagatattgcctgtgtgtttgcagagaagatggtttgtatgaagacgtaggaaagctgaaattataatagagtcccctttaaatccacattgtgtggatggctcttgccgtttcctaagagatacattgtaaaacgtgacagtaagacattctagcagaataaaacatgtaccacctttgct

SEQ ID NO: 648081 - DNA, 196 bp, Homo sapiens
ccccccgggggtttttttaaaaaatgggccccgcccccgccggggggggggggggccccccccccccccccccccttttggggggggggggggttttttcccccggggtccccccccccttttttccccccccccggggaaactttcccagggggggggaaatagggggccctttttccttttcccccctttttta

SEQ ID NO: 648082 - DNA, 1189 bp, Homo sapiens
  misc_feature (902)..(903): n is a, c, g, or t
  misc_feature (907)..(907): n is a, c, g, or t
  misc_feature (914)..(914): n is a, c, g, or t
cacttatgtaaacaatcagaccacatttgaagaaactccacctattttgcaaacaaacttattctactgaaattatcattggtaaaagtagagatgcccatagagggaaaaattatgtggaaaataaaaactgtagtatacctgttatgagactgcagctctgttcattgtttctgtgtttttattatccacctgtagactggacagttccctgaattctactagtacctccaattccattttctcccatggaatcactaagagcaagacccactctgttccagaagccctataagctggaggtggacaactcaatgtaaatttcatgggaaaacccttgtacgtgaagcatgagccactcagaactcaccaaaatattcgacaccataacaacagatgctcaaactgtaaaccaggataacaagttgatgacttcacactgtggacagtttttccaaagatgtcagaacaagactccccatcatgataaggctcccacccctcttaactgtccttgctcatgcctgcctctttcacttggcaggataatgcagtcattagaatttcacatgtagtagcttctgagagtaacaacagagtgtcagatatgtcatctcaacctcaaacttttacgtaacatctcaggggaaatgtggctctctccatcttgcatacagggctcccaatagaaatgaacacagagatattgcctgtgtgtttgcagagaagatggtttctataaagagtaggaaagctgaaattatagtagagtctcctttaaatgcacattgtgtggatggctctcaccatttcctaagagatacagtgtaaaacgtgacagtaatactgattctagcagaataaaacatgtaccacatttgctaaaaaaaacaaaacaccanncacnacaaaanacacaaaaacacacaacaccccacaccaccacacataacacacaacgaatcctctactcactcccacaatcaaactcataaaacacactcaacacacatcccatacaacacttatccttgcagtcccactcccctccactcaccattctgtgctcctcaacaaaaaatccctctcctcacgccccaacaactacctgattacacaagacacacaacacctatgagactcaataacacacacacacctcctccccgtaccatagccatcttaatct

SEQ ID NO: 648083 - DNA, 394 bp, Homo sapiens
aacccccccccgaggtttttgttcttgggggcagggcccgggccccaagttttcctttttggggtccccaccccccttaaggaaggggatttttttccccccccgggcctgggaattttgggcccccccttttttaggggcgggaaattttggggggggggggtttagtcttacccccccccccccccggttccaggaaggtttttaacttttcttttcccggccctaggggacccctggggggttaaaaagggcccccccctaccgtttttccttaaccccctttttttaagggggagccaaggggggagatttttttttgggggggggggccggggtttcccgggggccaaggttttttgtttttttggcccttaacttttttttagtttta

SEQ ID NO: 648084 - DNA, 1566 bp, Homo sapiens
  misc_feature (1004)..(1004): n is a, c, g, or t
  misc_feature (1083)..(1083): n is a, c, g, or t
  misc_feature (1089)..(1089): n is a, c, g, or t
  misc_feature (1100)..(1100): n is a, c, g, or t
  misc_feature (1150)..(1150): n is a, c, g, or t
  misc_feature (1201)..(1201): n is a, c, g, or t
  misc_feature (1476)..(1476): n is a, c, g, or t
tgaattataaaaagtttgtaaaaaaagaggatggtaaggtaggaattaagggatagagagtgaaagagtgataagagagattatggataataggataatataaaaagaggagaagaagaaggaagaagagaaaatggggaaaataaaagaaacttaatgaaaaaagagaataaaatggaaggggatcatgataaaagaataaattttaaaattttggaatatgcacaaaaatgctgaagttacgattgaagcaagaataaaagtttttgaggggaaggatgttattataattgttaaaaatttgaaaaagaatattaatggataattatggtaaaaaggggaaatgaaggaaatataaaattaaattatatagtatatagttgatggtaaaataattatatatgggaatgaataaagtggaagagaaaaagtatattaaaaagaataaatgatgatatagaatgtaaaaaggaaggatgaaggaaaatacaaattaaagataataaagagaggtgatgagactagagaagaaattcgacatttcaccttcaccttatacttggagactcccaagccctacatctccagcagcaacttaaaccccagggaggccatggaggctgtgagcttaacctgtgatcctgagactccggacgcaagctacctgtggtggatgaatggtcagagcctccctatgactcacaggttgcagctgtccaaaaccaacaggaccctctttctatttggtgtcacaaagtatattgcaggaccctatgaatgtgaaatacggaacccagtgagtgccagccgcagtgacccagtcaccctgaatctcctcctatggtccagacctccccagaatttacccttcattcacctattaccgttcaggagaaaacctctacttgtcctgcttcgcggactctaacccaccggcacaatattcttggacaattaatgggaagtttcagctatcaggacaaaagctctttatcccccaaatnactacaaagcatagcgggctctatgcttgctctgttcgtaactcagccactggcaaggaaagctccaaatccatcacantcaaantctctgcttcnacaagaataggacttcttcctctccttaatccaacatagcagctgtgatntcatttctgtatttcaggaaaactggcaggagatttatggaaaggtctctnacaaggactcttgaatacaagctcctgataacttcaagatcataccactggactaagaactttcaaaattttaatgaacaggctgataccttcatgaaattcaagacaaagaagaaaaatactcaatgttattggactaaataatcaaaaggataatgatttcataattttctatttgaaaatgtgctgattcttggaatgtttcattctccagatttatgaacattttttcttgagcaattggtaaagtatacttttgtaaacaaaaattgaancatttccttttgcaccctatctgagtcagaattggggaaactatcagggagtattatatgttaaggggaataaagtatttggacaagttc

SEQ ID NO: 648085 - DNA, 274 bp, Homo sapiens
gaacaggcctccatacgtgttcatagccctgtgtagtaacgcgccttgaggttgtgcagcaccgagggttcgttgaggcacgtgagctctgtcatgtcctccaccttggagcaacctgggcgggcttcatctgtctggatgtcatccttgttcatcttcaccttcttccccttctccaccagctccacgatggcctcttcgcccagctcctccttaaggctggctgggcccaagccactcttgtctggaaggcatcccccaacaatgcctcgtg

SEQ ID NO: 648086 - DNA, 301 bp, Homo sapiens
gaacagatgcatgaatttgcaagatttcagagtagcagctatatacccatcctagggatcaggagatagagattgtaaacataggataggtactgcttattggatatacttcacataagtatgagagccttcttttggtgctctagagtaggaaattaccacttcctatcggcgtgtgtgttggctgtcttcctcctctgtgcctcaggcccttcagtctgtgacaatggggtcacagcatctgcctctcagggtcagtgtgtggtgtcaatgtgagcaaggcgctgaggcttgggggctc

SEQ ID NO: 648087 - DNA, 790 bp, Homo sapiens
gctgatactaagagcaccgatctgtgggcagggggctgcgtctatacttactagtcttgtgaacaatggggaaagaactggtgggtttgttgcacaaagatctcctgtggtgcggaggtccctgactgtcgtattgccccattccaggagagggtgttgatctggtgtgggggaatgctgtgggcgtgtctatgagctgggacagacgaacaaagttgactccgacattgatgtgacgacataggcatagtcgccaattcatatcatcgtggggagtcctagcactatcgcgacatggggcgtaagtttgtatcatgactgtccagagaacagtttcatgctggggttttcgctacacagtcgtgattgataaaccgagatctttattgatactgttgactgaatgaaattaccctgaccgcccgatgggatcactagcagtgcagccctacctgggactgatgataggtggtggtcctgggggcaagcacaattttcggcaccaccgtagtgtggtgggtggacggctccccagctacacagccagggtgtttggaacgtaggagtgaaggaatcctagtagggaaaaccagaaggtcaccctgtggggggacgcggtggagcgtatgcatcagagtggggcgcccttccacagaagatgtgctgaagtgtgatcgattgtaaccttacccaaatgtctggggggacaacggatgcgtgtccctttgcttcacaggatccacgctgagtcccctggaggggtgcaacaaatcgggttgtgtagtaccac

SEQ ID NO: 648088 - DNA, 256 bp, Homo sapiens
tccattcaggaaagtactctcgaaccagctcggggtctcctcgcggccaggatccagtttccgccaggtgtatgactcgtagtccaccggccatctggactcagcggaaaggcaagctccgggcctcggaagacccagactccagaaagggagctgctatggtgggttccaaaaaggatgacacgggcgaaggcattcttcctcagctggtccagtcgcgggaacattccagtgatgagatggcggtacggagctc

SEQ ID NO: 648089 - DNA, 421 bp, Homo sapiens
ttaggggcaagattctgcctcaaaaattcctcccttcaggggtcaaaattggaagacggatggtggtaatccccaaaatcatggtagctcccaccacctccaaaatggcttccatcataaccaaatccataatagccatccccatggccaaccaatatcaacaaccaccaagggttgccaccaaaagccaccaaggacaatggaagtttcctcaacggaccggaggtggtcatccccaacggaaaccacctccaggaccaaccaccaaagtttccagaaccacttcgacctcttgggctggatgaggcactagccatctctggcttggaaaggggctttctaacttcacagtggtggccatccacagtatggtattgctgaatgacaatctaatccagggagcctgggtcgtcaaagggta

SEQ ID NO: 648090 - DNA, 136 bp, Homo sapiens
gactatggggtcatcaagagtgacttgttccagagtgttgccctctttgaagtgcaaagacattgacgcagtgcaaagtgaccctgatggcttatgggcagcttggcagtgaccaagaatgatgggcactaccgtg

SEQ ID NO: 648091 - DNA, 780 bp, Homo sapiens
ggagagagagaactagtctcgagtttggtttttttttctattttttttaaaaaaaccctgatccttgggggggggtgggtataatactaaattggaaataattatatattaccggggaaagggcccttttgtagaagttaggcgcctatatttcctcttatgttccttctcgtaccagggtgacgacaatttgcgaagataatatagaaacccagcccttggattaacctccgggctctagaccctcagactcacggatagagacgttaaatctcggtgtagaaacaaacgaaacccctttataatatagcgcggcgtgtgaacccacatcccgggaaatatgctccttgatctcacaaacactcagaggagcccgtaaaacaccaccatatatgtgtttgagtatatatgtgagcctctctagtaagacacataggaggatttctcgcgcgccgtggataaaacatcccccataggaggcaaccgcgtgtgatcccccggaatatagttacaaagtctacaagtgtgggactctcccagactgtggggagtcttatttgaggcgtgaagccatcagcgcctttatgaagaaagtgtagcgtgtggaaaggttttctcagaaacctgagtatgtggaaccgtgaaccatcgagagaggagtaattcgggagaattatatgtggggccccgccgagagggcaccgccccccccaacccgcgggaaaaattctcttaaactgcatcgcggtatgttcggggaacagattatcaacggacacc

SEQ ID NO: 648092 - DNA, 1455 bp, Homo sapiens
gcagaggggtccatacggcgcttgttctggattcccgtcgtaacttacaagggaaactttcacaactgtccggagcccttgatgctcctgcaaactgaaggaggaggactgtccttaagcttccttgcagcaggaacccacttagcgctggcaccaatcttgacttccagcatggaacacgtacatctactaaacaggcacaacagctgatggccactcctactactcactacaatcctcacagaggcacctggcgagcaaacgccttcctgcctgcgccacgcctcgctgccacacctctgcttgccactctgaaaaccctgcgtgaatgctcagctgcttactactccctcccagcgcaactacctggccccagcagcgcgacctgctgcctgcaagctctctgccgtgcctgcccacctgcgccagcccacctccgaaccttgcctggcccgcctctcaccctccttgcgcaaccccttcacctacaccagcactccacggccacgcccctttcccgcgcgacgccacgcgcccctctcctctgctggctctacctgaaccccccacgggccctgcacacaccaagcccctcttcaccggcaggcgccactcctctactgctctcacaccctacccctacccaacttgccgcctgctgctacacaccacgcacttcatcccttctgccgcctactgctggaccactctggccactcctccattcgcaacaaaccaagcgcgcacgcctcaccttcagctgcgcgctctctgaacctgctgcgctgcgcactgccctgcgcctccgcggcaaggttaccttgccggcaattgccgcgtgggccacccacttcttcccccgctgcgaacccaccccccactgcgggcatgcgctcaccttgccccttgcaccttcctggcttaccttttcctacccaccacgcaatccctggcccgtagccactttgcctcccccccaccgccagccagcgccctctgcctcgcctgtgacccaaagggcccagcctgacacccaaacgcggcacagcacactttccacacgcgaccgcatcaccttcggcaccctgcgctccccaggctccacggacagctatcaacccatggcctacattccagccccctgagcaacagcgcgcgacaacccgcggcccctcggacacggcgcggcacccgcgctgcccccccccggcgcccctcactccgcccacctcccccttacctgccacaacgggacacacatcccccagcacccggcaccacgcaaccaaccggcctctgcgacctccaccacgacactcacagccccaccgatactgcgccgccagccccccccgcaccgtgcgcccaaaccgaccggcccaaagacgccaacgagcctgccaacgggctgccgcgccatcaaagcacccccgcacacagcaccacaccgcgcgc

SEQ ID NO: 648093 - DNA, 269 bp, Homo sapiens
accccttgggggggggtgggcccccaatggggttttttccccctcggggccgggggggccaaaggggaaaattttgacccccgttaaattttttttaaacggttttttaggggccccgttttgggaaaaccccggccccctttttttttgggggtttggggaaaatttttttggttgggggaaaatttgggggggggggggggggggggggggtttttttatttttttttgtccctttgggcccgggcccaaaaaaaggccccccttta

SEQ ID NO: 648094 - DNA, 279 bp, Homo sapiens
accgtcctggctgacatggtgaaaccccatctctactaaaaatacaaaaaaattagccgggcgtggtggcaggcacctgtagtcccagctactcgggaggctgaggcaggagaatggcatgaacccaggaggcagagtgtgaagtgagcggagatcatgccactgtactccagccctggtgacagagcgagactccgtatcaaaaaaaaaaaaggaaatgtcctgaatatgaacttgggacaaagcaaggaagtttttacttactaaattttctaaatt

SEQ ID NO: 648095 - DNA, 481 bp, Homo sapiens
ttttttttgagagggtgtctctctctgttgacaggctggagcacagtagcacgacctcaggccactgcaacctccaccttctgggttcaagagattctcctgcctcagccttccaagcagccgggaccacaggcgcatgcaccacgcccagccaacctttgcaccttcagcagagacagggcttcaccattgccggccaagctggtctcggtctctttgaccctgtgatccacccaccttggccccccaaagtcctgggattacaggcgcgacgactgtgcccagccccggctcaggtttttcaatacagtcttgaccttggcattcagtatcctcacagcatggttctaattaactttctagctctatttcccttttcctgctccctctctctacaactagtctttctctgattgccccgccctcaacccatctaaactagaccccagggaagcaccttggtccccttcctctctcccac

SEQ ID NO: 648096 - DNA, 912 bp, Homo sapiens
  misc_feature (319)..(319): n is a, c, g, or t
ttgcgggggcctcgtcgccatatatttgggaatctcgaattctgttgaaggggaacccccccggtgtgtcccgcacgctggagccgccctgtaataagtgccagccactctttggtgtggcgacgcccctttaggaatgggtacccttgtgggccccctccccaccgccgctggggagtagatctgtctctccctcgcgggggcccccctcttttatagttgtcgctgtggcgtcgccgaggacactttgtctccgcccggtccgctctctctgccccgcgttgtctagggccatatacacacgcacgggggccgcccnagatagggccctctttttcttcgaagatggtttggggccaccccagaagtttttgtatagttccccgttgggccacggggcatttctgtgaggacgcccatgaactcatttcgtggacccttgtcctctggggggcgttattaaccaggccccccccctgctccctccccgcgggtcgggcgcacccgagcgtcctttgcattatgggtgtcccgggacccccacggagttttttcgggggcaagggtcgtccccttgggcgcaatccccggcggagtggacgtccccgttcttgagaagagcgtcctcctgttgggcggttggtttctcccgtatggaccctgcggttccccgtcacccccggtgtttgcccacgaagggcaccccgccccctcttttctcccgggggtccctgtgttcacggaaagtggtctgtgggtttgttggccccacgcccttttcccccggtaccccaaatttttgcccctttccccaaaccccgggttccatttgaccttgtaaaaaaaattgggggttttttttttttttttggcttgttttttaaataaacccaagtccaaaacccaaaacca

SEQ ID NO: 648097 - DNA, 1943 bp, Homo sapiens
  misc_feature (1132)..(1132): n is a, c, g, or t
cctgctctttagtgtttcgtacggttcgtccaccacgttgtgggtcccagtaaacttcccgcgggctttgttgatactctcggtccgtcgtccttgctatttattttccccgtgtgctctatactggtttcgcgcgcgtcgtctctcggggtggggtgagttcgtttcggccgaccgaagtcggctgtataggatcctcagcccgccacatcggaccggtctgtcgactacgaagtacactctcgcccttccctttttctctaggtagtgcgcgcgccgcctccatataataggggggagcgtctctcctcatcgtaggagaaagatctggtggtgtagtaataacaaccaacggtttgttctggttagaagaagtaataggagtttgttggtggttgttaataaagtagttttggatagatagccaaccaccctcgctgtttaagatgtggttctcaccacatatgttgtatgaaggaaaatattgtgggtggtgagataaatagcacacacccgtttgtgttctctacaccatcgggggtgccgtccccactaaggggtggagcccccccgctaaagatgttggcaactatctgtcgtgataaggggtgttctcttcatcaacaaggggtgctttctgtgtgtgtttttttttggacatgatgggtagaagtttcgtcttgttctttggtatatatttttgtacgcacgataataattgtagattagtagatcatattggtgccccactacgtgtttgaggaaaaaatgtttttcgtcatagcgtgtggattttgtactctggtcgtagaagatgatatgtttctcctacgaggagatgttgtatataaaattagtcgcgccgccttcggtgatcttttattataattcttgttcctccaccgacggtggcaccaacatacgtggtgagtagttctgttgtatacccccgcggtggggagacgacgacaacatagtgttgggttggtgtctcacccactctggtgtttccctcacataagttggccgcacgacaccccgcactgagttttttgttgtgtagtagtcttctcacgccgctgtgggagtgtgtctcatcagagcagttttttctctcgcactgtggggtttnatacctcctgctgtctgtgtgctgctttgtgtgtgtggtgctgtggtgtgttgtgtgtgtgtgttttgttttcctttgtaaaatacacgcgcctccactgccactactgtgcttactagagaattattactggggagatagacgacgctctgctgttgagttatagtggtgtcctccagccacactcccacagcacaggggtcctctcctctctcactatattgctctctgcagcagagagtatagaagatagtagtgttgtgagaaatattctactatgaggaccctccagaagagagtagggcgacacacacacacacatagtgagactctgtgatgatatagagatagtgtggggtgtctcacagtgaaattagtgagagtgtctcacagcagacacgccagcctgttgtggaatatagacacacatattgagaatataggagtgctgtgttccacacagtctatgtgtgtgagtatctcgctctgctctcacactagagaggagtgtgtgtgttgtgcgttgaagaaaatagatatataaaatgttctgtatagaaaagaccctccacgagtgtgtgtgaaatgtgtggagacagacgtctcactgggagagctgttcactgggtgtatagagccacgctagagtttgtgtggataaaccccctccgggggaacgcagaacacacgcgtggctatataagtgtgtgacacgagactgaggggataatggaccccccctccccaaatttgttttaagtttcagacgttctcaattaggggcccaatttataagtgctattttggataa

SEQ ID NO: 648098 - DNA, 688 bp, Homo sapiens
ggttccagattctccttgatgcattgcacaagattaagacaaagggcaaggtaggcgcccttcaatcaaaagttggacccgacttcctgcctgttcccggcatgccgggtactcctgactctaccagggctcattcaccacgccgtccctcggagaacatgccttgtgtgcgccttgctgatgagatgagtagccccagtgtaacctgtgcagctcctgactctgcactggccaggctgcggacgctccgccttcttccagatgcgtgtatcaacttgacccacctcgagtgcctctttgtggctgcattttggggaccgtccacatggcttttcagctacagggtgatgaccagtgttccctgcaaaactgggtgtggctgggattcttggcccctctaccggacagtgctccctgaccgattgatagagctgcggtcctgtgcgctcctttgctggggctccagttcgtccacgtctattgcattcccttccgcccaggcgctcctcgagtgtcgatgagcattgtggtccccaccgatgtgggtgactttgtgggctaggagtttgccttcgacgaaagttctgcatctagactgcgtttgatttcccttccgatctctgtagtaattccctcttccctatacacgttgaccttttgggctatgtttcacaaggaccacgactcg

SEQ ID NO: 648099 - DNA, 198 bp, Homo sapiens
  misc_feature (86)..(86): n is a, c, g, or t
  misc_feature (136)..(136): n is a, c, g, or t
  misc_feature (186)..(186): n is a, c, g, or t
  misc_feature (197)..(197): n is a, c, g, or t
gactacactgtgtttgaccgtgacaacaacagggtgggcttcgcgacggctgcccgcctctagttcccaaggcgtccgcgcgccanacagaaacagaggagagtcccagagcaggaggcccctgccacgcggcccntcccacacacacccacacactcgcccgcccactgtcctgggcgcccttgnaaacccggggnc

SEQ ID NO: 648100 - DNA, 128 bp, Homo sapiens
acctgccctcatcatagtgccccagtgtgcgctcacgcggcctcatcatagtgccccactgtgccctcacccggcctcatgatagtgtcccagtgtgcactcacctggcctcatcatagtgtcccaga

SEQ ID NO: 648101 - DNA, 464 bp, Homo sapiens
ggctgcgctccgagcccccttttccctccatggtttcgtctcctgcatcccgctgaagtaacgttggcatccggggggctcctgctctgcctgccctgcatctgcctgacctgccaccccaggaccgctgcctgtccggccttcctgcacgctagggcacaaacctcttttccgaacgcgcgccctctcgaccttgcagacaaacgcccggggaccggacacttcttccacacaccagtccggcgcacccgacctgcgtgacacagcttaacgttatgaaagagtgcggcggaccgaagcgcggacaccagtcggcacactgaaagcagtgcaggaatccaaaacatgggaagcccttgagagaaaacacggtaccctccgtgcaagacctgtttccgaggcaactgtgctcatcgtggacaaaattggctaaaatctactcttgcatggggaaaaactcggac

SEQ ID NO: 648102 - DNA, 188 bp, Homo sapiens
acaaagaccaagctctcaactaacatacgctgccacattctatgagtgccataaaagcagcaacacaggaaggggagcaggactcaaggaccgcagccctgggcaaaagaagtgtcaacacccaggccaggcacaggcaacatcccagcgagcagtgtccatgtccgtggcaagcccaaaggcaggca

SEQ ID NO: 648103 - DNA, 344 bp, Homo sapiens
ggctgcaaggatattcggctacgagtcctttggccctcccaaaagtgttgggattacagttgtgatgccaccatgcccagccctatttttgaaattttagttatgttaaattaaataatagatactcattaaatagctgggttatttccaatttaaaacgtatgttttagcccaggcactgtgctcacgcctgtaattccaatactttggaaggccaaggccggtggctcacccgaggtcaggagctcaagaccagcctgatcaacatggtgaaaccccatctgtacttaaaaatacaattaaaatagccaggtgtggtggtgggttcctgtaattcccagcta

SEQ ID NO: 648104 - DNA, 443 bp, Homo sapiens
attctttttaggtttcatagaaagactaaattagccaggtgtggtagtgcatgcctgtagcgtcagctactcaagaggctgaggcaggaggatcgcttgagcccaggaggttgagactgcagtgagccatgatcatgccactacactcccacctgggccagagagcaagaccctatctcttaaaaaaataaattcaggccgggtgcagtggctcatgcctgtaatcccagcattttgggaggctgaggctggtggatcgcctgaggtcaggagtttgaaaccagcctggccaaaatggtgaaacccagtctctactaaaaatacaaaaatgagctgggtgtggtgacacatgcccgtaatcccagctatggttttttgtgtttttttttttgtatttgtatttatatttttttgagacggagtatcgctctttcacccacgcc

SEQ ID NO: 648105 - DNA, 225 bp, Homo sapiens
ctgctgctgcggtcgcctctagcaggctccccccgctcccctcggacacctcgcttcacagccgggtgctgtgtgtgctgtgcgtttgtgtgtgtgctgtgctcgtgtgtgtgctgtgttcatgcgtgtgctgtgtgttgtgtgtgtgtcgctgcggggctgcctcccgtctgcgtgctttttcggctgggaattgcgctgtccgctttgccgcaggtggcagcg

SEQ ID NO: 648106 - DNA, 777 bp, Homo sapiens
tgccccagtcagttccttgtggagccggaactgggctgctgattcgcctgaggcacctgagtgcactcagaggaggcgccatgtcagaacctggctggtggatgtcctgtcagaacccatgctggcagcaaggcctgccgctgcctcttctggcccatgtgtgacatgctgagcatgctgagccgctgactgtgatgctgcataatggctgggctgcatccaggaggccctgtgagcgatggaacttctgactttgtcacctgagacaccactggaggtgtgacttctgcctgggagcgtgtgcggggccttgtgctgcccaagctctaccttcccactgtgtgcccctggctgaggccgggatgagtttgggatggagtgcaggcggcctggcacctcacctgctctgctgcatgtgttgacagcagaggaatgaccatgtggacctgtcactgtcttgtacccttgtgcctcgactcaaggggagcaggctgaagggtccccagtgtggacctggagactctcagggtcgaaaactggcggcagacccagcatgacacgatttctaaccatccaaaacgccgggcttgatgttcttccaatgaggaaagccctaatcccgccacctaggaatgcctgcagtccatggaagccgcgatgggcctcaatggccgctcataatcttctgccttagtctcaggtagtgtgtcttaatatatttgtgtttagttaacacttctatttcatccctggcgccttgcccgcttggataaattt

SEQ ID NO: 648107 - DNA, 230 bp, Homo sapiens
ccatgcacagttggtggatacccacgtgatataaaacaaatgtctacacaaaaagcttgtgcacagatgttctttgcagcattattcataatagcccaaaattgaaacagccctaatttctatcatactaacaagtgaataaacaaaacgtggcatatccattacaaggcaatattattcagcaataaaaataacgagatgacagtacctgcatatgcaccacaacatgg

SEQ ID NO: 648108 - DNA, 313 bp, Homo sapiens
  misc_feature (24)..(25): n is a, c, g, or t
  misc_feature (72)..(72): n is a, c, g, or t
  misc_feature (215)..(215): n is a, c, g, or t
  misc_feature (279)..(279): n is a, c, g, or t
  misc_feature (287)..(287): n is a, c, g, or t
ttttgtattctctacaatataaannaaagcactcaagaaatacatagatgaaaatgagttaagagcattatntataaagtaaaatataaatgagttcaggcatggtggctcatgcctattatcatagcatcttgggaggctgatgcgggtggttcacctgaggtcaggagtttgagatcagcctggccaacatggtgaaaccctgtatctactantacattagccaggagtggtggtgcatgcctgtaatcccagccactctggaggctgaggcagganaatcgctngaatgtgggaggtgggctgcagtggc

SEQ ID NO: 648109 - DNA, 308 bp, Homo sapiens
aatacgagatatcagtgaagtcattgctcttggtgtgcccacatcctcggacttccaatgcagttcagtacgaccaaaggctcttcaaccagtccaaggtactacgcgtctaggaaaatgcatgtcttaagtgttgatgtgaataccagtcctcagggacaagaaaattaacgtatcattggcttggatcagcctaaaatatgctggcatagtgacaggaaaacaattggaagttgcatgttgtaacttgagacagtagaacatcagttctgcatttgacctcttagaattcagccaagatttgaggc

SEQ ID NO: 648110 - DNA, 174 bp, Homo sapiens
agtgttgcagggccccagaggccgcagtctctgcttcactctcagtagctgcacgtgcacaggtctcaggcgggggcaagggggcagacgggagcaggcagtgagtccggaacgcacgtgtgagagctccctggaactatcctggcacttaccctgtgagtttgcaatagtatt

SEQ ID NO: 648111 - DNA, 1665 bp, Homo sapiens
atcaaagcccaggttcaccgtcctcccccaaacacacacacacacacacacagcacacacacacaaattaaggtcggtgcaaccatgcagcgagcatgagagagaagtaagcgttcgtggaggggatgaaaactacccatcatcatacagcgatgtgacgtccagattcataacaatatcaacctcgtgatgaccgtggctctcgatgaaccgcctcttgttctgtgacgtcgtggtgacccttatcacgaccacctatccttcgtagggtgactcagacggagacccaatgacgacatcagaagcgtcatccaaagagaagacgcagtccaacatgaggagtgaatacatgaaggaacgccacccagtgagagaagcacgatacaacggactggcacaatacagtgatgcatcgagtggcggcagcacaagcaggacgtcaaccacacagcagcactcacacggaagcagcacaatcaaacaaatgggggcagatgacatcaaacggtcgataatatgcagaaccacgaacagcaggagaacacaacacaggaacataggcaacgaagagcgacaaccgcatgagaatgaaaaaagaaagacaaggagacaatccatggagattgcctacgcgccgcacccgaaggcaacacacacataacaacagccactacaaccaatcgagtggagaacaacagcgccagaggctgcgacagccctaccaaccgaacacgttccccaagaaccgcgccaaccctaccacacaaggcccagacgaggacagcagtgaccaccaaatacaaataacagaagtatggacaacccgacagtagaacaacacgccaagaggagcaccacagatggaataaaagaaagcgagtagcggtacgaaaccaggctagtaatgaagacatcacaggaacaaaccaccgcatgaagagaaagaaacaacacgaagagacgaaaaacaacaaaacagcagaagccgacatggaaaccaaaacggaagggacacaacggacaaaatacaccagaggtggccaacaaaacagtagagaccccagaaagaacacggcgacaagcaagaggaaaacagggagagcacagccacaccagcagccggacgagacgaacacgacacgaacgagaatagaaggaaccagactaaccatccaagagaatgcaaaaagaacaaacaaaccatacaaccacaggcgtcgtgtggacagtacgtcaattgacactaaacaaccagcgagcgagcacactcatgaggcgcaagacacgccagctgcgaggacggacgcgtcagcgccgacaccataaggaactggcaccatacgactacacaccaacacaacacaccaaacaaacgggacggagacaagagaaaccactacgcgcacagggagcgtcgaccacacacagcgaggagacgcacgacacgaactcaccaccacgacagcacgcagcaacacgcaaaacgcacagcactgacacaagcaagacacgacagacaacagcgatacggacacgcacagcaccaccccaccacaagcccgatccacacaacgacacacggaccgagaggaccgcacgcccacgagagagagcgaacacgtagaccaaagccgaacaacagagacgacgcgagccagcaagtac

SEQ ID NO: 648112 - DNA, 121 bp, Homo sapiens
gtcttgaggtccctggcgcacctgatggactgcatagctgcatggatctcctctgtgctgtcacctcctctgtgctgtccacctcctctgtgctgtccagctgtccacctcctctgtcctg

SEQ ID NO: 648113 - DNA, 372 bp, Homo sapiens
cccttaccctgtgtttaaaaagtttttgtcccaagccggcggcgttccgggctctcctgcccacaggatgaacattttcggcttccttaggagttttgcccgcccgtattccaaagcgtgtggtggtttctcatattgtttgtaggcccccccagcccccagtttatgtgtgggcttttttctatgaaaaatgatgggttttgccacttcccgtgccaaagttttattgtaaatgttttttgtgctttgcattcacaggggccacgttggtgcaattgtttcagtaaaactggtttgatttttaaaatgttcctgtaacatatcttttatgaacaaatttgaacaatttgtgaaataaaacattgaaaacca

SEQ ID NO: 648114 - DNA, 223 bp, Homo sapiens
gatccagaattgatccttgaacacctagaaaaggaagcagcctactcttctatcatggttcgctcaactagaaaaaacgttgctcaaagggcgatatcaccgtatgaacagatgacggctatcaccagccattaggaaaatacaaaacaaaaccacaacgcaatgccacttgccactcattaggatgcctcttgctttcattgaaccacctgaaagctaagaa

SEQ ID NO: 648115 - DNA, 961 bp, Homo sapiens
  misc_feature (875)..(875): n is a, c, g, or t
  misc_feature (919)..(919): n is a, c, g, or t
  misc_feature (947)..(947): n is a, c, g, or t
  misc_feature (957)..(957): n is a, c, g, or t
tgaattataaaaagtttgtaaaaaaagaggatggtaaggtaggaattaagggatagagagtgaaagagtgataagagagattatggataataggataatataaaaagaggagaagaagaaggaagaagagaaaatggggaaaataaaagaaacttaatgaaaaaagagaataaaatggaaggggatcatgataaaagaataaattttaaaattttggaatatgcacaaaaatgctgaagttacgattgaagcaagaataaaagtttttgaggggaaggatgttattataattgttaaaaatttgaaaaagaatattaatggataattatggtaaaaaggggaaatgaaggaaatataaaattaaattatatagtatatagttgatggtaaaataattatatatgggaatgaataaagtggaagagaaaaagtatattaaaaagaataaatgatgatatagaatgtaaaaaggaaggatgaaggaaaatacaaattaaagataataaagagaggtgatgagactagagaagaaattcgacatttcaccttcaccttatacttggagactcccaagccctacatctccagcagcaacttaaaccccagggaggccatggaggctgtgagcttaacctgtgatcctgagactccggacgcaagctacctgtggtggatgaatggtcagagcctccctatgactcacaggttgcagctgtccaaaaccaacaggaccctctttctatttggtgtcacaaagtatattgcaggaccctatgaatgtgaaatacggaacccagtgagtgccagccgcagtgacccagtcaccctgaatctcctccgctcttatttaatggacttgccacaacaggaaacantgagggaaaaaggggggcaaccatggaaaacgtggggaagtttnttgacggacaggaaattgggcattcagncttttctttnacat

SEQ ID NO: 648116 - DNA, 311 bp, Homo sapiens
ggattcatacatcatattctggactggctgtgagtgccttccaggcagggaatgccatagcaatcatggatccttggtcacctgcacacagtagggcgctgtcaactgtttgcgaaaacaatatgatgtgtgctgagcatgggtcccttttgcaatgcgatgtgcttatagctattttggggtgactagtttttcttttattattcttcgtgaagtgtattccaaattccttcacagctgctcaatggaggctcaccagtgctcaaaggagggctccacagtgctggtgtaccgtgagctcgaaattcgta

SEQ ID NO: 648117 - DNA, 764 bp, Homo sapiens
  misc_feature (764)..(764): n is a, c, g, or t
taaggctcgccgagcggcgaggcgccgcggacggctctgggactcgtctggcgtcctcagatgcggggagaggcctggaccttggcgcacacagacccaggagcagatgagcacggatgtctgcatccacacctggcgtgcacctactacctggagcccaagaggcgatgggttactggcacacgctgtcgcttaacatcgctgtcgcgtcaggtgcatgactgacagttactggtagtagattctgtgtccagtgttcccccatctccatgcatagttgagtatcaagcatagggatgcttcacattttatcttcagctccatcaccatcctgggagaatggtgccatgccaagcattggttcagctccctgtggccaagtcgaaatgtggtcttcagtatcatcgacgcagtttctggagtgcgagctgctgctgtctcagcctgagagccgttggacctagacgcatactgtcctcaaaggacccctggtgctgagagagctgaccgggatctctagtggtgtggatcccacgaaacgcctggagtgacacgagcgaggggatcctgcacccaccagggtcctaggctaagcatttgaacatgcgtccatgaagagtgccttggacaacgattggagtcagaccattggaggtggcgtgacagattgcttgacatgaatcttggaagtctcctgactatggttggcccgtttagctccaaaggctttggcatggatgaccaccgtaaaacaatagccccan

SEQ ID NO: 648118 - DNA, 196 bp, Homo sapiens
actatccagtgccgtgctagcctagcccaagcaagacggcagagtcagaagacgaagagcaaatgaccctgacgccgccctcagtgagctggctccgaccagcaaagagcccttttcatggtcatcccgcaatgcttttgaattgtagctaggatgtcatggagggccggtaaattctatgcggggagctagacga

SEQ ID NO: 648119 - DNA, 1203 bp, Homo sapiens
  misc_feature (4)..(4): n is a, c, g, or t
  misc_feature (16)..(16): n is a, c, g, or t
  misc_feature (31)..(31): n is a, c, g, or t
  misc_feature (33)..(33): n is a, c, g, or t
  misc_feature (43)..(43): n is a, c, g, or t
  misc_feature (55)..(55): n is a, c, g, or t
  misc_feature (141)..(141): n is a, c, g, or t
  misc_feature (156)..(156): n is a, c, g, or t
  misc_feature (166)..(166): n is a, c, g, or t
  misc_feature (171)..(171): n is a, c, g, or t
  misc_feature (179)..(179): n is a, c, g, or t
  misc_feature (482)..(482): n is a, c, g, or t
  misc_feature (840)..(840): n is a, c, g, or t
cgancgtcgcgcgcantccacccgacacacngngcaacgatcngacgaggaccancgacgcggtgagaagacgctgggaccagtcagcgacgcgccacatacatacgtagacacaataccacaagagagcacacgattcgnaattggaaaatccgnatgcggaacnccccngcacgtgnggttataggagaatacaccacacccgggacgggtgacatatcgaaagacgaaacgatagcgtgccactttatcggagaccagcggtagtgtatatgtaacaggggcgcgcacaataatacgggcacaacaacgacggaggtcgcaggcgatcttcaaggaaaagaaaaacgagcgacaacataacgcgagcgtacgagcgcctcacaaggagaaaagcacagatggacataccacgcgagggcggcggataacacaatgtgacgcgaggatgaaaaaagaaggccacaattaggagatattanacacgagaaggacgacacgcggagtgctcacaaccctggtgagtgaagtccagaggagagtggggagcatgcggagcacatctgtgcggcagcactatatgagaagaacgcagcccgctcgacctagggcgggcagcagaacaaaagagagcgttggggaaggtaaacatgagatgggggaaggcacaaatacgagaactcagaagacgcataatttgaatttatagagggagaaggagagagggcgtgaaacataacacaacgcgacaaggaagacatatggtgtaacaaataaacgggaggggcaggagcgcgaaatgggcgaagcaaaaccggtcaaccaagtggacaaatatcnccaccgggaaaaatgagggggtgagggagagtctccaagaaagggagagaaacaaattggtggaaaacaaaagggagaggggagagaaagcgggggggagacaacaatggcgaaaacacagggagagaagtagatgggccctccgcggagggaacacaaaggggaaaagacctatgcggcgaccatcacagacatatactggaagagaggaggtggaggcataacacacgacggatggcgagaacacacaagaaaggccggggaggctgaaagaggtatgagagaaattacatgtgagtagaaagaaccgacaggatatccacaccataaatgtgtgcgaagagggaccgggtgtccgagacg

SEQ ID NO: 648120 - DNA, 245 bp, Homo sapiens
agactctgtcggatattcgaaaggtcatcgcccttccgcctggcctccgttttcagtgaaggtcaggttggccgcgtcggcccaggattggagggagcgccgggcatcttgtttctggtggtaattgaattccttaccttgctcgctagtgaagtaataggaaacctcggtcttattgttttggttcccgtcctcccatttttttacaaaatgtcaaaaacatgtagttttaattttaccatgat

SEQ ID NO: 648121 - DNA, 136 bp, Homo sapiens
agaaaaatcacggtcttcacccaaatagaagcagtcttttttatttttttaaggggctatggaaacttctaaaccctaggcatgcggggccagatcctcctttcccgggctatggaaactagttttagaagtttca

SEQ ID NO: 648122 - DNA, 118 bp, Homo sapiens
acgtaatatgtacttcaataaatcataatataaaaagatactgcaccatatgttattgcagcactattcacagtagcaaaaatattatgggctgagtatagtggctcacacctgtact

SEQ ID NO: 648123 - DNA, 234 bp, Homo sapiens
  misc_feature (136)..(136): n is a, c, g, or t
  misc_feature (156)..(156): n is a, c, g, or t
cttgggtcagtgatcctccaaactatccagatgtatctttaaggcacaccaattcctctgctaaggacttctgttcacaactgaactgtattagttattcttaacattcaaaagagaaagttctgatcagagcccnaccatgtccagccattgtgncctgagatcccaagactgtggggatgagggcagagcccattaacatcagggattctggtcactggggtcacacttgag

SEQ ID NO: 648124 - DNA, 393 bp, Homo sapiens
tccagaatgctccacaggttctgtgattcccgttctcacgtccaaccattccttgcaatgcgtaaacccgttacggtcgttgtaatcctcccaagtgtctttcagggtctccataaagatgtcctccgtggctttgggaagttgactgtcgtgcttccaatcctccattcctccaccgtgtctccagagtcccatggcttgagccttcctgtcttacgggggtatctaaagctctggaggccattgagtgacccaagggcttgaagccgggaacgtctcaacatgttgcacagccagttaatataggtcagagagtaacgcccatcgtggttctcctgggggacaacaggacacagacacagcagcagagacatcagcacaggcacctttcct

SEQ ID NO: 648125 - DNA, 662 bp, Homo sapiens
  misc_feature (460)..(460): n is a, c, g, or t
  misc_feature (487)..(487): n is a, c, g, or t
  misc_feature (536)..(536): n is a, c, g, or t
  misc_feature (539)..(539): n is a, c, g, or t
  misc_feature (558)..(558): n is a, c, g, or t
  misc_feature (571)..(571): n is a, c, g, or t
  misc_feature (605)..(605): n is a, c, g, or t
  misc_feature (622)..(622): n is a, c, g, or t
cccggtctccaagtgtttatttgggagggtcctccctggtaaccccccaagggtcctttgaaaatggacataaaataagttggctcccttccccattgggacccggattctgggatggtttccccattgtacttcgggtccactcgtgccaatttgggccgaccaaaggtaaaacaggacatgcctcccccggggggtattggcccatgactacaaaacgaaactttccgcgtcaagacttgtcgggttacagcatgctggccatagggattggaaccctgatttacgggccctggagcataataaagtggaaccgtgagcgcaggcgcctacaaatcgaggacttcaaggctcgcatcgcgctgttgcccctgttacaggcaaaaaccgaccggaggaccttgcaaatgcttcgggaaaacctggaggaggaggccatcatcatgaaggacgtgccccnctggaaggtgggggagtttgtgttccncacaacccgctggtgccccccttgatcggggaactgtacgggctgcgcnccncaaaggaggctttccatgncaaccccggcttnatgtggtacacgtaggccctgtgccctccggccncctggatccctgccccncccccctgggacggaataaatgctttgcaggcctggaaaa

SEQ ID NO: 648126 - DNA, 469 bp, Homo sapiens
agacatatagaaaacaaaatataaaaagataaaaaaagctagagatcctatcatatccactacatgatagtaagctcaagctagcagcctctaaacctgcataacacatcaggcaagacacccctcctctaggcgggcagatggactagaagtggctacagacagtgtgggtacggcaagcctcccgctgaactgtgatcatgtgacacctgcagaccctggaaaaggactgatctgaatcctggcagcaaactcaacctctacttaagcttggggggcttgtgtataatacaggtcattagcgatggaagaagtctcagagtctctctcacatcaagaggacagatggggacagggatcctgagagcttaacttctcctgtgttctggttgcatacttgaatcccaggaaacagtgtgacacggtgccaatttactgccaaacatgcccggtttgtcaccagagccag

SEQ ID NO: 648127 - DNA, 138 bp, Homo sapiens
atttacatatctttcggttgagcccagcttacatcagttagcttatttatgcttggataggacaatcttaatgttgacgtgtggtcttatagaaatgagatcttatatgcaaatcattagccgtggcatcgataagca

SEQ ID NO: 648128 - DNA, 480 bp, Homo sapiens
  misc_feature (327)..(327): n is a, c, g, or t
atcccagcactttgagaggctaagaagggtggattgcttgagtccagaagcttgagaccagcctgggtgatgtggtgaaaccccgtctctacaaaaaaataaaaaaattagccgggagcggtggtgcatgcctgtagttccagctacttgggaggctgaggtgggagtatcacttgagcctggaggtggaggctgtagtaagttaagatcacaccactgcactctagcctgggtgacagagtgagaccccgtatcaaagtaaaataaaagatagaatggactttaggcagaaaacagtgatcctaaatggaagaactgagattcaanaaagaatgcaaagcaaatatgtgagcaaattcaaattagcattggaggggtgcagtggctcctgcctgtaattccagcactttgggagggtcacttgagcccaggagtttgagaccagcctgggccacatagggagaccttgtctctacaaat

SEQ ID NO: 648129 - DNA, 604 bp, Homo sapiens
  misc_feature (339)..(339): n is a, c, g, or t
gcagagaggctgcagtctagagattgaccagaaaataggatgcatgagaatcagtgaggcccagactcaagaacggcagactcgttgtactccccatgggtaagacagctaggatactgaggacacgatgaggaggaagatgacgaatggacaagggaaaactgaagcccaattctagtgcaacaggggcagacctgtgccaacttaccgctggatcccagaccctgtcggatgctgtgatcctggacgcgtcctctttctgcttgtgaacgttcgcggcatagagaagggggggaaccgtgaacactcgggtttgggcttggggaccagtttcgccangactgggttgcgtagcgctcacggagtgcggagctcacatggtggcactgcgcacccgatcattttgactagagtggaagctctatcaatcgagagtgagaggtgggaggagagctcagttggcgtctatgtcgatggacgtgcaaaggtaggctgactgtagcaatctcgagacgaaagatcaataagtatgcgaagtggaggaagccagctggtggtgtccagatgaaccctgaagatcaatcaccaggaagattaaccctga

SEQ ID NO: 648130 - DNA, 150 bp, Homo sapiens
aatctcctcactgtggttcaagccacccaaggaggattaatgctgattggttgtcgtcaggtaaggaagctgcagataccgtttcattgagaggggggattgtagaagtggaaggtgaatcagatttcactgcagagcttgttgcacctt

SEQ ID NO: 648131 - DNA, 236 bp, Homo sapiens
gggctacaatacgactagagtttacgatagtaaggatagaaagcttgttaatctaggccgtcgtataactaaatatacgagagtgacgaaaaatccagtgcgtgagtacaaaatattgaagaaaaggcacagattagcaagtaggaagcgcagacttgagaaagataggcgtaaaaaaaacctgagtgaccgggtaggttagctgaggtaaagttggatgggtaaagcaaattcta

SEQ ID NO: 648132 - DNA, 101 bp, Homo sapiens
ttttgtatttttagtagggatggggttttaccatgttggccaggcgtcttttatataaaatggtatagtatttggccagttgcggtactcccacctgtaat

SEQ ID NO: 648133 - DNA, 276 bp, Homo sapiens
tcagtttctgatatatgagagagattttaagaaactgactcatgtaatcgtgaaggagcatgtccgatctgcagtgtaagccatcaggctggaaactcagagagagttccaaaccccaaaggcagtacgctggcagaataccttcttgcttggaagaagtatgtctgttttattagggtttccaactaattgaatgaagcccatctaatctgttttactcaaagtccgccaatttaaatgttaatctcattaaaaaaaaaacaccttcacagaatc

SEQ ID NO: 648134 - DNA, 262 bp, Homo sapiens
  misc_feature (72)..(72): n is a, c, g, or t
tagacatgatacgattcgagccggtaccggcatgtgctgtaggccagcgaatgatacacggatgtcctcctncctatcagacatttgaagaaccgacatatatcaacctaaattaagcataatgaaaggaaggaatcgaaccctctcccactggtttcaagccaacgtcataaccactatgtctttctcgataatcgaggtattagtaaaatattacataactttgtcgaagttatattatagcgctggcctacagcacatg

SEQ ID NO: 648135 - DNA, 179 bp, Homo sapiens
ttttttggcaattgggcctttttcagggggtttcccatttaaaaaacagaaattttttttttttagaagaacccaccaagacatgggagggcgggaaccctaggggtccccccccccccctccagcctaatttgggaaacagggacagcagcaggggatttaatttttcccccctgcca

SEQ ID NO: 648136 - DNA, 393 bp, Homo sapiens
cctttaagggtcttcctctgaaagactttttccttctgtttcctttttttttcctctttcacattttctgtattgagccaatatgactactgtaatggaggggaaccctttatttgtagttagctggtgataggctttattttacaagttggccccattaccagatggcacatctgactatcatctcatagaggcctcagctgaagggcacataaaaggtagggtgggggtccccagtggagcaggtccctggggtgggctgctccctctttcattccttctcttgcctcttggaacctggaggatccttgtgggaagggaaaccattggcaacccccgcaagtcccacccgggaatccagaacctttcactttacccattttttaggaatcc

SEQ ID NO: 648137 - DNA, 194 bp, Homo sapiens
tatgttccattccatatcttgaaatttttgaagtggttatatttggcctcccaccttgtgacatatattgaggtttgtcgtagcatcactcgtaaatccatttccatcatcttggtcatagtgatcaatttgaatggaaaaggggctaccatgtgcaggagaatgtgtccgaggccaatgtaggggggtaccga

SEQ ID NO: 648138 - DNA, 398 bp, Homo sapiens
cgagccaagattgcagcactgactccagcctgggcgacagagccagactccatctcaaaaaccaaataaataaataaataattagctgggcggagtggcatgtgcctgtagtcccagctaattggaggactgaggtgggaggattgtgtgagcccaggagtttgacgctgcagtgagtcgtgtttgtgccactgcactccagcctgggcgaccgagtgagaccctgtctcaaaaaagaaaaaagaaagaaatgaaagaaaagggaggcatcctgtatgacacacacgacgagacgtgaaagagtaggcatgatttcggttctttttttgtttgttttttgagacagtttccctctgttacccaggctggaatgcagtggcgctatctcggctcactgc

SEQ ID NO: 648139 - DNA, 406 bp, Homo sapiens
aatattggtgtagtgagagatctgggcatcatcagatgtgagtactgagtgtcaagagagactagttgtgtcaggccattgatagaaagacagacatttatttgttgggagaataggacaattgcttactaccgtgacacctaatttactgatgcgtgatgacaagattcgtttgtatacctcaccgtatgtcatgctagattgattatgcgtggatctgtctgacatgaagggcataaccatatctgaaacctatgatcacgtataatgagtaacctgtagactgcaagttccgtctagcatacgtcctctctgctgactgtgaatcgtcagatgacaatatgctctgtgttagcgatgcaacgaatgacatggcagttacatgcgatactgtcatgcgggtttc

SEQ ID NO: 648140 - DNA, 164 bp, Homo sapiens
gttaattttggaaaggcccctgtaagctcccctagtggctgaccttttacagatggcagattgaagcaagcagcaaccctgaatgctttatcagggcaattgctgaaggtttctttttggatttggatgaatcataaatttgggccactctgtaaatttttgga

SEQ ID NO: 648141 - DNA, 219 bp, Homo sapiens
ctcgaagacaagatccgcgacaagttcgaagcccagaaccccaacgtcaagatccacatcgtcgggtttgccaagaaggtcggcgacctgatcgacggtctggtgatggtggtgatgttcttcggtatcgccttcgtcatcacccggtgctgctgctgtggtttaccaactgcctcgcagtaccgtcgcggtgttgagcaccacgctggtggtcgacgc

SEQ ID NO: 648142 - DNA, 177 bp, Homo sapiens
tatatggtctacacagtataatatccaatacagtagcagtgctgcagtaaaagagactttgtggcactccaaacaaaatcctcaatagagccatgccagtgttcctcctacagctccttcataagatcagagagcacagaaaatctaaagttatgctcaaacattctagcacaatat

SEQ ID NO: 648143 - DNA, 527 bp, Homo sapiens
aggttgaaattaaccccccctaaaggggacaaaaagtgggggtcccccccggggggggccggtttaaaaatagtgggtcccccggggtgcaggaatttggcccgaacagggttgggcccaatttaaaagtgggtttctgcaaacccccccaaagtttggtatttagcccatcccctaaaaggccctttttattcaagaaatcccatttttttcccctgggggcggggaaattttttttagggatgagttttttcaacgaaggggggcccttttcctgggaagaggaaaaatttggggcccctttttcagggtttggaaaaaaatgggttttgtcaagggggaaaggggaaaagggttttatttttggtttaaaatattataaagggttccaaaaaaaaaaggaaaatttttttggtttaaaaaaaaaaaagggaaacccaatggaaaattttttttttttatttatttttgggaaggttggcagaagataaattgtaaaaaacaaagattaaaaagtcctggtttta

SEQ ID NO: 648144 - DNA, 127 bp, Homo sapiens
tctgtgcctgcattaggtctcctcagcgaccaggctggtctagtgagcagaaatacccagagaagagtgcaggtctagtgtcagcaaggctgagggagtggtacctgagctctgaattctgtacatc

SEQ ID NO: 648145 - DNA, 475 bp, Homo sapiens
aggcatccatccttccatgcatgcatccatctgtgcatccatccatgcatccagctgtctatctatctatctatctatctatctatctatctatctatctatctatcctacttaaatagacattactgatggctactgctttccaggtattatgctaggtagtaaagatacaacaatgaaagagctctccactctagagagaggaaacataggttagaacaaatgcagcatatgagaagtgcccccataaaagatgtgggaccctgtaattgaggaaagatgtgtagaaggcaataattattaactcaaaaccaaatagacacatattatttccatgatttccacaaatggactctctagccttcagaaatcttggaaggataagaatggaacctcacctctgacttctatcactgaccctaagcaaggctcccacctgccttgagtgtagacgcgcccgcgaatttagtagtag

SEQ ID NO: 648146 - DNA, 260 bp, Homo sapiens
atgatacaatcgagctggtaccgtgagagtgaaagggaatccctcacctggtgagtcatgatgctcgaagcatccgctaccagatcctgtcatcaagggtgaacagatactgtgcagattgatttagggactggcaagataatcaactttatcaaattggatacaggcaattagggtatggtgatgggtgagagccaacctcggtctgtgttggtgtgatcaccagcaggtaaagacatccgtggttctgttagatgtgg

SEQ ID NO: 648147 - DNA, 140 bp, Homo sapiens
  misc_feature (74)..(74): n is a, c, g, or t
agaaagtcggtacattcattgcggtgagcatcactcctggtctccatgcttctctaagtaggtcttgctatgtnggcccaggctggagtgcagtggtacaaccatgctcactataacctcaaactccttgtctcaagcaa

SEQ ID NO: 648148 - DNA, 187 bp, Homo sapiens
gaggccaaaattcctcaggaccagtttgttttccaagtgtcattacaatgcatcactattaagtaccaagtgagcgggaatacatatcccagttaaagcatttgcgtctagctacacaccgctaacaaagtcatttagttatcaactgtaggctttttagggcgctttacgctaaggaaacatttcg

SEQ ID NO: 648149 - DNA, 102 bp, Homo sapiens
gaaaatcaaggggtatttggtaatggccaaacaaataaaatggtttgtgtagtgtataggggaggcaaaggggtgcacagctgtggggagctggtgcaaggg

SEQ ID NO: 648150 - DNA, 150 bp, Homo sapiens
gcaccattggcgggttagcaagaacaagcgtcttacggaaggcggcaaaaagggcgccaaggggaaaggtgtgatacccatttatctcaagaaagtttgtgtatatatgtagaaagcatctctctatgtctcatatataagagtactatt

SEQ ID NO: 648151 - DNA, 348 bp, Homo sapiens
tcaaagtaaaaactgccctaaaataaattatctgacctaccttgtttgactgtagttcataagactccccattcttgagaaggcctgccccacacccagaaggaaggaaagctgcacaaagaagccaagaaggacctagacagaccagcctcactggtaaccccacttagtccactagcattaggtcatatcctttttgtctaatcatatttctacacagctgttcatactttgttaacctaagcataaaaatggacacttttctcctgtatctgtcggtcttcattctgaatgctcctgtgtatgcacatttaataaatgtttatgtattttctccaattaaaaaaa

SEQ ID NO: 648152 - DNA, 287 bp, Homo sapiens
ccctggacagtgattcgcattgattctttactttatttacttctttgaggacggagtctcgctctgtcaccggctgagtgcgcgtgtgcatctctgctctactggaacctccatgtgctgggttcaacgtgattctcctgcctcagcctccctagttgcttggactactggtgcacaccaccaagttcaggctaatcttttgtttctttagttacagacggggtttctgcactgttggcccggatgttcttgatctcttgacctcttgatctgcccgcctcggtctc

SEQ ID NO: 648153 - DNA, 129 bp, Homo sapiens
ataagatatgcagacgtactcacctacgaagaacatgccccatttcatgccggcgtataaactgtggtctccgtcggccagttcctgttccgcttccggctggtcgaacgggtgacggtgagtcacggc

SEQ ID NO: 648154 - DNA, 891 bp, Homo sapiens
  misc_feature (18)..(18): n is a, c, g, or t
  misc_feature (22)..(23): n is a, c, g, or t
  misc_feature (25)..(25): n is a, c, g, or t
  misc_feature (35)..(35): n is a, c, g, or t
  misc_feature (86)..(86): n is a, c, g, or t
  misc_feature (98)..(98): n is a, c, g, or t
  misc_feature (116)..(116): n is a, c, g, or t
  misc_feature (123)..(123): n is a, c, g, or t
  misc_feature (270)..(270): n is a, c, g, or t
  misc_feature (272)..(272): n is a, c, g, or t
  misc_feature (294)..(294): n is a, c, g, or t
  misc_feature (319)..(319): n is a, c, g, or t
  misc_feature (371)..(371): n is a, c, g, or t
  misc_feature (385)..(385): n is a, c, g, or t
  misc_feature (387)..(387): n is a, c, g, or t
  misc_feature (398)..(398): n is a, c, g, or t
  misc_feature (414)..(414): n is a, c, g, or t
  misc_feature (421)..(421): n is a, c, g, or t
  misc_feature (423)..(424): n is a, c, g, or t
  misc_feature (431)..(431): n is a, c, g, or t
  misc_feature (433)..(433): n is a, c, g, or t
  misc_feature (435)..(435): n is a, c, g, or t
  misc_feature (437)..(438): n is a, c, g, or t
  misc_feature (442)..(442): n is a, c, g, or t
  misc_feature (444)..(444): n is a, c, g, or t
  misc_feature (453)..(453): n is a, c, g, or t
  misc_feature (455)..(455): n is a, c, g, or t
  misc_feature (462)..(462): n is a, c, g, or t
  misc_feature (470)..(470): n is a, c, g, or t
  misc_feature (476)..(476): n is a, c, g, or t
  misc_feature (478)..(478): n is a, c, g, or t
  misc_feature (482)..(483): n is a, c, g, or t
  misc_feature (485)..(485): n is a, c, g, or t
  misc_feature (493)..(493): n is a, c, g, or t
  misc_feature (517)..(518): n is a, c, g, or t
  misc_feature (523)..(523): n is a, c, g, or t
  misc_feature (534)..(536): n is a, c, g, or t
  misc_feature (553)..(553): n is a, c, g, or t
  misc_feature (560)..(560): n is a, c, g, or t
  misc_feature (576)..(576): n is a, c, g, or t
  misc_feature (583)..(583): n is a, c, g, or t
  misc_feature (585)..(585): n is a, c, g, or t
  misc_feature (591)..(592): n is a, c, g, or t
  misc_feature (717)..(717): n is a, c, g, or t
  misc_feature (883)..(883): n is a, c, g, or t
gctcacccccagcagtgnaggnngntaactcaggncagtgggcaggggacagactccacctatgggtgacttcagtagcagtgcantgatgtctaganggtctcacttctgcctgngttttgncaaacccagtggtctatagggatgtggcaaaagaatgacctaccgcagtgtgattatcagtgttttctaaaataaagagcacggttttgcctttaaaataattcacatcaacggtatttgggagaacatggagctggcataacattngngcgtagaaaggcagggcgccanggcccacccacggtgccctcgtgtnggggacgggctgcctgcagccccctgcagcccctcgagccctctgggccacngctggctgcctgtntnctgttgtctcntctgtcccaccccganaagggantnnaacaatntnantnntctntngcattgganantgcagtngttacatnggtgtntnccanntngttagctntgccttcaggcggtgcgtctagcnnggctnatgggggccannnctgctcctggctttctntgggcanggcttgcctccagggnccccgantncttgtnnccgctcggtgacagtggctggcaggtctaagtgctgctgctggatgcaattcctttggtagacttttttttttttaagaaaaaaataaaaccaatttttggggttggcacctgaggtaataagtnaagaataagcaccaaaatggcccttcctggcacgcgcgggctcacaggttcttcatgcacacctggcagcggctgatgtgtgtgcggatgaggccggccttgagcgtgtcggcggagggcgagccctggaagctctgctcgggaatggtggtcagcagaagctgtnattgttgg

SEQ ID NO: 648155 - DNA, 336 bp, Homo sapiens
tcagccaagcagacacagaagggagttatgtataggctgggcactctccagccccactgcaatctaatgtgtggagtatagtggagtgtggcattaacaaacttccaagtgggatcacagaaaaatcaaggcaatcagaggcactggtaccagttggtgtgatttaaaaccttttaagaaactgaggccaggcatagtggctcacacctgtaatcccagcactttgagagtccggggtgggcggatcacaaggtcaagagttcaagaccagccttgccaacatagtgaaaacccatctctactaaagaatacaaacattagtttggcgttggctgg

SEQ ID NO: 648156 - DNA, 318 bp, Homo sapiens
ggcgactctagaggacctcaccgcaatctcagaacacagtggaataaaaatagaaatcaataccaagaaggtctctcaaaaccacacaattagatggaaattaaatgaaagaatgatacctgctacaacaaaaatacacttaacttgctcctgaatgacttttgggcaaacaagaaaattaattctttgaaataaatgaaaacagagacacaacataccaaaatctctggaatgcagtaaaaacagggttaagaggaaagtttattccactaaatgcctatgtctaaacattagatctcggccagattgcggtgtttg

SEQ ID NO: 648157 - DNA, 600 bp, Homo sapiens
  misc_feature (312)..(312): n is a, c, g, or t
aacccttgttttttgtttcgttctccctgcgccttttctcccccatttaacggccccccttagtttttttaaaaagatattcgcccccttaacccggggcccctttttcccccgctgaggggttttgtttttttgcagccccctttcttcaaagcgcgcaaaaatttttttttcttttggtcccaaaattccccagcgcccctttctttcaaaagggggaggttttttttttccccagaacccccccccccccatctttccccgagggggattttttcccccaattttttttttttcccccgggtttttaancccccctttccccttttttttttggaaagccccaattttttttccccccaaaaaagcccccttttttttcccccccccccccaaccccgggggtttttcccttttgggggttttttttttcccccaaagtttttggccccccccccccccccccccccaaagggggggttgggggttccccccatttttttttaacccccttcccttttttttttcccccggggtttccccccttttttttttttttttttcccctttttttttttaaacccttttttttttttttta

SEQ ID NO: 648158 - DNA, 584 bp, Homo sapiens
  misc_feature (10)..(10): n is a, c, g, or t
  misc_feature (78)..(78): n is a, c, g, or t
  misc_feature (101)..(101): n is a, c, g, or t
  misc_feature (147)..(147): n is a, c, g, or t
  misc_feature (162)..(162): n is a, c, g, or t
  misc_feature (167)..(168): n is a, c, g, or t
  misc_feature (209)..(209): n is a, c, g, or t
  misc_feature (212)..(212): n is a, c, g, or t
  misc_feature (234)..(234): n is a, c, g, or t
  misc_feature (242)..(244): n is a, c, g, or t
  misc_feature (250)..(250): n is a, c, g, or t
  misc_feature (260)..(260): n is a, c, g, or t
  misc_feature (299)..(299): n is a, c, g, or t
  misc_feature (305)..(305): n is a, c, g, or t
  misc_feature (341)..(341): n is a, c, g, or t
  misc_feature (466)..(466): n is a, c, g, or t
  misc_feature (497)..(497): n is a, c, g, or t
  misc_feature (528)..(528): n is a, c, g, or t
  misc_feature (571)..(571): n is a, c, g, or t
tgtgcatgangactcagcctgagtgaagaggcacatagttgcaccagggggaagactggtttttgcatatgctgcagnaactcaaccaggttttggagtgntctccagaggcagtgttcctcttcaatgttcgcatcccagattatngtctccttctctggnctcanncacatttctactttctttgatctcttcctgatcctcacagntgnctacccagacgagctgaagtgnctggatgnnncggtgntgagccaggntgggtgtaaagcctcctacccatagcgggagcccgattncgactngggaatgaagcccagcggctgcacgctggagttttnatcttctttgcgctttgtggtaggacgctggagtgaatgcgcgacagctaagagcgcagcgccccactgctgacctcagttactggttgctttgcgagaatgcccttgtgtcctccaccatgccnaccaagtttgccaaccttttttttctacagngtagaagtatccacaaagggtggaacgagtnatgtagggagattgatagcttcctactttcagagacaaaattnaaacctgctcaag

SEQ ID NO: 648159 - DNA, 510 bp, Homo sapiens
  misc_feature (30)..(30): n is a, c, g, or t
  misc_feature (75)..(75): n is a, c, g, or t
ggggggggggtgccttgtggggggccaagnaaaaggcctcccccctcttatggggggtcatggaaaaaaatcttnttttttttgggggcccgggggcggccctccccgggaaattttttttccaaggccccttgggggaggggggccccccccctgggtctctttctcgggggggtttgaaaaaaggggggggggggccccccccccaaattggggggggttttcaccggggcccccttttttgggggggggattttttttctgggggggggttgggcccccccgggttttttttttttcgggccccccccccttcttctgggttattttggaccccccccccccggggggtttgggggtttttttgggccttttttcccatttttttggggggggggggggggggttttttttttaaaaggggggggccccttttgttttttttttgtttttttcatcgggtgttggggtcccgaaatttttttttaacccgggtgggggcccccccca

SEQ ID NO: 648160 - DNA, 156 bp, Homo sapiens
gacctaccattcagtccatattcaaactattgatattctctcctccctaatcaagtttcatttgtaagcctatccaaaatatatatatctcatttctccaaaaaaagtttatattacctaagaactaattgtatttttaaaaaaaagtcaactcac

SEQ ID NO: 648161 - DNA, 485 bp, Homo sapiens
cagaatgagcacgagaaatggtccattatcatttttaccaacaacggcaagacctccaagattctgtgcatgactgcgcaaattcagcttccccaccgtggtctgcactccatgatgaagcagaaagaacgtttgccgccctagccaagttcaagtccagcatctaccggatcctgatcgcaacagacgtggcctcccggggcctggacactcctacggtacaggtggtcatcaaccacaacacccccgggctccccaagatctacatccaccgagtgcgcggacggcccgtgcagcaaaggtgaatcccagctactcgggaggctgaggcaagaagatcacttgaacccgggaggttgcggcaagaagatcacttgaacccgggaggttgcggcaagctgagaatgcaccattgcaccccagcctgggcaaaaagagcaaaactctgtctcaaaaaaaataaaataaaataggccagaaaaaaa

SEQ ID NO: 648162 - DNA, 715 bp, Homo sapiens
  misc_feature (339)..(339): n is a, c, g, or t
  misc_feature (365)..(365): n is a, c, g, or t
  misc_feature (432)..(432): n is a, c, g, or t
  misc_feature (444)..(444): n is a, c, g, or t
  misc_feature (508)..(508): n is a, c, g, or t
  misc_feature (586)..(586): n is a, c, g, or t
aacatacagacacatgtacactacaggccagcgatagaggatattgggtctcatccctaggagaatgggaagcagctcatgggaccctgtgtgggagcatatgaggagtctggacatgtggttactactacaggttttgccctgattaataaatctcccacagccccagattcctgttagccacgtggaggctgctgatacgtgtatgagactatgcagaagtacacgggctgagattcttcgtgtatagctgtgtgaacgtgtatgtacctaggatatgtgaaatgtatagctggcaccttagttgcatgaccacatagaacatgtgtctatctgctnttgcctacgtgacaacacacatttgngagggtgagacactgcacagaagacagcagcaagtgtgctggcctctctgacatatgctaacacccnatactctgaatntggagtctgactgtgcccacgtgggtgcaagtggctgtgacatctacgtatggctgcacacctncaatgctgcctgtgagccagagtgagagtctgggtccaggcctggccatgtgggcctccactgtatgagagggcctgnctgcttgatcttttctgtggcccatccaccgcagcttccctaactacctatacatattcctctaaggaagggggatagacctaagcctaaaataaattattccaataccaaacctgagctgcgggcttt

SEQ ID NO: 648163 - DNA, 713 bp, Homo sapiens
ctttttttttattttttgggggtttaaccagttgttatttctagactttcatgttggtctttgggtcttctgctggaaacatgccggttacatgtgggtgctggaaagcgccgcggtgcaaccagaaatgcacagacccagccgcccgccgcccagaccctcagactgtgcgcgtcacaggacagactccgcgtggtgccccggtgcactggccaccagccttgggcctctcgacacacacaacatccaggactgtgtgcccgttgtgccccatcacgacagacaaagcgtccctcaaggcccccgcgtggttcagacagacgccgcagccaggatggttgaggtaagcgtgagccgagtactggagcgggtggggcggcggtgtggcctgtgcccgaaattggcctccgagcacagggatgaccctgccaggcagggcccccaaccagcgtgggcccgacagcggggtgcaaatacctgtgggtacggcaagctgtgctaggtgaccggtggcaacaccagcactgtgagctggctccatggagcattgggagtctcttttaaatacacgcttatagggtgtaacttaaccaaacaaaataacaaacagaaaactaagtacataacagataaacttaccccacagtttgaacaaattccaaaggctattccagtcatcccgaatgacgagtccaacaggccacgcgtgttgc

SEQ ID NO: 648164 - DNA, 107 bp, Homo sapiens
ttacaatacctttcttttccatcctatcacttatgactccatcttcccaagtaattgcaaattgaagattccatcacttatacatccacattattcaactgacaaat

SEQ ID NO: 648165 - DNA, 540 bp, Homo sapiens
cattggcccttctacaacatctcagctgctatgcaggcggcaaggcccactcagataccagcgctcactcaccctgagcctttcttaactatcctctggaagccttccctagttccccagtgtctatctccattactgcacctatcacacagaagcattgtcaatctgtttatctgtgtgtaaaatgacaaggttattcattgccaaaaaagactagaagtcacctgcacattcatcaatgaataagagaatggcacatccaggccgtgcgtggtagctcatgtctgtaattccagcactttgggaggccaaggcggcagatcacttgagatcagaagtttgagaccagcctggccaacatggtgaaaccttgtctctactaaaattacaaaattagccaggcatggtggtgtgcacctgtaatcccagctactcaggaggctgaggcaggagaatcacttgaacctgggaggcagaggttgcagtgagctgagactgtgccactgcactccagtctgggcgacagagaggctctgtctc

SEQ ID NO: 648166 - DNA, 593 bp, Homo sapiens
tggtactgtagctactgctggagtgagcagtgagctaggttgaggcagaagcagtcaggatggtggtgccttcggtgaagcttcatggacctcatcgaagagattcgcggggacaagactcaggctctatgtgagcgggaggtgatccagagaaggagtgtgccctgatccgggactcgttccgcgacggggacccagtgcacaggcaccggaagctgtacgaacttgctctacgtccacatgttgggctagcccgtccactttggacagatggagtgcctgaaagtgatcgtctcctccagattcacaggcaagagggtgggctacctgggggtcatgcttctattggatgagaggcacgatgcgcacctgctcattaccaatagcatcaagaatgacctgagccaggggattcaggcagtacaaggcctgggcttgggcagtttgagcaccaggggctctgctgagatgtgacgagacctggccccagaggtggagaaactgctcctgcagcccagtccctacgtgcgcaagaaggctattctgactgcagtgcacatgatccggaaggtccctgaactctccagtgtctc

SEQ ID NO: 648167 - DNA, 1579 bp, Homo sapiens
  misc_feature (1)..(1): n is a, c, g, or t
ntgtttctcttcgcactctctcgttgggagtacttcttggtgtgggggtggcgtttctctctacccctccagcctccctcgttgtctgtctactctcgtctgttgctgtgttttttctcgttctcctctgttgggtggcactcactgctagtgtcttctactcatatgctttgtctgttgtagtgccctcatttcgtccctggtggagtagtctccgttgtgggctcctgtgttgtgagatacccactgtggggggtgccagccggctttttttcgtcactccccgggtgttttgcccacgacattgtgtttcttcggtcaatatgtgggtgcccccgctggcaggtgttttgtttgtcgtccgtcccccactccttggtggtgctcccacctacggtccccttccggggggtggcccaacgattgctccatctcgtcgctagctggctgatatccccccggtgggggtcgcctgctgtcgggtgatggcacccacgtgtggtgcttgcccaccggagtggttgctttcccatttccccttcctcttgttctacaggagatgtggttgtttgttgtaaatattggtgccaccacaagggtgtacgaccacttggtcgatgtttggtggctcttcgtggacggcttttgtgccgaggaagacgtccctcacgctcctggcgcaatcaacattctggtgccgaccggctcgtgtattattcgccgttgttgactccgcggttgtttcactccgccaccgctgtgtgttttccaacagcggggggcgctccgcctcaacatattgtgttgtccccaccttggtagaaaagggtagtaggtgttgtggtagttgtatgtgcctcgacagatggcgctcttattaaattggtttcccctcacattacccaccagtttctactctactgctcacgcgctgacattttgtttctctggaaaatggtgagatctccccctcacacgcaaagtgttgttgataaacacggccgttgtgtctctgttggagcacattctcccaacacatctcagtggggcgctctataataaatgtgtctccgcgcaccacactgtctatattgtgcgcaacacagcacacaggcaccatctccagggagacatgtttctcaagacggcgcattttctctgagacacagattctcaccggcccatagtgttctcggggcgccaagagcgccttctcttgccacatgtgtcacacaccgggcgtagggccatgtgaccgagaatggagattctcaccggaggcccgagtagccaacacatggaatggaccctggtgttctcggagatacccagccagtacccagggatgcccaccagccggaggtaggtagggccgagttctgagagaggaggctgaggaggaggtggcctagagccttctagtcactggggaaagtcagggaagaccagtgtgaacatcttttattctactctccagcctgtccctgtggccctgtcccactgtgtgcacttgctgtttttcccctgtccacatccatgctgtacagacacccacccatttaagcatttttatagtgga

SEQ ID NO: 648168 - DNA, 333 bp, Homo sapiens
  misc_feature (124)..(125): n is a, c, g, or t
  misc_feature (127)..(127): n is a, c, g, or t
  misc_feature (323)..(323): n is a, c, g, or t
gatagctgtagctcagctgttctacagcccactgcccttgctatctccagcagctcccgtgggaagtggccttccccaaaccctcagcagtgcaactcaggtgtttggatctctgtcagtttcnncngcagaaaaatagaatctccttgttttaatttgcgtttcccttatgagaagggtttagcgttatttccagtacctaagctattggaatttcctttcctgtgagctgtatgtttataagcctttgcctgttttcctaatggctgttggtttttcttactgatttaaaggacttcctttaagataattgaaaggagggnatcccttaaa

SEQ ID NO: 648169 - DNA, 603 bp, Homo sapiens
gtgtgacggcccgttttgcagccgccggatggtactgcagggggaaaaaagccggagtgggaccgtgtctttgggaaactgctgctctttcacttctcaggcgtcaccgagagctcaggacccaaggtgaattcttgttaccattgtggaagaaacggggagctgatggcattctggtggaccatgtttcccccaaatgtcctgggagcatcagcgtgtttcagaattacccaaatgtgtgtgggaagacacattgtgcgatttctggaaattcaaaaaagttgcaatcagatggatgagggatgcacttggaaagcgcttttaaagagaaaagagaatccaggccacctaagggaaaggttcaacgaggagaaacacacagcaactgggtttcctaaaagggacctatggggcgaaataccagagaaatatccccttaagttgcaaagggaagacttctttcccacagcaacgtccacgggagcagttgcacacacatggttggttgtgccattttctcacgggagaacttcccacattccaggttgttaaaaatactaaaacagactattgtggcaattattggtccaagaaacacctcga

SEQ ID NO: 648170 - DNA, 935 bp, Homo sapiens
ggactgttccgggagcgccgcgtgttagcgtcggcggtttgggcatggcgactttttctggcccggtggcaaatctgtcgcttaatccgcaagaaagatgtcgcagttccaaacggaggtggcgcaagtgttcgggaagcggatataaaccaagggaaaaaaacaagcaacaatttacactcgtggagtaagtctaatgttgcgcccaccttaacttaaaccttattgtggaggaaaaaccaaagaatcttttcaatattttctccccagttttgggcccttcttgtggacaccgggtccggggcttgccccaagaacggtaccacggggcgttgacaataggcaagaggggtctactgcattgtggggggaggttggagtctggaggggattgtgcgccaaaattatgtgtgctggaaacaattggacaacaactttaccttgttgtgggtgggaaagggacttcttggggggtggcccattttagttgcccacgctgaaaacagaggtaaataaagaggaacttcttttaaaaggatgtgaattattccccatttacaggcaggcaatttattatccattcagggggaacagcgggtaaataaatgcggaactcgggacacttaaagcaacaaaaaaggttaacgggactggggggacgcgatttaacaacaggaacaggaaacgatttactcagggaacgaacacttaggcttaaaaagggggatgtgacttatggatttttcccttctgttgatgttacaggcaaaccggaacaggttttcacaaacactaatgggcagaacgtctacaaaagggctgggtttaacgtaaggaggacgaacaaaggttccgttgtgtgacccaacaatttgtggggggcggacaatcacagtggtgaacgagtgtgtgataactggtgaacatgttcaacg

SEQ ID NO: 648171 - DNA, 384 bp, Homo sapiens
cagcatttccattggtctaagtcttttataacccaaggcaacaactgggtgaacacaactgaaagacaccttctacacctgccatcagaccgtgggttgggctgggaagacagtgtagaaagatatttaagcggaatgtctggcttcccgggaaaaggggctgtcagtggggaaggcagactctcactccctgctggctacactgggaggctgtgaggcaggggtctcctctgaagaggtgcagaccctttgaatgaaaggatgccctccaaaagagccgtggcaaatatgaaagagggatggaaaaaaatgtctgtggccagaaaaaagtaatttaggagaattatgtgagctctatgatcccaaaatgcccataccccatta

SEQ ID NO: 648172 - DNA, 416 bp, Homo sapiens
  misc_feature (140)..(140): n is a, c, g, or t
  misc_feature (156)..(156): n is a, c, g, or t
gtcgacgttattgtaattggccgcgatgcacagtgactgacacatacgagccaaatggttccgagcaggcagccccgtcgtcatttgagaaggatgctcaccctcgggaatgctgtattgaaaattccccaactgatctngaccgcgcgccgcccntacatccttgagatctcgggaaagagtgccctggctcacgactattccctcggcagctagcctacgcgccaattcagcttgggaagatatctgctcagatcgaattaaagcgctaatgcgcgacaaccttgccgccctagatacgagaaccggtctgtgatcatcgttcgacaacgacaccgcccctttcgcacacacccgtcacgaataccctagagcctgtggatacgcgctcgcaattagaagtagtatagtcgacc

SEQ ID NO: 648173 - DNA, 159 bp, Homo sapiens
actagtcctgcgtagtcggtgtactcgtaggtcagtaccattgatggccaactgatatgatggtaagggagggatcgtgacctcgtcctgttatgtaacaggatgcgtacgggatgggacgggcgactgacggactaggactgactggcagggcacgga

SEQ ID NO: 648174 - DNA, 441 bp, Homo sapiens
tgggcccttacttcccacgacaccattggacacatcaatgctgaaaacaacaaagacacattggacttaatccgcactacagaccacatggacctaatagatatttatagaaaatgtcatccaatggctgtagattaaacattcttctcctcagcaaatgaatgattctcaaggacagaccatatgttaggccacaaaacgagtcttaaaacattccaaaaaactgaaaccatatcaaatatcttttctgaccacaatgggataaaaccagaaatcaataacaagaggaattttggaaactatgtaatacacgaaaattaaccaatacactcctgaatgaccagtgggtcaatggacagatgaagaagaaaattgaaaaatttcttcaaagaaattataacggaaacacaacataccaaaaaccttgggatacggggaaag

SEQ ID NO: 648175 - DNA, 470 bp, Homo sapiens
atagagtcttgctctgtcacccaggctggagtgcaagggcacagtctcggctcactgcaacctctacctctgggttcaagcgattctcctgcctcagcctcccgagtagctgggattacagacgcctgccaccatatctggctaattctttgaacttttagtagagacggggattcaccatgttggtcacgctggtctcaaactcctgacctcaggtgatctgcctgccttgtactcccaaagcgctgggattacaggccctgcctagaattcacattttcaaagacagaacttctgttgcacaatagtaagcttgttaaagggtaccgccgatgacgttttaacgcaagagatttccctcttaacagtgacctacacgttactaagtcatagagagttgaactaagcataactagcattcgtttcgttctcaccttctttggaggtgtttgaaacgatctgtgtttaaa

SEQ ID NO: 648176 - DNA, 245 bp, Homo sapiens
ataaatacacacggagtgagccagaatggagctacagcaatgacagaatggtattaccaccaaatgagactagatgttataatcttttactatccttttttcttagaaaataattagttattcaattattgtctaattctagctccagcctaaaacccttttaaacattagccacatctgatgcctattggaaccacactaagagccattgcagctgcctgcctatgcgttcattgccagggttt

SEQ ID NO: 648177 - DNA, 219 bp, Homo sapiens
tgtggctaaggaaacagaggacttgaacaacactaccgaccaaatgtatctaacaggacatacaaaacaccattcccaacagctgcagaccatacatcgttctcacgcacacataggacgattcttcaaaacagatcaccagtgtggtcacaaaatatgtcttcacaaatttaacaagattaaaactgggcatggtggcccacacctgtcatctcagca

SEQ ID NO: 648178 - DNA, 1128 bp, Homo sapiens
tccgtcggtgttatgccttattgtctcggggtcgtcgtcgctgtagctatatgtttagctcccccgccccgttgggtcttataccccaaactgtaactgtgtgcgccgttcccttgcgcgaacacggtgtttcttcccattaagtcccgctccggttcgttcggctaactgcgccttattcccgggtttctggcgtctcggtgggtccccgttgctttcggtgggtttttcccatatctcccctgatttgtcctggtcctttggtctgcaccccgattatcgtatctcggcgggtgtaatgtagtccgcgagtatagcccccggtcttgaggccccccatttgttgtgaaccacgcgggcaccaactggccaaccccccaacacgtatttagcccatctgtctttcgcggcagcccgtatccttaggcgcttctacggctaagggcctttcttccgtttgcccttcgtctttggtggcttcttccttatgggcccaatagggctccgccgtttaccgtgttcgtaaagttttcccgttgtgctctcggacccacatcggtgcggtttacgtgtcccgataactcctcggttcgctttctcctataggccgagcccttccggactggtcaggtttttgcatcccgatgcggacttttcttgcccttgctcttgacccgaagtgggcgcctcggggccctattagccatagcgcctagtcttttggcttctgttgtcggtttccttttcgtccggggggatctcctggttctctacgggggccttttgtgtacttattagttcccccataagtccgtcgtttacggtatcgccatgtatttccctttgtgctattagtcctcgactggttcattttgggcccaaggaatcattccgctggcgtcctgctttaacttcggcttttgtagtgtggtatagctggtgttgctatgttagcgctcgtgtcaaatgttattctattgcttgaattttatgttaaggtttgtttgttgtacgctaattctcgattctttgaagagatgacatacatattttggttttctactgttatgtgagtacattaggccccagcaacatatccactgtgtaaggaaatataaaggctccgcg

SEQ ID NO: 648179 - DNA, 183 bp, Homo sapiens
tgaccggacctagaggacccccgtccttcatcatacctaccaggaagaaggcagaaagacaaagaacgaaggcggcggagaggcaggagacaggcagaagaaaacgaaggagaaggaagaaggagaagaataagaagaagaaaggaggagaaggaagaagaagaaagaggaaagaagcagaac

SEQ ID NO: 648180 - DNA, 857 bp, Homo sapiens
gtccctgcgccccgctccgccgcgcctctctcccagcgccgcgcctcgggtcgttaagagcgcgcccctcgcgaccgcagtccagtgccgaccgcagcagcccagccccagccttcctccgcctccgcctctctctccttcctcctcctcctgccgtccgtgacatcgcagtccgcatgtgcctgggatccgggactgcagctggggagtcacgggactgcgcgctatgccatgccctttcctcgcctctcgtgctccgcgaatccgctcgggcgccttcctccgtcgctcctccgtactctctcccatcgcactgtcgtccgtctcgccgtcttattccgtcacctcctctcctcatcccgagcgccctgggtgtgcagacacgcaatgatccgggaagggtcgacgagtatgagcggagctccaacttggatgtagataacttggcccttacgtctgcttctttgcagggggcagtcatcacgcggatctgggtgtaaagacatcggagtcgtcttgcatattcctaaggggcttactcttgtgagccgcacctaagtcttatcggcaacccaaaagtcatttccacgggtggccacacacctacgttcgcgaagtttgtactcttcttgggctgcgctgataacgcccaggttgcatacgctcagtcgacgcgcattcgctgacgggtggccaaactttgcccagcttcctgagggacactaggcatgggttccagcgatgaggaggttccctgcaaaggcttgaagtcccccctgctcgtaacatctccggtgccgcccaccggcgtggctagaatttgcgttgtacgaagccgtcacgagctcgtcgacctc

SEQ ID NO: 648181 - DNA, 775 bp, Homo sapiens
tgaatgtgatctagccactggcagtccccaaggggcgccgactctgctgtgaggtgtgcgaagccccagtccgagcgggtgtgcgcggcctgcaaagctcacttattactgtggcgtggtacatcagaacggctgactgaggagcagacgtccatggagaaaatatggtcagcctccttgatgtccacgtgcgcatccttccagtgccgcattactacaagtctcgagaggcacagaaacgcgagagcgagtgggcactgctaggcgagcgtggcagtccatgcgggccagtaagtatcatgagtctgtaactgtcatgcggtacgaatcatagtccgcaggaaaatagcagtcttttgcagaggggaaacgagcgagagcattgcgtgtatcgcagacgagcttgtggcacgtcccgcttacggcgtataccgtggtgaaagtctgtgataggcccgtgaagcgtctcggtagcagcgttgatgctcatgcgtaaaccatgcactggttgggccgaggaccagtcgctttggatcttgggtcccgagagtcgattgcaagactgcacacgacatactcttacttttcacccaaggctcccaagttcgggtagcgaggtcacatccaagatccaacgtgtaggctgttaagtgtaaatggcacgacgccaacgtgcctttgagcgtggcagtcgtggaactcgtggggaactgtcttctattgatagcgcgtaagcacaaaaggatgatgaaagaaggtcccggggaatcatccg

SEQ ID NO: 648182 - DNA, 574 bp, Homo sapiens
gaatgtggatgattgcggtggagccttcactatgggtgtcatcgagtggcggagtcttccaggccatcaagggtttccgcaagtgccccatgttggaattcagtgcgaccgggttgagaggtagtgccactgctagtgaggatcctgagccccccaagaattggcaggtagcgttcgcagtcgtgcgcgggcggccgtgctttcatccaccgattgactgtggctggtgcggcttcggggcaaggaggatcgcctgtgaactctatcaccagtggacgcacttgaccggggctgtgctggctgcccgcaggtgtcccactggcccatggtgggctcagccaatgcatgcgggggcactccctgcttggccctcattgagcgccgttggcatcctccgtcactcgctacacagcgccagcagttcccgaaactgcgcccggcattcctggaggaccccagcagctgcccctacggatggcacccgggcccaggctaccccagctatcagccagtaccacctgagggaagccactgccaccatggcagctaccttctcgcgctccctcccgcgatg

SEQ ID NO: 648183 - DNA, 260 bp, Homo sapiens
tccataatgtgtgcccagtctgggcactgtgagaccctgtcttccaaaaaaatggcattctagtaagagcatgttaaaaacatagtcttgagaatgcttatggtatgttttcagaatgagaagtttaatgtggtgtagcatggtaggggatcctgctggtcagatgggtggggcgcacatgatggaggggtgccagagcgcgagttgggaatcgtggacataggtgcactcgggctccagcctgggcacacattatggag

SEQ ID NO: 648184 - DNA, 1448 bp, Homo sapiens
  misc_feature (572)..(572): n is a, c, g, or t
tggaaagccatattggggtatttttgaagtggaaagtgtgtttgaataacagcaagggaagagctttcttacatagagaggtatgcattctttccccttgagccttgagaaaccgtgtctcaacacgggggcggggagggggcagctgtgtggttctttctaaccctctccaggtcagggaacaaatttgcccctaaacttccacaggaggcacctcttacccttcgtgggccagaagctgtgggcacgaggtggcaaagctcagatttaaaattctctagaagtttctaacgagcgatttcccaaccattttccctcacctttttctttcgtgtttctcccgaaattcccagagggcgagggaaaaattcccgtggcgtgcctctcttccttcaatctttctataacttacaggcgtgtatagagggcggattttagagaagcccgtcgtggcagaaatctcacagtggccatctcgaccacaaggggaaggggggtgtgtggcaaggggaatttttctcctgtggtgcctataaccctacgtgatctcaccgagctataaaggtgggaanatctccttatttaaaccacgagcgcggaaatctcacattgtggagcgcgccttcgctatatacgcggcgccccaggggggagaaagaagggggggcgggcgcccccacacaagattgttggcatctcctttgaccgcgagaattagaccgcagaagaagagaaaacggcaagcccatgggggaagggggctcacacgggacacacaggatacgcctataaaaaacgtgacagggggggcgaaacgcaaaaaccaagggacacgacgccgtgcgcaaacacgaagcgacggcaagtccaccttgctccacaacagggcgacaccactaggacggggtggaagtaagggcccaccaggtgtgggcgcccccaacgaagcatggttgggtaccctcccgggtaaaagaacccccaaggaagttttcccccttttaccccctttttcctgagcgggaaatggttggaaacaccgccgttaataggccccacgaggccatagtagagggtccacagagaattcttctgcaacgtctctcccgggtggagtggagccctcctatcacttactgagggaaagcaccgttggttccaccagttttccattaagtgaaggagggggccgccagtaaaatataatcacttatgatagaagggagcccgggaaaaacaagccgcgccttgttgtataaatctaacacacaaaaacgatacagaggtgtgcggccatgagagcagaggtagatccaccacgtgatgtggtggaggagccaccctttaaaatagccccggagaagaacaattactcctcgagaggggacaccacaaagagaggcggacagatgagagcttcaacgacagatataaactatgcgcgatgg

SEQ ID NO: 648185 - DNA, 726 bp, Homo sapiens
tcctatgaagaaaatttttacaattgctggggcggggacgataacgtggtaaatggggtcgtcacctaaaaggttgccgggtgggcccagctcggctcaaataaggaggtcttaaagctgtgcctaggactccagctcagtgcgccgaataataggtataggttgtcccaaggtcttgggggttggtagagaatagctcaagggtcggcgaacatcaggggggggtgaggtaaaagggcgttgagtgaagcatgggacggtaaatctaaagacaggggttaggcctcttttaccagcctccgaggtgatttcatatggatttgcaattccgaagaagcagttcgaaccggcgggggtttctcccgcctttttccccggggggggggagaagtagatggaagccagtggattagggtgctaagctgtaaactaagtgttggggggttaagtcccatgggtctagtaaggggctagctaaataaaagggggggattggcgtcagttgatgcgaggggggtttggacagatgacccctaagaggggccctctaaggcctccctaaggacctcgggcatagcatgtgattcacttccactcaataaggctcctcaaataaggctattaaaccaaaaagtaccattataccactgagtggcgcgatgtaaccaggagaagcacctacaaggcacacagaacacggtcaaaaaggctcgaaaggggaaaact

SEQ ID NO: 648186 - DNA, 357 bp, Homo sapiens
atagagagttataatataaaatgattaaaggctatatttaagaatgtaggtagtaagtgtaatggtgttgaagaaaattttctatgtatgcttataggatgaaaatatataattaaagtcttctgatcatagcttgagaccatcaagggaatgtttagtttcctccacaaagagccaccaggattttctcataatctcctttggtttcatccaggatggcttggcaaagggagataccatacatcttctgatagaatgctttgatatcattcatgtcaatttcagaacgggaaaccataatcctgatcaatgccttatggcgagttccaacacctttcatggcttgatgaagcttct

SEQ ID NO: 648187 - DNA, 1049 bp, Homo sapiens
gcatatgtcgatccacgctgttcgcctaataatggtagacggcggcggctgttgcggctgtgacaggagccccatggtcatgctgcctcaggccctatctcagcccatcttgacgacaaatctaatggctccatggagccagcacggggccccctgccaatgcggagcctgagtccatacccggtgcagtagtgagcaccgtacaaagtatacctgaccaagcaagcaacgcacggtggtgactgtccgggatggcatgagtgtctacgactctctagacaaggccctgaaggtgcggggtctaaatcaggactgctgtgtggtctaccgactcatcaagggacgaaagacggtcactgcctgggacacagccattgctcccctggatggcgaggagctcattagtcgaggtccttgacgatgtcccgactgaccatgcacaattttagtacggaagaccttctatcagcctggcgtactgtgacttctgccttaagttactgtaccatggacttccgttgccaaacctgtggctacaagattaccaccagcattgtacccatccaaggtccccacagatctgtgttgacatgagtaccaaccgccaacagttctaaccacagtgttccaggatacgcgccggaggctacagacagccatgaggcatcccatcgaacacagccacactgaatgacaaagcaaaaaccacacagagcacccgaagcgcaagcaagacacgacacacagaagcctcgggggaaggagaggcgacggaaccgcgcccaggagcggagaagacgaggagagagagaagacgaccagggaggggggcgcgccgaggagagaagaggagggacgagaagcgcggaccagcaagaacactgagacgggacacggagaagagacggcgcaagaaaagcggcgcaagagcgggcacggagaccggacaaaacgaagggcagcaacggcagatgcgagacgcagacggggcggaagctgagaaggagggcacgaacgcgggaaggaggcagaggggggaaaaaggcgcg

SEQ ID NO: 648188 - DNA, 1131 bp, Homo sapiens
gggggttcctgacgtgttgaatagtccccactaacgacatagccgaatccgatgctccgccctgtgccgcccctaaggggtctcctttgtcgggtcaaaaggggaaacattgctgggtccctttcttgggagaatgggtttattaaactccttctggaccccctcgcagtgttgttggttggcctcgcgttcattggccttacagggcacaccctctcgtttgcaaaacgggcaagtccacacagaacccttaggccatgtttctctatcgatggtgtctcttgaacggggcgctttttcataaggtgctcccctgcgcggttggatacctcggggcgcgcaatggggcaactgagcgcccttcggggggcttccggttccctattgtgccccacgtacccagggctttccacgttcacgacagcgattgtgtggtgacactctttcctgcggcaatatggacggaaccctcctcggctcggaagttgctggccacatgttccggggagagccaatttaggagtcaaagacatgtcgcgcagatatagagggcccacaaatttgtgtgcacaaaagtttggtttgcgaaacaccagcagtttggacccttgagattcacgactctatcgctgtaagacgggcactcctcaaaaaattaaccctggccacacttcccgtttcacgcgatctacgcgcatcatcgcatctcacaaggtgctatatacttcattgcccttcgtcccggagtgcggcgttgtttaaccagcgcgcgcacttgaccgacgaagcacaccattgcggtccacagcgtttcgcagctcctcccctagggctcatctaagcacactacctcggccgctgggcctagcacatgtcatgacctcacagatgcctacgtttgtggatctccatcttagtctcctccacgtggtgccccaatgtccttcagctcgcgcggggccaccgttttagggtcccatcctatgccatcacctgaagacccccacgccaaacactggaatgtcacgctgtgcatgccgcctcggtcacaaccttgcggcccgctcgtttgactcaactcagctcctttaacgctaatatcttcataccaacatgggatgcttggtctct

SEQ ID NO: 648189 - DNA, 124 bp, Homo sapiens
tagtagtggaccccgctaacggctttttgcccaaatgggccattatcgaagaatcacaaaaaacaatggcctgctcccaaatcttcatgcctttccagatggatcttgatggaagcgtgcgcat

SEQ ID NO: 648190 - DNA, 364 bp, Homo sapiens
tgtacactgaggagaatcaggtattagctgatatgtatagatacactgaggtggtgaggagtaatgtgatacgagtgttttggccgtggaaagctatatctctagggtgacgaaagaactggcagtatgattgtgaatgagagagttttgccagttgcatatctacctaaaatgctctattgctctgtattagtagtgagagaggaagaagtcattttattgtgctgaaaaacagtggaagtaaagttaccaagcgagtaatattaatgacttcaattcatagatattgggataatgactaatgtgccaggtattatattaggtatttaatatacatgatgacacttaaatttatactatggtc

SEQ ID NO: 648191 - DNA, 793 bp, Homo sapiens
aaaaacaaaaacaaaaaaaacctttgtctgtaagacagtatagaaagttgggagaaaggtctactccaggatcaagacctcctgaaagggtctcgaggaccccaatggttcctggaccacactttgaaaacctatggatctgaaagtaatttaggattgcattctcctgtaatgccgcgtcttagcaatgtaaccttgggaactgaccaaaaggacccaagggagagtatcaaaggcaaaacaacaggacacatgaggaacaaccaatactcagaaaaaaaaaacgagtaattcattggattcaaaacggggaaacaacagtagatgactatagaggacagagaagagcaaagcttatgatctcaaaatgatttctggtcagtttggattccatcgaattcaagtcttagaatttacagaaacatatgtgatttctcagatacatgggtatatcttcaaaaacaaaaaccaaagcaccacaggcccgacacggcacatcgaccagcccctgggagaaaacgcatgcatagcaaaccactaaccgcagggagccacccagccccacacaagcgtaaacggaacccagtggccacatacgaactgattcaccaaagacagacaacgggacacaacaaacccaacgcaatgagcatatcacaccacaaaaaacaaaacatgaccaggcacaaacagcacacacatcgaacgcaaacaccacaagcaggacacccgacgcccactaacggataccgacacaacaggagcatcaagaacaacaagccactcaaactaa

SEQ ID NO: 648192 - DNA, 548 bp, Homo sapiens
  misc_feature (6)..(6): n is a, c, g, or t
  misc_feature (69)..(69): n is a, c, g, or t
  misc_feature (110)..(110): n is a, c, g, or t
  misc_feature (134)..(134): n is a, c, g, or t
  misc_feature (178)..(178): n is a, c, g, or t
  misc_feature (220)..(220): n is a, c, g, or t
  misc_feature (222)..(222): n is a, c, g, or t
  misc_feature (243)..(243): n is a, c, g, or t
  misc_feature (249)..(249): n is a, c, g, or t
accaanccctattccggcccccctttaatgcccatcttggctcaggggctggcctttccgggggggatntaattaagccataatttggtttttgggtatattcctacccnagtattccaccttacggctaaatncgggaaagtgccgtatttttaagcctttagtggttttctttggngttatctgtccctttttcctttttcatacattgaaggtgtcncnttttcaccaaatattgaaatngggagncctgaattgttgtgcctggctaattggcaattatttaccatataataagtgtagcgcctgtttgaataccctttttgagaaggtatgatgagaatgggcaagggtgtcagcatctcttcttcttaataattaattgttttcagttttggttcacgaagaatgcttagttaatctgtaatgttgcctagagctgtatttatctgtttttatttatactagtgtagtaaagctgcatatcattacagtaaaaacgactactgtgatgagttaatcagaaaatctattaaaatctatatgac

SEQ ID NO: 648193 - DNA, 423 bp, Homo sapiens
  misc_feature (130)..(130): n is a, c, g, or t
gccaaagtgcccaaatgctattgcaaattgtcagcagtaagaaacatgtttaactataccccagagaattatatgttcttttctacaactgttgaacaatccacttacatgtaccaacaaaatgaaatgntttccctgttcctactgtcaccaaatcactcacagtctgaatatcccattcatttttgtctcttcatttatcagtaaatgtatgctcctaatttagtgtaatatactggcttgtatgtaatagatttttaccaagatgtcataccttccctactctggtgcttagaggatatcaactcctttcattcatgaaagaagcttgttagaactccttagatttgcaaactggaaagatcaaaatgaggttaaatggttacagtaattgacagcagcatataggtaaatgcatgagcc

SEQ ID NO: 648194 - DNA, 474 bp, Homo sapiens
gagcgtgctgaagtatgctgattgctttgcccagaacaatcacacacagtgagcgtctgctcctcaacgtgggtgctggtgcctgagctgcagctcccgctgcagccttctctatagatacacaaagatttaacgttccttaaacaaaaataactgaaaggacttctagagaatatccacttgtcttataaaaggactctcagcccagagagcttctgtgctttgtcgatagtggcagaactgggatcccaatgcttctgccctgctggtttgagtcacattctccatagagcagtttgcccttcccagttctgtgttagtcagccccgttctcacttgcatcctgcctcgagtcacttgagcagcctctgggttcttccacagctccttgttctctgaaatgaggcccatcctatgcctgatgccgaggctgctcttcactcttcacgatcctaactcttgggaccgagctcg

SEQ ID NO: 648195 - DNA, 756 bp, Homo sapiens
gcggagtcggacgcaggcagatcatgtgtatcctggtgatgctgggtggcttaacagcggggctggtggctggaacgcggtgctcagatggtcagttctgccctgtggcctgctgtgtgtaccccgggagcgagccaggctacagctgctgcagttgccttctggacaaatggccgacaactactgagccaggcatctgggtggccgccgtgccagtgtttgactgccgccacctggcctcctgcgcgggccagtctctggcagtacttaaaactgtcatcaggggaaccttcagattgacttgcgccgctttcacgcaagcagtgcccggtgtgcagtcgcggcgggattcgtgccgaatcagcttggcgtcggcccacgggtggtccttcacaccttgtggctgtcacgactggggcgattccttggcttcccagccaggactcagtgtaaagggaagctccgtcgaggttgctcactccatgttgtgtcgccttgcaactcaccgttcagcgggtccctgaatctgcggcttgaactttcgtatcccgaacaggttggttgcgtgtcaaatgggctccgactcgggcatccccttgctgggggggttgcgtgtcctcggagtggtccggatgggcttctcgtgtcttgttcgcaatgatcaaggggggttgttgactcgcgcttgtcgcccgcaccctgtgttgccattctctagctgacctcgcgcctctcgacatgcgctcgccgtgttat

SEQ ID NO: 648196 - DNA, 159 bp, Homo sapiens
  misc_feature (75)..(75): n is a, c, g, or t
aatgactcgtttataaaataactttgacgaatacatacagtttcctcgggtgttgaagtcgatgtgttgaaaaanataactttcttgagtatgaaaaacatcgaaaataaagtgtaaattaaatttcactgaaaatcgtgattttacggatcttctaaa

SEQ ID NO: 648197 - DNA, 547 bp, Homo sapiens
  misc_feature (33)..(33): n is a, c, g, or t
  misc_feature (36)..(36): n is a, c, g, or t
  misc_feature (38)..(39): n is a, c, g, or t
  misc_feature (61)..(61): n is a, c, g, or t
  misc_feature (183)..(183): n is a, c, g, or t
  misc_feature (290)..(290): n is a, c, g, or t
  misc_feature (458)..(458): n is a, c, g, or t
  misc_feature (521)..(521): n is a, c, g, or t
  misc_feature (527)..(527): n is a, c, g, or t
caccacaatcctaataaatgagcctggcagagntantnncacaagcccatgtccacgaagnacgggactccaacaatggcagctttggcttgcataccaccattggactgaccaaacctttcttagaactgccagtgtgacagagggacctctgggggagggcgtcttgctttctcttgggtnagtatatctcactaccctctttgtaggttagcagatttgtaacaggatgttactggaggaaggggaagtgggaaagctggagagtattcccactcttttcccttacnacaaaaactttccttctcagtcctgtctccaggagatggaagaccaaataacacaacagccagtgtgcttttcctacccaatcctttctttcaccctcttatcctaatacatttccagcatggttaattcttttgcagcatagacaagagaaccccatacacgctggnaaaactggcaaaagggcttaggtgggaaactccccagtttcttggttgacattttcaagtggnatttanaagatggtaatttaaaaaac

SEQ ID NO: 648198 - DNA, 154 bp, Homo sapiens
aagaagacactctgggggggaagcggcggggcgagcgaagggtctggagggagaagaattgactgccccttttggctcttggagttaagccgaaatctacaaggagaaaggcaaagagaatcttgcgcttccgtggcggtcagtttccttccta

SEQ ID NO: 648199 - DNA, 309 bp, Homo sapiens
ggatcccgcatatgatacagattgattctttctgtgactcatcagttcctttcctgtacaatacatgtcttgcatgttgatttgtgaatatgaaccagatgcttgatataaacctctttatatcatgtccaggagtttgcaagaaacaggtgctttacactaattcacctcctgaacatgaaaaatggtctgtgaccggaactgcgcgctcatcgctggggctgtcattggtgctgtcctggctgtgtaagcccgtatgctaatgccagttggagacctgcttatccagaagacaattaaaaagcaagt

SEQ ID NO: 648200 - DNA, 356 bp, Homo sapiens
  misc_feature (29)..(29): n is a, c, g, or t
gagctttggaggagcctgacaattcaaanctgggcccaaacctggatcagaaaccatgccactgaaataattacatgcctgcggggggaaggcaaccttgacagagacccagcacatgatccaggcgacgcagtccatggagctctgtgaacgggctgaagctctctctcagcaggaagggtggtgggttgttggaaaggaaaacttcccacgggggaagggccaatgttcaaaccaaagcctggccaagttttgggaggaaggcttgaacttcccgttataccaaggggttctttcccgttccggaaaaaccattccccaacaccagccacggaggtaatttcaaccaaacacac

SEQ ID NO: 648201 - DNA, 239 bp, Homo sapiens
tactgacacccctgtctgggttggagggatgcggatgggtgtaggggcgaggcgcctcccgccctcggctggatgacgacggccgcagacccctttctcacctcttgcagggggtcctccccactcctgtgtgctccctctggtgtccccctgagttgtattagcaagcttaactggtatctaggagccatggaccttgaactctgcacctcactaccatcttcactgtttacataata

SEQ ID NO: 648202 - DNA, 155 bp, Homo sapiens
ttgagttaccattaagattgtgacctccagttctgtctcttttggtttgcatttccgtagtataactttatccatccttttgtccagctttcttaaacacttgtgagatgttctttgtatacagcatagagaatggtatgtacttggcaatccag

SEQ ID NO: 648203 - DNA, 657 bp, Homo sapiens
tcgaatcgacggttctcccatgctgttctcatgatactgagtgagttctcatgagacctgatggtttataagggactcttttcccacttgctttctctgtttcctgccaccatgtgaagaaggtccttgcttacccttttgcttctgccatgattgtaagtttcctaagcctccccagccatgtggaactgtgagtcaattaaacctctttcttgtatgaattacccagtcttgggtatttcttcatagcagtgtgaaaatggaataatacagatgaggttaacatttaaatcagtagactttgagtatggcctccataatgttggtaggcttcatctaatcaattgaaggcctcaatagaaaaagattgtattccactcaagaagagagaattctgcctccagcctgcctttgaacttgagactacagcaagtcttccttgcaccttcagcctgctagcctaccctgtaggttttggacttgctagccttcacaattgtgtgaaccaattctcaaaatcaatctgtccatgtatgtgtgtgtgtgtctgtgtgtgtgtcccctggtgggtttgtttctctggagaacccgggctctaattataaccatctttggtactggcataatgtgcgataacatgctgtacaattctattac

SEQ ID NO: 648204 - DNA, 853 bp, Homo sapiens
  misc_feature (28)..(28): n is a, c, g, or t
  misc_feature (74)..(74): n is a, c, g, or t
  misc_feature (105)..(105): n is a, c, g, or t
  misc_feature (123)..(123): n is a, c, g, or t
  misc_feature (182)..(182): n is a, c, g, or t
  misc_feature (243)..(243): n is a, c, g, or t
  misc_feature (245)..(245): n is a, c, g, or t
  misc_feature (275)..(275): n is a, c, g, or t
  misc_feature (293)..(293): n is a, c, g, or t
  misc_feature (306)..(309): n is a, c, g, or t
  misc_feature (314)..(314): n is a, c, g, or t
  misc_feature (317)..(317): n is a, c, g, or t
  misc_feature (333)..(333): n is a, c, g, or t
  misc_feature (336)..(336): n is a, c, g, or t
  misc_feature (338)..(338): n is a, c, g, or t
  misc_feature (340)..(340): n is a, c, g, or t
  misc_feature (348)..(348): n is a, c, g, or t
  misc_feature (353)..(353): n is a, c, g, or t
  misc_feature (414)..(414): n is a, c, g, or t
  misc_feature (522)..(522): n is a, c, g, or t
  misc_feature (668)..(668): n is a, c, g, or t
  misc_feature (681)..(681): n is a, c, g, or t
  misc_feature (778)..(778): n is a, c, g, or t
  misc_feature (804)..(804): n is a, c, g, or t
ttgtgcatggctttgcttgtggatcatntatatgccatccgcgaggcagccaccagcaacctgaagaagctagnggaaaagtttgggaaggagtgggcccatgcnacaatcatccccaaggtnttggccatgtccggagaccccaactacctgcaccgcatgactacgctcttctgcatcantgtgctgtctgaggtctgtgggcaggacatcaccaccaagcacatgctacccacggttctncncatggctggggacccggttgccaatgtccncttcaatgtggccaagtntctgcagaagatnnnncccanccnggacaacagcaccttncanantnaagtcaancccancctagagaagctgacccaggaccaggatgtggacgtcaaatactttgcccaggaggctctnactgttctttctctcgcctgatgctggaagaggagcaaacactggcctctggtgtccaccctccaacccccacaagtccctctttggggagacactggggggcctttnggtgtcactccctgtgcatggtctgaccccaggccccttcccccagcacggttcctcctctccccagcctgggaagatttctcactgtccacctcccaacgggctaggggagcacggggttggacaggacagtgaccttgggaggnaggggctactccncccacgtcagggagagatgtgagcatcccgggtcactggatcctgctgctgtaatgggaacccctcccccatttacttctccacctcccgtcctccncatcattggtttttttttgtgtgtcnactgtgccgtttttattttattccttttattttccccctttcacagaga

SEQ ID NO: 648205 - DNA, 676 bp, Homo sapiens
tgtctataggggaaaagggctaaggctatagaattcttaaaagtggatctcttcgatattcaaatataaactcatgttttatgtgatagtttactttttatagaattttgcattttgaaatactccattaacaaggttctaaaatatcttttaattttttctctttgtagtaacttgtattttgctttggtccttttttccttaaagagttattatttcagagttatgtaaacagtttatttttctaataccacattgatttctcagtcttcacatctacatttccatattggacatgtgattgttatcaaattaggcatacacttatatgatttcgtccagtgtgggtgaacattttttaaaaacgaagtgacaaaggacttttgcactaccagccctcatagcatttatgcatggtaaacagtagatggtgctataaccgtgaggcatagcaaactgaaagtagttgtaaattgctctttaagcttgtagtaaactaaatatttgccctttgccgtctttgtccgcttttccctttgttctttgtggttcattcatttaacgggattacaaagacctactagaattggaccctggttcctgtgggttgcgcttgaccctttcggcgagttccccaggggtccccagagttattggacctttctcaaccgagggg

SEQ ID NO: 648206 - DNA, 857 bp, Homo sapiens
gcagcattcagtaccagttcctgcgcagatacaagttggcggatcaggtgacataccgcgtagtccatgtgactgatggtcagcttgacggtcagggcgaacagctggtgccgtaagcgtcgtgtcaccgctgcctctgtgcccccaggtcctgcgcgcccttccctgtgagacatgtgatccaaaatcccttcagcactggtggcagtccgcgcggtcgaggtctgtcaggatggggaggcaacgagtttgcgctatatgaccgcagacgttccaggtggtgggagatactaccagctgtgtcctgtactagaccacagagccagagtcttgcaggctggaggccagttctacgtcatgatgagcgccccaggatgatgctacagaacaggaacacatatcgacgactcgccccccggacgacacccttactctccaatgaggtgatggaaccacgaagaccccgagatgagaggagaagagcccagcagacacgagtctggagcggagagcggaggggacaggatcgagcgactggcatcgtccagctttcgaaaactcatccatactgtaaggcaggacgacgagcagactgggagcccactagaggggagggagacctggtgcaaggcctgcgaagaacatccagacgagttgacacagaacagagcagcgcagtcatcgaagaccgttcaaaaagcccgcgtagaaccagaatggccaaagacctctgaaagagcaaacgaagaagctgaggacagcaaacgcacggaccaaccagaggaaaaggtaaccaggacatgtgcaagacacccgcacagaacacccccaagcaagatcatccacgcaaaaaccct

SEQ ID NO: 648207 - DNA, 341 bp, Homo sapiens
gctggagttggagactgagaccagtggaccaaaacggcctccggaaaaaccccggaaacatgacagcggtgcggcggacttggagcgggtccccgactatgcaaaggagaaggagatccaaagttcccatctggagacgggagaaaaaactggcaaaagtccccttcaagaagggaagatctggagctaataatgactgagatggagatatctcgagcaccagcagaacccagtttgcgggaacccatgggcaacgtggtaaaggcgcttattgccctaacccactgatgcgggctttttcaaatatacccactggattaatttatggccataaaattttt

SEQ ID NO: 648208 - DNA, 375 bp, Homo sapiens
caggcccgaacaatccccgaacaatcgtggtcctgtggagtgacttggttctggccaggactaaagccgccaggctggcctccagcctgaatgctcgctccttgcatgcctgctccctgcatgactgggacctatgtgtacagagagagataaggagagatttttccatacttctcatttaggtaaccagaaacgagtaattacagcaatgtgaacaaatgtgacctggttatggacttgagtaaaaaatgcaaattaatgattctgaacatcatttcctactgttagcaacagcagaaggcagggtttagccagagatcaactagcaagtcagatgcatttgcctaattgttcggggcctggggtaccgagctc

SEQ ID NO: 648209 - DNA, 298 bp, Homo sapiens
gagaactagtccgagtttttttattttttagtctcccaggctagaggtctaagatgctaatgagacatgcaaaatatgaataagcatgtacagctactgcacatgtgcacccagaagaccactcagaacaggcttactagcagctcctcttcccccctccttactaataataatgtaaaactcccataagggggtttctccagcgacaatccacgctgtctcactcttatgagcagcccgccctggaatatctctctcacggcgtactgtattctgcacttaactttcaaaaattttt

SEQ ID NO: 648210 - DNA, 299 bp, Homo sapiens
tcattttgttgagatggagtcttactcactctgtcccctagggtggagtgcaatggtgcaatctcagctgcaacctcaacttctgggttcaagcaattctcctgcttcagcctccctgggattacaggctcccgggttcacgccattctcctgcctcagcctcccgaggcatgacaccacacccggctaatttttgtaggacagggtttcaccatgttggccaggctggtctcgaaatcctgagctcaagtgatccgcacacctcggcctcccaaagtactgggattacaggtgtgagg

SEQ ID NO: 648211 - DNA, 194 bp, Homo sapiens
ctggtcgcgtacctcgaacctcgtcacgcaatcgtcgtccacccccagttcaccgagcccgaagctgctctgagagcggccgggattagcgtcggtcggcacatccttaacgtgtccagatgggttcgccctcgacccggatctcgtccccgacgatgccgacctcgtcgtcgtcgggaacccgacgaatccca

SEQ ID NO: 648212 - DNA, 280 bp, Homo sapiens
gaggatccccccggtagactgtcatcatttcaaactattaaaaataaggttagccaccataccttttcttttggtaataggggtgttattatttatattaagcagaaaaaaccaaacattttgcccagactctagagtttcccaactatcaattctgttttactagctgtgcaacttccccaccttcacgctagtatccccaagtcccgccaccaaattctaggctaggcaggaggcagagcaagctttcattctggtcatcaagatgacagtctaccgg

SEQ ID NO: 648213 - DNA, 227 bp, Homo sapiens
cgatattctgggatgcagcagctactgcccacagaaaagccatttccccgtggccttgatactcccttttaagaagtggtaaactggccgggtgcaatggctcatgcctgtaatcccaaaactttgggagtcccaggcgggcggatcacctgaggtcgggagttcaagaccagcctgaccaacatggagaaaccccatctctactaaaaatacaaaactagccaggc

SEQ ID NO: 648214 - DNA, 1436 bp, Homo sapiens
tctcatttttctctctcaaaacattattttttccccctctctctctctctcagatactctctttgtgacccctctttccccacaaatctctctcagagaagtgtgttttaacaccccccggcccacacaatttcttaaaccccccccataggccttgtgggagaagagagggcccctctccacagggttgtgtgtgacaaggtggattctccctgtgtgtgagatatccacaaaaatattcttctccgcgaacagtgtctctagcgcgcgcgtgtgtctcacacattttgtgtgtgtggcacgcgcgggtgtgacacactgcgcgcgcgaggtgtggtgtgtgagacacagagttgagagtgcgcgcgagagtgctcttcgcgccaccccaacctcactgtgcgcgcgtgtgagagacaacacacacgcgctctctcaaccaacaagtagcgcgcccctctctctctactatatatatataggtgcgctctctctcacagcgaggagagagagagatctctctcgcgcagcctgtgtgtgtggagcgaacagagaccgcgcgtggcgagagagagaaaagagctgagagagtatctgcgtgtgtctcgcgaggagggcgcgctgagagagtgtggagagagagagtggtctctcaagacaccgcgcgcgagaagagtgtgtgagacactctcttattctcttctattcttctcgaagagagaagtgtctagtagagagaagagcagagagacccacaagagagaccccctgcgagaagaagagaggagtggtctccaaccccccccaacaagcaccccccgcagagaataaaaagcgaagacaacacaccacgatgtggagctccactacatacgactgatgatgaagacatcaatatcatgaagaagaagagacaaccaacacccccaccactgtggtggagggccgatggtggctacccccgaggaaaccaccgtggtgagggaaaaaaaagtctctcaccccaacaaatagtaggtggacggcgacgtgtactaatagaaaaagaactacggtcagcagaagggagcgaggaagcctaacttctaccacgagaggggggagacgcgaagcaggagaagataggcagaccccacccggtgcggataatatttgcaagaaacaccaacgacaaagaatcaatccacccccccccctgatgagtgaagagagaacaatgaaggagggaggaggagggcggactaaaagaaacaaagtcccccccacccacggaagggggcgcaccccaacaaccaccaacttgttgagagagcgagtgagacaaaacaaaaaaaacggccaccaccaaacacaaaccaaacaggctggggggggggggacgaaaaaacaacaacgaaaacaacacaaagagagaataaacaacactagagcatgag

SEQ ID NO: 648215 - DNA, 854 bp, Homo sapiens
tttttattatgagttaatatagtttagcagtaaaaaaaaaaaaaaaaccacacctaaaataaaccactggggaaaccataaagcggatgctttcatgccccctttactggcactttctggaccagggagctacttggagttgggtggtcactaaggatcaggggtcagtcttgggcttatcaataaatttaatctctggtgaatcttacctggctttaaaaaacaagttctggtggttggtcgtatctttatttatcccctagtttggcagaactggtctgaataaagggatacaagggattatttccaatggttactggcctgaaaaacgtgtttgtatagggtggctagattattagcagaatattcacaagtttcgggtggacctgtgtggattgagcatgactactacattttttgtatctaaaaagctgtgtcataacagtcttatgaagtagtctcgaatatagaaagttctataattaagccatgaaaggataggtttcaatttccagaaatgggtgttgtgaatgggatcccttgtttatattgtgaactatgggctttacgccataaccagaggatactggctaatttatgggaaagtttaagatacctgatgggttttttaacctttctggacgtggggtgttatttctatggcactggagcacgaatgccgtaattggtcaataaagactccaacgggttgggcaaaatccgaaatattaggtctttacatcggagaataattgaatttccgagggtaagcaataccaaaaaaaaactgtggccggcaaataacatggggccaaaaagtatcagaggcatggtcaaaggggtaaatggtagaa

SEQ ID NO: 648216 - DNA, 366 bp, Homo sapiens
  misc_feature (349)..(349): n is a, c, g, or t
ttcaaagccatttaacaagtttctaggaagttccagactttcccacattttcctgtcttctgggccctccaaattgttctaacctctgcctgttatccagttccaaagttactttcacattttcgtgtatttgtacagcagtgccccactctactggtaccaatttactgtattagtctgttttcacactgctaatagagacataactgagactgggtaatttataaggaaaaagaggtttactggactcacagttccatatggctgaggaggcctcacagtcatggtgggaaggcaaaaggcgcttcttatatgggcggccaaggaggaggaatgaggggaaccaagncaaaaggggtttcccct

SEQ ID NO: 648217 - DNA, 143 bp, Homo sapiens
aaaatgacgaacacaaagggaaagaggagaggcacccgagtagtagtgtgtcgtcgtaggcacgtgtgtgtagaaaacagtggaggttgttcactgtgtggcacacagtagtagtgacgaagtgtagtaaggaaagggtgagt

SEQ ID NO: 648218 - DNA, 364 bp, Homo sapiens
  misc_feature (323)..(323): n is a, c, g, or t
  misc_feature (336)..(336): n is a, c, g, or t
ggttagatatgattgcttatcgtccagagtgccgttgctgcgcggagctagagacaacttcgatgaagtagatgaaccggtcatcctagggcgtcggtgaccgctgtgcatcactctgcaggtattcggaacgaccatgaatcgaattcgacctcatacgttaaaggatatcctgtgacaacgagtatgactagaaccaaagagaccaagacagtgacccgagcattcatgcatgcgtcatagcttcgtgatgttgtgacgtggcactgtcgtaagtctctcttgctttggaagactgtaggagacagaagcaagacgggcgnatactgcgaaggnactcgcttgctatcatcgaaatagatca

SEQ ID NO: 648219 - DNA, 167 bp, Homo sapiens
ttttgtctagaaaggcaacaagcaaacacggagaagaggaaggactagcccgtcaacacagcctctgacttcatcaccaagatagagtaccccaagcagactcagagatctcaggtccttcctgcagggcgagatgagaccaccacgtgttcaagacagattcttca

SEQ ID NO: 648220 - DNA, 171 bp, Homo sapiens
actgtgtcaggtctaaaactatgagaacagtaccagcaccaaccactcaaggagctgagacggctgacccactctctgcctctggctagcgactggcacccaggcagcccccagatgtggatggccgcatatgatcccacgctgccaaggtgcccagtgaacactatgcaa

SEQ ID NO: 648221 - DNA, 339 bp, Homo sapiens
  misc_feature (67)..(67): n is a, c, g, or t
  misc_feature (230)..(230): n is a, c, g, or t
  misc_feature (327)..(327): n is a, c, g, or t
  misc_feature (330)..(330): n is a, c, g, or t
gaggctggacccggccaagggcagggagaggagctgggcctcccacagggggcccgggcagtgccancctggtgggggagggcagccttcaaacgtgtggggtcaacagtcctcaggtctaggcagggcagccggttcaccacctccccagccgccccaggcccccagcctgggcctgccatgcaccccctctgcatgggccacggtgtctccgcattgccagccttttngccttcacctcttttctaaccccgccccctgcacattcggggtctcagcccccaggctgtgagctccttgggggcaggcccccaataaatgtgaacngcngcggccaaa

SEQ ID NO: 648222 - DNA, 356 bp, Homo sapiens
ccattttgtggtaaaaaaaaggttttaggccaggcgccgtggctcacgccttgtaatccaacactttgagaggctgaggcgggcggatcacctgagtcaggagttcgagaccagcctggccaacatggtgaaacctccgtctctattaaaaatacaaaaattagccgagagtggtggcatgcacctgtcatcccagctactcgggaggctgaggcaggagaatcgcttgaacccgggaggcagaggttgcagtgagccgagatcgcgccactgcactccaacctgggtgacagactctgtctccaaaacaaaacaaacaaacaaaaagattttattaaagatattttgttaactca

SEQ ID NO: 648223 - DNA, 146 bp, Homo sapiens
ggaccaacttcgacacatcaggctactttgggacagtggtatgaagcattaccacttaaagaggaacagagcttctgcccaactgtcaaccttgaaaactgtggacttggtcagtgaacagacacgggtgaatgcgtccgtcgaag

SEQ ID NO: 648224 - DNA, 382 bp, Homo sapiens
atcccctcagcacctggaggatgttgtagtcagacagcgctgcgccccctcttccagctgctttgccggcaagcatcaacctctgctggtctaggacgaatgccttccttgtcctgcatctttgctttgacgttctcgattgtgtccctcggctcgacctccagggtgatggtcttgccagtcagtgtcttcacgacgatttgcatcccagctctcagatggagcaccaggtgcacggtggactctttctggatgttgtagtcagaccgggtgcgcccatcttccagctgttttccagctcagatcagcctctgctgttcaggagggatgccttccttatcttggatctgtgccttaactttctctatggtctccctgggct

SEQ ID NO: 648225 - DNA, 419 bp, Homo sapiens
atggacgtatcacatcctgactgtgtatatctagccgcataagctcccaaagtgccggattacaggcaggacgcaccgcaccggcctgtttgtttgtttttgagcctgagtcttgctctgttgcaatgggctagagtacaatggcatgttctcggctcaccgcaacctctggctcctgggttccagcgattcttctgcctcagtatcccaagtagctgagattgcaggcatgtgccaccatgctcggctaatttagtattttcagtggagacagtttccccatgttggtcaggctggtctcgaactcctgacctcaggtgatctactcactttggcccctcagggtgctgggattacggacgtaaggcagcaaacccaggcaggccttccttcttaatacattgcaacacggtctctca

SEQ ID NO: 648226 - DNA, 155 bp, Homo sapiens
tggagtccaggatccacagctcgtaaaccaggtcaatgaatgtatttctttataagctagctgtactctagaaatagcttctgaaaactggttaccccataatttataaatattctaatcatgttagcagattttataggttctttgagcttgtg

SEQ ID NO: 648227 - DNA, 418 bp, Homo sapiens
  misc_feature (418)..(418): n is a, c, g, or t
agaagtcctgtcacacggcactaggccggggctttgcttgggacatactgataggctaactttactgagacttacctgagccacgtaaacctcttgagaaagcaggggccaatttctgctcgggcagctgtgccccttgtgcggatgggaacggactatactgcagctgtgtgaactgtgttcagagtgaggctgattcacccttaaccaatacttcggctactagggagcctacaagtgtctgcaggatgatgctgtggatgaggcctatggcaagcactagactatatttgagaacttggccaaggctgacagggaccagtatgagctgctctgcttggacaacaccctgaagccggtagatgaatacaaggactggcacttgtgccaggtcccttctcataccgtcgtggccggn

SEQ ID NO: 648228 - DNA, 595 bp, Homo sapiens
  misc_feature (329)..(329): n is a, c, g, or t
  misc_feature (343)..(343): n is a, c, g, or t
  misc_feature (355)..(355): n is a, c, g, or t
  misc_feature (371)..(371): n is a, c, g, or t
  misc_feature (404)..(404): n is a, c, g, or t
acgatggctggaatggctgggcagtgtgagaatatcctagtgagtgagtcgtgactgaatacctgggttcgtggagtaatctgctactgacgtgagcatgcttaagtgatggctagcgtgtgatgtataaaggcagggtgagcgataatggctcctgagcataatccactgagaaacctcccacctccccaaagtaacaatttgctgtaccccaagggacagacaaggacgaaccgacattctgctctaggcgtgccggacacctgtgattaccacgcaggaggccgacaacagttgcatctatgtcagcaagatcacgcacgaagtgnacgaactgacccanattatcgccgangtgtccaggaccccangttgccgcggaccgaggaccacccgtgccaaangtgcggccacaaggaggctgtgtcttccagtcacacagtgcgcgcgccggaggacggccatgcgcctttactacgtgtgcacaagcccaacaatgcggcaccgtggaccgagtgacctctctatcccccgagtgttacttaaacaccaagatttccacgaaaaacaacctacgcaaacgtccaacaacaac

SEQ ID NO: 648229 - DNA, 140 bp, Homo sapiens
caagtgagcgaaatcaggtagacacttgagtaggggcaggtggcagcaccaggtctctgatagccttcccttggcccatcaggctgaaacacggccttcccaggcagctgctggcagggaaggccgtgtttcagccctga

SEQ ID NO: 648230 - DNA, 545 bp, Homo sapiens
ccactcagtcctcctaagtagctatgactacggtctgtgcaacatgtctggctaatctttttattattggtccaggcgaggttgccctgtgtcgcccaggtcggtcttgaacctcttggctcctgtcatatctctgcctatggcctgcgcacggtgctcgaattcatgccgctcaccatccacacggctgagctcatacatcaagccgttagcgtgtggcccaagatccccaccataaatcacatcattagcatgaaccagtcgcagtagtgatcccagactcccagatcagctaccaggcaggatattccaagggcttatatattaatgcccaggagccgaggataacgggcccgatctttctttgggcgccggttaagcctttactgcatagccagaccacacagaatggtgtgggccaccagagaattctggtaaaaatatggcctctggcctttagcttctaaatctctgtatccgtcagatctctgtggttaccagaaacagccatctgaccctggtcaccagaggctgcaattcaggcc

SEQ ID NO: 648231 - DNA, 252 bp, Homo sapiens
gaggaaagcctctctgcagttgagatggaggatggccactatctcctgcttgcccctgggaactgaatgtctcggtgtaaacccgattgtacatttgttcaagtctgagctaggagagaagctgtcctgtggcgggaggcgagacatgttgcagtaacgctgccttgccattctttactccactgagatgtttgggtggagagaatcataaatccttggcgcctacgtgcaagtccagtcatagtaccttcc

SEQ ID NO: 648232 - DNA, 180 bp, Homo sapiens
acgagggatgcggacaacaatcttctgactgagaaggagaagctgtgtgtgaagaagatccatgagaatgagaatgcgcctggaggcaggagacctaccccgtgaagctgctggtccagctgagcgaacttgcagtgtacagggaagatgtacatgtaatagttcttctcgaagtcccgg

SEQ ID NO: 648233 - DNA, 373 bp, Homo sapiens
aaagattttcaaaaacaaccccagattgtttgccgggttcccccagaaaaattgcggcttctctaacacactaaaaaggcttgtagttgcttgttagcaaaatggataacacacatctctgatacttttttcattatggggggggcggaacaaaaaaaaaacttggtcttctttttttctttgaaaaaggagccggccccctgggggaggtaacacaacctctcccagcgggggacaccgggtgccccttcatgtacacccggggggggcgggctaaaaatgtaattattcttgtaaatatacccctagtaatttaagattttgtttttaaactggaaaaaaaagattgtatagtgcatgttttttaaagtca

SEQ ID NO: 648234 - DNA, 188 bp, Homo sapiens
tgcggcaccggttcgaactgacggccgagcgcgctcatcggtttcccgctctggaccatgacagccagcacctgcagggcggcgatcaggccgtcgccggtggtcgagaagtccgacaggatcaggtggcccgactgttcgccgccgacattgaagccgccctcgcgcatgcgctgcatgacgtagcg

SEQ ID NO: 648235 - DNA, 399 bp, Homo sapiens
tgctctgagcacactgtggtctctataggaccctttgcagtcccttgggcatgagattccaaccacggatttccgaatgttatctctggctctcccaatgtcacggaggcccacgctggtaccgagttcctaacggtcggcactactgacagggccgtacaagtgccagcaagtgtccttattgcgcagtgcatatatgaaccttgtccaccgatctcgtatcatgtgctataacgtttgtagcccttctgaactccataccaaaataggtatagtcagcctgttatgacaagagggccctggcaacataccagtccagcagtctcatagtgctgtgagcatagcaagatccacatgcaccatctgatatggtcactcacacatgtagccccaaagccc

SEQ ID NO: 648236 - DNA, 429 bp, Homo sapiens
  misc_feature (103)..(103): n is a, c, g, or t
  misc_feature (112)..(112): n is a, c, g, or t
  misc_feature (289)..(289): n is a, c, g, or t
  misc_feature (299)..(299): n is a, c, g, or t
  misc_feature (337)..(337): n is a, c, g, or t
  misc_feature (346)..(346): n is a, c, g, or t
agagactgcgcccagccagtattgattggctgctggatgggctcgggcgcacgtacatgcgcaggtcggcgtagtgctcactcatggtcgcctctcaggcaancgggtgcangggactgtcgatggccttgaggccgtgacggctgatcaactggccgtagccatgcaccaggaaaccaccgctgcgcgccagccactgctcgcgccgggcacggtacaccctgggcagcaggtatcacggcaactttggcagatcgtggtgcaccaggtgccagattgttgttgaganacagccaggnccagggccaggatgcttcgttgagcactgtgcgctgtnccggccgangatgggggcggtgctcatagtaggaacggatcgaggccaggcacaaggctggcacgttgaccagcagcaggtagtgccacacc

SEQ ID NO: 648237 - DNA, 105 bp, Homo sapiens
  misc_feature (13)..(13): n is a, c, g, or t
aatgttaacactncggtcgaaggttcacccagcccacgacggaaaaacctcctctactggctggggctctgagagcgcccacccgcataaaccctgggtaccttt

SEQ ID NO: 648238 - DNA, 842 bp, Homo sapiens
acacgcgcgcacgggattctgctccgctccgcggctcccccgccccgtagagctccgcgatcagcacccgggacagcgccaccgcccacgtgcagggggtggggtccgggtcggggctggcgcctcggcgtctcccgtggagtgtcccgtccgacgccgcgtagcatgggtgcttgagtgtctctgcagaaaagactctaggaccccgccaccatgttcccggagcccctaatccccggggccttcctatctgcccgacgactgcgtcccgactccagtcgcatcagccacggtccagtgcccaccgctgggccctgtgcacagcaatctgtgctaggtcttcaagagctctcgctctatcattcaagtctgcgtgtgtcgtgtctcataccggaagagctgtcaggaggctggacaggtcaagaagaagccgagggcccaatgcccaggtccaccttcaggacagtgaacggggctgggccatgagttagcataggacctaacggtgctacgctcagaacgtatgatggaacgctggaggcctacgtcactcactcacggcgcccagggcacgcatgtgttggcaagacaacgcatgaagctagggacgacgtgcagtagtcccgtggacttatgacgttccatgagtggccgagctgctggtgggcattctggctaatgctaattgggattggcagccttggatcttggtggctcctcggaccccatatgtgcgggtctacctgctgccggatcaaacggaggcggtactgagaccaacgtgcatcggtagtaagcttgaagcctcactttggggagaccttcgccttcaaggtacccta

SEQ ID NO: 648239 - DNA, 691 bp, Homo sapiens
  misc_feature (456)..(456): n is a, c, g, or t
tctctctttctttcacggcagcgacacacgctctcgccgccgccatgactgagcagatgacccttcggggcaccctcaagggccacaagggtggggtaacccagaatcgctactaccccgagttcccggacatgatcctctcgcgcctctgcgagataagaccatcatcagtggtggaaacgtgaccagggtatgagacgcaactatgtggaatttcccacaggcgtgtgttcgtggcggggttcacctccccacttgtgttaggtgagtggtggttatctcctcagagtggccagttggccctctcaggctccgtgggagtggaacccgtgcgcctcgtgggatctcacaaggggcaccaccacgaggcgattgggtgggccaataccagggagtgtgctgaggtggggccttctcctcgacaaccggaaggtccgggatctcgagataaaccancaagctagggaaaaccgggggggggtgcaatacccggccaggatgagagccactcagagggggggtctggggtccggttctcgcccaaaaggagaaccctataatcgtctccgggggcggggacaagcgggtcaaggttatggaaccgtggtaacggcaagctgaagaccaaccacttgtggcacacaggctatctgaacacggggactgtcctctccagatggatcctctgggc

SEQ ID NO: 648240 - DNA, 137 bp, Homo sapiens
ctctagaggcatcccctcgtttatcatcggcacctcgctattcatcggcaccattagctctagaggtccatgcatacttaatattaaacttgaatacaatacgggtgccgataaatagcgaggtgccgatcaatgga

SEQ ID NO: 648241 - DNA, 699 bp, Homo sapiens
taaaggttggagggggaatgctggaaatggtaatgggtatggagacatatcatataagtaatgctagggtgagtggtaggaagttttttcataggaggtgtatgagtgggtcgtagcggaatcgggggtatgctgttcgaattcataaaaacagggaggttaaaagtagggtctgggtgacaaaatattgttggtgtaagagttcagggtgaagagtgcgtcatatgttggtccctaggaagattggtagtgggtgagggtgtttattataataatgtaggtgtatctacggctatgaaaaatagggcagaaggggcctgcgaggtatccagatgttgaacgcctgagactagttcggaccccccttcggcaaggtcagaagggggtccggtgggtctcggctagcgggggagataaatcatataatgggccaagggtcatagagggcaggagtaatcaggaggtgtcctggtggctggtgacaaaggcgtgcgacagaggtcaactggagccacttattcagcacatggttgggatcacgcaaaaagcgagggctaagggggactcccatcatgaaatggtcggggcaactcgctcgcagtggcgccgatcaggcccgacagttggagttcggaggcccacccggatccagcaggctccggagctaaccacggctaggccaaaaggggggtcagaata

SEQ ID NO: 648242 - DNA, 228 bp, Homo sapiens
ataagaaaaaagaaaaaaaaaaaatcactgattgcaggtcaccctaacagatataataatgaaaaagtctgagatgttgcgagaattaccaaaatgtgatgcagacacgaaatgagcatgtgctgttggaaaagtggaacagatagacttgctggagacagggttgccacaaagtttcaatttgtaaaaaatgtgatatctatgaaatgcaataaagtgaagtccaat

SEQ ID NO: 648243 - DNA, 90 bp, Homo sapiens
atagagaaagaaaactcaccttgcagagcgccaagtcccgagtggccttctttgaagagctctagcaggtgacccagccaccccaggacc

SEQ ID NO: 648244 - DNA, 339 bp, Homo sapiens
tttttaaaaaggggttttttgggcccacccccccggtggccggcaaacccggtggggtttttccttgtttaaaaagccccccggaaaaagggccgtatttagggttttttttttgcctcccccaaaaatgggtggtttggattaagcacgtttgggccctggggtataccccctgggtatttaaacccccgggggttttggggagggtaacccccctttttatgggccggggtttccccgggtgtaaggggggccgccccccccccccccccccccccccctttttttggggggggtaaaccggttttgggtggccataaacccctgggaaatttttta

SEQ ID NO: 648245 - DNA, 108 bp, Homo sapiens
caaaagcacctttttgaggtgaggtttagggggagcctccaaaaaagagccattggggccttttaggtataaccccattttttccctcccactcagggaggcctatca

SEQ ID NO: 648246 - DNA, 740 bp, Homo sapiens
  misc_feature (260)..(261): n is a, c, g, or t
  misc_feature (267)..(268): n is a, c, g, or t
  misc_feature (352)..(352): n is a, c, g, or t
  misc_feature (357)..(357): n is a, c, g, or t
  misc_feature (603)..(603): n is a, c, g, or t
gttggccaggctggtcttgaactcttgacctcatgtgatccacctgtctcggcctcccaaggtgttgggattataggtgcctagcccatggtgcctagccctaacctacatttataaactatcacttgctgctgtgtggagactatattgtgagattaacagcagggatacctgctaggaagcaattgctgcagattgcctgagacaaaatagttatcatggactatggggatggtgttggtggtggtgtaggtggtttnnaattannatatattttgaagataggtaaatggtgcaagattatgggtcagttttaaatgctgaagtaaatattttttgtaagacattttangatgncatgttgagaatatctttataactgtattttaaaaaaaaccacatattttctaagcataaattcccatagtaacatcactatgtcaaaggctatgaacatttgaatgactctagataaatactgtaattgctctcccaaaatatgtgcttataatgtcaccgaaaggtgtgatcctgttacattcaggctggccagatagtcatttattttgaaaaatttttacttgtagatggaaaaatatattntaaccgggagtggggggccatggggaaaacctccctcattaatatttattgggaggtgttaagatacctttttatcggagttcctaggcccaatagaaccctggacccttgtcctattgttacttttgaggtgtctt

SEQ ID NO: 648247 - DNA, 401 bp, Homo sapiens
ctccaggagtctctatgagcaagttgtcgcggcttccattctgggacatttcatcaactggcgagcgatgagcaggcagtgagtaatgaaggaggccaggacgattatagccaaagacagagatgcgatttcgggacatcaaaagggaccagcgtatactgaagacacagcagttggtgatggctggaacttttcgagggcagaacagtacccctctcttcttatgatcttcttcctgcctcattcagcccccatgcacgtagacttggtccgttcagaaggacacctgcatcctcagggcttggatggacttgaacatgtctttttctcagaacttcatctccaagcccgtaattaatgagtgaggctgttaacctgtacacttacctatttcacaatcg

SEQ ID NO: 648248 - DNA, 159 bp, Homo sapiens
  misc_feature (153)..(156): n is a, c, g, or t
gcggccgcctactactactactgctcgaattcaagcttctaacgatgtacggggacatgcgctggttccagcagaagtatgatgggatcatccttcctggcaaataaattcccgtttctatccaaaagagcaataaaaagttttcagtgaagnnnnaaa

SEQ ID NO: 648249 - DNA, 429 bp, Homo sapiens
  misc_feature (208)..(208): n is a, c, g, or t
  misc_feature (237)..(237): n is a, c, g, or t
  misc_feature (244)..(244): n is a, c, g, or t
  misc_feature (271)..(271): n is a, c, g, or t
  misc_feature (289)..(289): n is a, c, g, or t
  misc_feature (299)..(300): n is a, c, g, or t
  misc_feature (307)..(307): n is a, c, g, or t
  misc_feature (318)..(318): n is a, c, g, or t
  misc_feature (423)..(426): n is a, c, g, or t
tccaaaggtagatacacggtcagatcctgtggcatccggagaaatagaagaattgctgtcccctgcgcagttcgaggggccaaggcagaagaaatcttgtagaagggtctaaaggtgcgggagtatgagttaagaaaaaacaacttttcagatactgggaactttggttttgggatccaggaacacatcgatttggggatcaaatatnacccaagcattggtattacggctggattnttgtggngctggtaggccaggttcagcatcgagncagaagcgcaggacaggngcattgggcnnaacacanaatcagcaaanaggaggccatgcgctggttccagcagaagtatgatgggatcatccttcctggcaaataaattcccgtttctatccaaaagagcaataaaaagttttcagtgaagnnnnaaa

SEQ ID NO: 648250 - DNA, 141 bp, Homo sapiens
gctcgactctaacaggatcccccatcacgcagcgtaaaaggctcccccgaaacacacgcaggttcagattccacataacacatagtctttaaggaaccaccatttgttgagttttagtgtagtatcaaagaagactatact

SEQ ID NO: 648251 - DNA, 356 bp, Homo sapiens
aaaatatccccccagaaacaatccaaaaattaccaaaagtttcccccagagccttatataccctcctaagcctatatgtcctatgtgtaccgtgtgcattccatcctaaagacataagtaaagtgattaacttcttcctaatcctataactaagatcctgaagtccctgaaggccttcccttggagccttcgtaaattcatttaatctaaatgggtgaaggtgctggggtgattacccttatcttgtgtcctgctaaatcacagggttttggggagttcctttagtccccagtaaagcttgtttgtgaaggtctggggagttccttaagatccacaataaaacttgtttaatccta

SEQ ID NO: 648252 - DNA, 612 bp, Homo sapiens
  misc_feature (612)..(612): n is a, c, g, or t
ctatgcttattacctgtgtgatgaaataatctgtatatctttcccccttgagagggcagtccactctacatttcaaatatgtacacataccccgtacctaatctaaacgtttttttttacattttaattgcacctttttcccaaggggcaaaatcctttgagaggcgcttctttagctgctaattgacaatgcacttggaaaagctccctaatgtgggccccgggggggggcgatttatatcccaaatttggaaatttctttcggcttaaacaaaaagccccccccaagggcttgattttggtgaaacttgacttcacggcaacaaaaggtttgagatttctatttaagcttaaatgacgacacctcttgggggtcaaaaaatggagatacaccggggggttcatttcctgaataaaatatttgaccttttacaagaaaggcgcccaggaaggggggaggcccttttgagacgggccaaatgtaaaaataccccgggggggggccctcccacttttattggccttaaaaaaaaaacctgggggggaaaacactttcgtgtaaaggcccaaaataaacttgggtgtggggcccaccctgttagcggctgcaan

SEQ ID NO: 648253 - DNA, 1027 bp, Homo sapiens
ggatacgggagttcctccttgctctcgcccctactctttctggtgttagatcgagcaacccgtcgtaaaagcagtttagagtggtaaaaacaaaaaaagaaagacacaccaaaaggctcggagccaacaaaggggttgaaatttcttcgggacaatccttcctgggttcttccgggtaacgggtcggctggcgtcccgtagagtccttcggggaaggcttttatattcctaaggagggcggaaaatcaggtcaccgggcggaaatcggggctggataacagggagctggggcattgggaattggggaagactggacttggcgctatggaattgggctaaagtcttaaagagcaagctgggttctctggggatataaataaggcttgggatctgggagggaaacaagttggccaaatggcaaggggatctggggtggccaagggttgcatacctttgggggtagactggcagaacccggagaaagaatatttacacgagctcgtgcgaaagcacagggtgcagggccaggaaaatgggcagaagtgctgagactactattacagtaaaagtaagggccggggtggaaaggtcttatacattccagcagttgggttgggctaacaacagagaagtccttgaagaatgttggacaagagaagcctttttgagagagggttaaagtggggcgattgttgggacccaatttttcgtggggagcattaaccagaaagggggcatttggattttcgcctgggaggaatggggacagaaaagaaaataaaacccaatggggtcccacataatttgcgtccaccacctgtggtggggacatatacggaggaaaggtcttgggacacattgtgtcctccgggggtccctcgctttttcttaaacctgggggcttaaccgggtgtaacaaacgcacaaagtgttatggggtggaggtagtggggaactttccattgaacaagttcttggcaccggagttggacattggggctgggctcattaaacacaatatattgga

SEQ ID NO: 648254 - DNA, 251 bp, Homo sapiens
  misc_feature (14)..(14): n is a, c, g, or t
  misc_feature (44)..(44): n is a, c, g, or t
  misc_feature (68)..(68): n is a, c, g, or t
  misc_feature (153)..(153): n is a, c, g, or t
  misc_feature (185)..(185): n is a, c, g, or t
  misc_feature (208)..(208): n is a, c, g, or t
  misc_feature (237)..(237): n is a, c, g, or t
ccgagatgcgggtnacggcgccccgaaccgtcctcctgctgctntcgggagccctggccctgaccganacctgggccggtaagtgcggggtcggcagggaaatggcctctttggggaggagcgaggggaccgcagcgggggcgcaggacccgnggagccgcgccgggaggagggtcgggcgggtntaagcccctcctcgcccccaggntcccactccatgaggtatttttacaccgncatgtcccggtccg

SEQ ID NO: 648255 - DNA, 948 bp, Homo sapiens
attctctcatagttatagatgcctggaaatctacaactcaagggtgctagatcgtattagggttccttctgcaggactctgaggatctgttctatgccttaattcctaacctctgttaacagcgtggcagtccttggcattccatggcttttacatacaccattccaatctctgcctccatcttcacattgcaattctcgcgtgtgtatctctgtgctatgtcattacatcagggacaccagtcaggtcacgcatgggggatacccttggttgacctcatcttacacttgactgatattctggccatgacccctgtggtcccaaagtaaggtcacatttaccggtaccatgggggttcacgtgcactttcagcatatcttattcaggggcatacagttcaagcccataataccctgtacacactgactctggtctacttatcatcggcaattgccctttgtatactttaagtgggccagttcacaatgcgactgtaatctaactattacatttcgggacgatcagagttctgccgctcctagatagagccacaggctatccacgtcgcacttgtttagtgatctccaggctacacttggcagatccttccgatgtccttttgacggttacactgaccgcgaagtatacttgtgttgccccttcatagtgcgttcgtagaaagggcaacgattcgggggcaattatcactggggctctattgtttgcgtccctacccacatgtggtctccgggggcaaaacacattgattatgttttatgtattgttatagtgtgagaggtgcatatgttcataatcgtatctcataccgcctacgcggggtcctttctaaaacactatgtcttggtagtgctacccccgagatgaggttggggacgcttagttgagaaaccacctgcattgagtactattaacaacagatgatacaca

SEQ ID NO: 648256 - DNA, 454 bp, Homo sapiens
  misc_feature (23)..(23): n is a, c, g, or t
  misc_feature (29)..(29): n is a, c, g, or t
  misc_feature (52)..(52): n is a, c, g, or t
  misc_feature (259)..(259): n is a, c, g, or t
  misc_feature (348)..(348): n is a, c, g, or t
  misc_feature (371)..(371): n is a, c, g, or t
  misc_feature (424)..(424): n is a, c, g, or t
  misc_feature (439)..(439): n is a, c, g, or t
actctacaagggcaaaccagggnaagacnggatactcaaaggaaggttgacngatgagttttgggaggcttatcatcttggaggctgtattagtccattttcacactgctggtaaacacatacccaagactgggtaatttataaagaaaaagaggtttagtggactcacagttccacgtggctgggcagacctcacaatcatggaagaaggcaaggaggagcgaaggcatgtcttacatgacatcaggcaaaaggattngtgcaggggtacttccatttataaaaccatcaaatctcatgcgacttattcattaccacgagaacagtatggggggaaactgcccccgngattcaatgatctccaccctggncccaccctgggattcatggggggttattacaattcaagggtggagatttgggntggggaacagtcaanccatttcagggggcc

SEQ ID NO: 648257 - DNA, 556 bp, Homo sapiens
gcaggattaaaggggagccaagtgctactatccaagacaatagggaaaaagccttgaaagcatttcaaagaacttcagagtggcttctcccatcacaggcccagaagcttaggaggagagaatagattcatggactgggcccagggccatggtaccttgcacagccttgggacactgctcaccacatcctagctgctcctgttcccactcttgccatggctcaaaggggcctacatacagcttggactgccactttggagaatgcaaacagtaaaccttggtagctttcatgtggtgttaagcctgcaggcacacaaagtgcaagaatcgtggattcttggcagcctctgcctagatttcagaggacatatggaaaagtctgtttgtccaggcagaagcctgttacaggggtggagcccttacaaagaacctctactagggcagtatagaggggaaatgtggggttggggcttcaacaagggcaccgcttgggcactgactaatgaactatacgaagtgggcactggcctccaaacctaaggatgatagaactacc

SEQ ID NO: 648258 - DNA, 1183 bp, Homo sapiens
  misc_feature (927)..(927): n is a, c, g, or t
ctttatggggcacacaatagtaaacaagaggttgtcacaaaatagaatgggtgttgttacaccgttccgggaatatttcccggagagattttcggtcgtaatcaacagggttgtcgggagctaaaactatactaaagggggggcttttcttctatataaggggggcacaaagtcggagagcctttaggagggatattctcttctagaattaaagtcgtgtggttgtcgtgccttctgcacaatgggtatgggaggtttttgagtcccggcgttgtagcggtgtgagagaaaagtagtaggggccaaattaagggtgtatcgtagagggagtattgttgggctgtacgcccgtgtaaagttgtggtgagaaaacgggggaaatgtcttagaatataggccttaaagaggtgtgttgaaaagaggagagaaattattggggagaatctttatgaaagaaggttaggcaatggagagtaaagaggaataaggaatttagaagagtgttttctttgaaaagcatgtgcacggggagagtttggaagaatttgataagactttctttttcactgtggaaatctaataccaaaaggtgatattttagaaaagaggaaattttgtagagagatacaaagggtcttaccagaagccccccggaatattaatatcccagatatagaaaggcgccacaaggtggttatgagagagtatgcacagaatagtgatagagtggcacttttcacacacagcgcgttgaaaagattgtcgtagcttctctgcaagagattgttaagagtggtatttaaataatttgaaggagcgcggatcttttttataaagagagagatttaaccggaagagtggacttatataagagacccttgtgataatccgatgtgacgccagagggagaacattggggctctcatnttgaagaccttagagttaacagcattttacttaaccccagaacgcaaaatggtgtatagaattgtaattggggagatggttagagtatcgcacacacccaacttggtagaaagaattagagaagattttgaagagggttataactgggaagcaccaggaagattacgggtcaggcgcaagaaaaggattgaggagataggggaattaaaaaataaaaacatacttttagaagaaaaaagataaaatttaaacatga

SEQ ID NO: 648259 - DNA, 497 bp, Homo sapiens
cgcggtggctcacgcctgtaatcccagctctcagggaggctaagaggcgggaggatagcttgagcccaggagttcgagacctgcctgggcaatatagcagagacccgttctcataaaaaaaaaaaaaaaaaaaaaaaaaaaaaatttggttgggcgggccttgggcccttgagaaaaagtttttataaacacaatttggttgtgggggggggggcccaaaggatagagtataagtgaaaagattgggctcatatacggctgggttctccagagaaaagaagctcgggggcgccatgggaaaaagaggggcgtggaattctcttcaaccaaatataaaaaaaaggccgcgggggggcagaacggagaagggttttgtaacaacaaatctccaggaagtgggagcttaggggagggccaacaaagggggagattctatttccaacggggtgattctcaaagggaagcttggaatatatcaatttagcgccgccccgtga

SEQ ID NO: 648260 - DNA, 1816 bp, Homo sapiens
  misc_feature (523)..(523): n is a, c, g, or t
  misc_feature (629)..(629): n is a, c, g, or t
  misc_feature (1213)..(1213): n is a, c, g, or t
  misc_feature (1367)..(1367): n is a, c, g, or t
ttatgatctgccgatctagcactgctgctgttcggtgtgctgctgaacgaccactttcttgtcttctagcacctgccagtttgtgtgctagtttgttaggagcgcgtcccgccgacgctagcctgttgtttgcgccccccgcgtgtgggccgcccccctctttgactaccctcacccttttgttttttctgttgcgggccgccccggcgtttgtatttagtttggttgcactcaccgcgcgtggttcggcgatatttgctctcccgcccggttgtggggtcgctcgttgtgtttgtcccccgcggggttatatgttgcccccctcttgtgtggaaatacatcatcagcgtgctgtgctccgttgccattcatagatgtctgtcccagcgtgggcggcttcctcacacgggcggttttctattatctcggtgtgggcggcccccaccgccgcccaaatgtttgtgtttctccacgcctgtggggacaatttttgctccctgttgtgtgcctccatacccgggcncgatacgattttgttgtgctagcccactgtcgctggcggtgtccgagccaagcatgtgttcctgtgtcggcgccgaatggttcctctccctcactccccgggggcnggtttcctaatatgcgtgtattttttctatgcgctgtggatcgctgctgcgcccacagcgccactttcgcccagccgggtgaagccccctaattacgttgggagaagttggggtgtttctctgcccttgaccacagtgtggcccttctttgtggaaggcccccccctttgggggaggtctgccagatggctgtgtttgcctctgtgtgtgcccccagcccgcttattagtggttgggtcccctgagtgacctcggggggccattctggtgtaatgttttacgccgcgccatgaaccttggcacgtccacccgtgttgggagacacacttccgggtgtacctattacagcccggagaccacagccgctgatcattattaccgctctggtgtattgccccacaccaccggtttccccccccgtatgttggttgcccgctttttccccaccttatgggaggtctcttgtgtattttttggccgcacctcccacttattgtgagggagcctcttcacgatgtccacaccgtggaggtgtcttctgcgcccctatgtgttgtttacagcaggggcgttattcaccccgnccttattgagcgcgctctagtagacgctttattctggccgcccacaaggagtccgcacctctgtccaacactatatgcagatagatgtttcactccggcggccgctataatttctaacactctttgcgttttcccacacgcacaacacactctntttctttcgcggcctatttttccgcgagtaaatgtccccccggatacgcttatatctccgcgagactataccccccgagattgcactataccacccacacatgtgaaccactccgctatctaatcttgttaaggcctccactctcccatttcttctgtataccacgccacgttaatattataataaattttccaatgagatttgtaagaaagccacttctccattctcgaaagccgagtaaaagtctcctataatatgtatgagagaaaccctccactataaacctggaggtgagactaataatggagtgccccccacccctatccaccaccacattcgaagaaacccggagtaacatataaattctatgaccaaaaaaggaaaggaaatcgaaacccccccaaagctggtttcataaccaaccccatggcctccatgacatttttcca

SEQ ID NO: 648261 - DNA, 464 bp, Homo sapiens
gcataggcgcgtacggtggtggtgacacctgtagttccacggaggcaggagaatcccttgaacccagggtggcagcctcagttttcccgtttccttgacgcaggcctagcttctctaaagattttgaaaaggctcctttattttttattttttgagacagggtctcactctgttacccagactagagtgcaatggcacgatcttggctcactgcaacctccacctcccaggctcaagtgattcttaatctgcttcagccttccgagtagctgggactacaggcgcccaccaccacgcctggctaatttttttttaaatatttttagtagagacggggtttcaccgtgttaaccaggatggtctcgatctcctgacctcgtgatccacccgcctcagcttcccaaagtgctgggattacaggcgtgagccaccgcgcccggccagaactttcacatcgaatggtc

SEQ ID NO: 648262 - DNA, 266 bp, Homo sapiens
gacttgaggacccctatcacttctgctgcgtgcgtcgggcgcgtacggtctgctccaccatccagacgatgtcgctggtcagagtggcgcattctgctacttcgtgtgagcgctggtgcccactggcagtgcgaactggttggcgaagtcggcgccggggtaagcagcgccttgtactgcgtttcgttgtcggtgtagtcgccgacaaaacgctggccgggtgccaggttgacctgctcggccaccagcttctgctcgtagaaagc

SEQ ID NO: 648263 - DNA, 831 bp, Homo sapiens
ggctcagcccccctgcacgcagccggagctagcagtctaaaggcctgaggcttcgtggtgtcctggtgacggggcgggtatgaacccgggggtcgtccatgcgagtccggctcacactcgtagtagggtccctcgagtcaagcgccctgttgaggtgggtcgcattgcgggtagacattgcgacgacgacaagcaccgaacacgaggccaaagttgtcacaagtggttgggaacccaacaattgggcctggaaattccaaagagcggctttcggagggcacccctagaatgacctgcaccattcgtcaggacagccacccacccagtgttatattctgtctcgccggagtgggtgttcccgggggcactgtgccgacagtcccttgctgtccccaggtttgcagctctcccctgggccactaacgcagtccgtggcgccgggctgccttgtcatgacgtccgtgccgtagtcgtggctctccatcttgtctcctccccgtgtccgcgaatgtcttcaggtggggggcccctcttgggtccccgtccggtctgccgatcacctgaagaccccacgcgaaacacatgaatgtcgaccgtgtggcttgcacgatctcggtccaccttggcggcccgtgttggactcagatcagacgtccttttagcagctaatatttccgggaaaatccccatgggttgaggtgtagtcttgtaacctttgtcaacggcttgacggatccccaattagaggcattaaacagtcacacagaacaacaaggcaaaaaagctccgggggacattatgtcgggggcgggaaacaaggcgcatggcagg

SEQ ID NO: 648264 - DNA, 320 bp, Homo sapiens
  misc_feature (14)..(15): n is a, c, g, or t
  misc_feature (45)..(45): n is a, c, g, or t
  misc_feature (49)..(49): n is a, c, g, or t
  misc_feature (75)..(75): n is a, c, g, or t
  misc_feature (83)..(83): n is a, c, g, or t
  misc_feature (89)..(89): n is a, c, g, or t
  misc_feature (97)..(97): n is a, c, g, or t
  misc_feature (137)..(137): n is a, c, g, or t
  misc_feature (145)..(146): n is a, c, g, or t
  misc_feature (150)..(150): n is a, c, g, or t
  misc_feature (161)..(163): n is a, c, g, or t
  misc_feature (177)..(177): n is a, c, g, or t
  misc_feature (187)..(187): n is a, c, g, or t
  misc_feature (209)..(209): n is a, c, g, or t
  misc_feature (216)..(216): n is a, c, g, or t
  misc_feature (238)..(238): n is a, c, g, or t
  misc_feature (245)..(245): n is a, c, g, or t
  misc_feature (252)..(252): n is a, c, g, or t
  misc_feature (255)..(255): n is a, c, g, or t
  misc_feature (263)..(263): n is a, c, g, or t
  misc_feature (268)..(268): n is a, c, g, or t
  misc_feature (282)..(282): n is a, c, g, or t
  misc_feature (290)..(291): n is a, c, g, or t
  misc_feature (294)..(294): n is a, c, g, or t
  misc_feature (312)..(312): n is a, c, g, or t
gattagccgtgtanntcctgcaatgaatgtttatgtgattgaagnaaangtgaagcgtattattttaaaaagtgncagagtgncttaantgagcatncatgagccctcatccctgaaagtgagtttatgtagtcagnttacttannttantcattagctannnttgtctatgtatanttctagatantgattagtgtaagcgattatanaggatanttatcaaggccagggattgcantttcaangtataantantttctttnctgangtattcatttaaancatacaannaancatagtttaaacagtcantttaccac

SEQ ID NO: 648265 - DNA, 232 bp, Homo sapiens
gatacaatacacgtgagatttggatggggacacagagccaaaacataacagcagcaatagtaaactcatacatcatatctatacatctctcctgaaccatccctgctagactcagtaggacctgtagagaccatctttccctgtattccttcaacatcctgcttccttatcatatgtttctaaggttgtatagttccatgagagattacagctactcgggaggcagaggcag

SEQ ID NO: 648266 - DNA, 136 bp, Homo sapiens
gcagagagaggctttctccttatggtcaacgaggctaaggacctcaggctgcttctcattcctctgactcctggaatacttcgttactagagcggtctcactatccagaactcctggcaagaatggcagaagctct

SEQ ID NO: 648267 - DNA, 1182 bp, Homo sapiens
tgttaatctagcgtgaacaacacgattgcttatagaatattagtaagtatcatatggtggatagatttagatgaagctttaaaagctattagagacatccagctatgctaagataaatgtcttaggaggttcctttgctgatcagaagatctgccaaggatgcccacataggtacgaatgtgaagaatcttttacgaccctaaacgtagacattagaaatcaccaaaatcttcttgattcttcggcaacagctatgtcaaaggagatttactaccacagtgtgcaaatgcatatcatagtgacccacatgcaataacaccggttgactaccgtaaagcgcttgctgattacaaaaattacctcctgtccttgcctcactaccaacctaaacagccgatccgacctatgactgggcacatcagaatgtgcaatcaaagatatcaacgatcacatactgaaataccctcgagaagctggccaatggacaaccatatacacaacatgaccaggtgcttacacacatgcctgcgctactgggatcatgtcacaacccacgatagctcagatcgatacacaaagcgctgagtcactcctgacaactgcacgacaagcagtgaaagccataaaacactatccgaactcgatgatagtgctacgtccataacaaaaagagtaatcacacgacaacactaacgctcaacacattaatacatcctcatatctccatcccacaagagaaatgatatgaaaatggtcgcgacgcaacttgacttgacaaataccactaaacacgacctcacaataacacacaccgacacgacggacaccagctgcagcgacggcgactgataaaaaacctcgtacacccaagtactcaagaaagtactagcaaaccagacccaaagcagagagacaacacacagcaaaaaaaccaaaacgccaacccaagagaaacataagatgagcgctagggagcacggcagaagtggtcgcagaaaaagcaaagagaatgtgacatgaggggcgcgccggggaggaagaccgtgtcgcagacccgaacatggaggagagagtgtatgaatagaggcgaagaaaagaggcacggagagagtgcgagacagagacggccgtcggaccccgagaacccagcctcaagtgcacactggggcgcatcacggggaa

SEQ ID NO: 648268 - DNA, 1070 bp, Homo sapiens
ggccatgcatggtgtgtctgaagctccctggaggctccagcttggcagcgttgacagtgacactgatggtgctgagctcccgactggctttcgctggggacacccagaccacgtttcttggacgctgcattaagtcatgagtgatcattatcttcaatgggacggagcgggtgcaggttcctggagagatacttccagtaaccaggaggagttcgtgcgcttcgacagcgacgtgggggaagtaccgggacggtgacaggcgctggggcggactgtcgccgagtcctggaacagaccagaaggacctccatggagcagaagcggggccaggtggacaattactgcagacacaaactacggggttgtggcgagcttcacagtgcagcggcgagtccatcctcaggtgactgtgtatcctgcaaagaaccagaccctgcagcaccacaacctccatggtctgttctgtgagctggtatctatccaggcagcacttgaagatcagagtgcgttccgaacatggccaggacagagaagactgcagtgagagtccacaagggcctgaatccataattggagaactggaccttacagaacctggtgatgctagaaaacagtacctcggagtggaagaggtcacacttgcacaagtgggcgcaccagacgtcaaagccctcatcaccagaggaactgggcgaggcacggtctgacatcttgccccgaagcagacatgctcactggcactccgaaggacaatgagctgggcctgatcatccttggagccggacgtgtatcaacgtgaaggaatagcaccggcccctctggaactacgagccagagggattcctgcgggttgaagtgtcccaggacaacggtaggcgaagcacgctgtgccacacgattgggcggcacacacgggaacccgaccggaaggacgcaacccacaaaagggcgcacaccgaacgagctggcactgtacagcgggcagaactacccggggtgacacgggaggcaggggagcaaccaataggggcggaaccacagggccgagacaccggcggcgatgacccgca

SEQ ID NO: 648269 - DNA, 103 bp, Homo sapiens
cccccccccccccccccccgggggggggggccaattttttttaatttttttgggggggttttcttttccccccggggtttaaacccccgggtttttttgttca

SEQ ID NO: 648270 - DNA, 342 bp, Homo sapiens
ttaaggatccagaagaatctgggcgacagacacggagtttatgtggcaggcgtggtctattgtggctcttcatctctctattcttgtcagtgcatgacgtgagccagtggagctggtgtctgtgggtgccaagggcagccaggctcttccctgcctggtgttttgggctccagaggacttacctacaaaatactccttggcaatgataattgtgggtcaggaatcttcttcctgtgtggcaggaggctgcggttgcctgtgacctgatgagctcatgttggctggtcccgtgtgtgaaagggactctctcggggaaaccaaggcccagcccctcccccctcc

SEQ ID NO: 648271 - DNA, 959 bp, Homo sapiens
  misc_feature (457)..(457): n is a, c, g, or t
  misc_feature (480)..(480): n is a, c, g, or t
agcggagttacgtccggagactggctgctggctgcggcggtggcggccggagctcgacccccagacggctgagggcgggcgggcgggcgcgggggcaagggagggggtgccaggtccagagacgacatccaccgaacggacgtattctccctaccgatgcgtggcagccgcggttacggcttggagggggtgcggggggtacaaggcgcaatcgcagtgatacactgtgggctggactagagaagagcgccgaaccaggaccagacagcaatgacatcttctagattccgtgccgagctccgacgaacgggtctattgaggagtagttcgctgtcattgctacttcaggaaacaggtgcgtgaccaagcgctttgtagaatgccatgcagtctggcccatttgtgatcggagaaggcgagacatctcgccatgagaaatcctgcagggatacagaantacgtacgaagacttgcgatggngcacaaacaagaagttgggtatcgaaaccatgtttttgcacgatctcacaacacgatgctccgcatagatgagaagtgaggaatggtttggaggacaatgttgaagaagccaggaacaaaacgtagataactcgtgcagaaagagagagaatgtgaaattaaggttctctcacagtgggtattacccgcgatgtaagaacattagctcaagtcccaacacggacacacacaacccactaacgtcaaccaaaagttctttggatcaactcagctgcgataagcggaatccccttcgcttgaccgttagaattgcgcagaaactcgaacgacacttagccccgttctttgggcgacaataattagccttatggggatccggaaaacgaaacccatggggggaaaacgcaaattccagtcagccccttctaaatggctcctaccgcgggtgagagacaatcacgctgttggagaccatgggc

SEQ ID NO: 648272 - DNA, 353 bp, Homo sapiens
aggtgacagaactctgcattgggggacataggaaatgagaatgagattcagctgtcagagtccgacgtggatcctggcattcaccttagaggacaactgtatttactgcttatgacatcagctaccgagagactggggacagagaagatgaaaaatagatcgtcataatggaagtgcaatggcctgaaatgtcagtttgctcccaatctgacttgtttactgtacaattggaacatgttggcaggagaaaaagttcaggcagaccaggccgaagtctcaaggtcacaatggggggactcaaggagatttcaccaccatccatcctcggcctgtggtcaaagtgaaactcttca

SEQ ID NO: 648273 - DNA, 814 bp, Homo sapiens
ataatggctatagcaataaaactaggaatagccccctgttcacttctgagtcccagaggttacccaaggcagccctctgagccatccggcctgcttcttctcacatgacaaaaaactagcccccatctcaatcatataccaaatctctccctcactaaacgtaagccttctcctcactgctctccgaatcttatccatcatagtcaggcagttgaggtggattaaaccaaagcccagctacgctaaatcttagcatagtcctcaattacccgacgataggatgaataatagcagttcgtaccgtgacaaccgctaacataaccattcttaatttaactatggatattatcctaactactaccgcatgcctactactcgacttaaactccagcaccactgaccgctactactatctcgcacctgaaacgaaggcctaaccatgactaacagcccttgaagttctcatccagcctcctctccctaggagagcctgcccccgataaccgagttaattgcccaaatgggccatctatcgaagaagtcacggaaaggacaatagcctcatcatccccaccatcataggccaccagtcaaccctccattaagcgtctaactttctaacctcacgcctaagtctaactcgacgcatcaatccgcactacttccgccatagtctgaacaacgtaagacaaataacatgaacaggtttgagaaccataggaaaaactcacccaatacttccccacagtcatcggcctttaccagagctaacttgctacctatttcccctttaatactaattatctgctcgcac

SEQ ID NO: 648274 - DNA, 261 bp, Homo sapiens
acttcgctaggggagtggggacgcccaccttggcgagcggctcagtgctcagcccctccagttcttggagggcctggcctcctcgctccccgctcagcccctcacgctcccctacgttgtggttgcattgtgtttgcggatttctgtatactcatatctggcttcctgttatgacaagtattgcaagtcagtaggtatgcgcaggagctgaaaatcgctcacgaaatgtacgacccttcctggggagagaatggggttcag

SEQ ID NO: 648275 - DNA, 289 bp, Homo sapiens
agaaggctttatcgatgttatataagagatgcaagttgctctgagtgaagcgtactatgccatcaatggagcccagagtcaactcgtcctagaattttaagaaggctcgatggaaaaatttctcaatcctgaaatcgcctaggtaccggggtccggatacggtgccatggtcgatattgaagacctccacagctcttaaataataagcacttatccctaacatgcaatactgcagatgcgagttaaacttatctgttaacagctgcctgctgttttctgctcccagatg

SEQ ID NO: 648276 - DNA, 370 bp, Homo sapiens
cgatgagtaaaacttggcacctgaatcgggaggtcgagaccaggctgaccaactatggtgaacacctgtctctactaaaattacaaaaattagctggatgtggtggcgcacgctggtagtcccagccacatgggaggctgaggcaggagaattgcttgaactcggggggtggaggctgcagtcagccaagatcttggcactgcactccagccaggacaacagagcaagactctgtctcaaaaaaaaaaaaaaaaaaaaaaaaaaaaaaattttccccgggtttttgggtccccacaatgttttcccaaggttccccgggacattgggggggaaaattggttggggcgggggaattggaggtggaggtgag

SEQ ID NO: 648277 - DNA, 295 bp, Homo sapiens
ttcaggagcagaagcaggaaggagtcccacacccagggcatagcctgccagacaggggaccgcctctgtggatgctccaaggccgcgcaaacagctgggaaacccatgtaattagcagaaggaatggcagagaaccggacccaactcaagtgtcctgatgcggactacagaggaaacgcagtgtaggcaccgaaagacacgctgtgtagcgacaaatggaaacgcacgcagacaacgaagatgttccccatcgcctgcatcatggcaggacaacgcagactgctcaactaaatat

SEQ ID NO: 648278 - DNA, 291 bp, Homo sapiens
  misc_feature (290)..(290): n is a, c, g, or t
cgaccgtgagggcggagccagagaagggcctgctgattctgtatgttcttgatccggctcgtgcgggcgccaggataggggcagattgggagcggccgaagaaccttgcaggcgccccacccgtcttggcatttgccgtgagtttccctggaagcagctccgatatcaaggttccctacaaggtgaacaacgtcggttgggagagcgagtattccgacattcccgagtacgtcatcaacggcatcggctgggaggatatgaatgctcagctccagcagtgacacagcgcng

SEQ ID NO: 648279 - DNA, 149 bp, Homo sapiens
  misc_feature (121)..(121): n is a, c, g, or t
caaagttgctagagtcaggagacctgagcatgaactccatcaaagtcgatggcattagtatgtctttccagaatcttctggcaaagatctgcttctaccaccatttttccgttgtggagcngagtagactcctgtgcctccatgtacag

SEQ ID NO: 648280 - DNA, 877 bp, Homo sapiens
agcgggtaatttctaaagtatctgatgcaggaacgtatcagtgaaactccctcccactgtctcttgtattagcatcaaggaagcgagaaaaaataagcagcctgaggaataggagacatctgtttgaagagcatcgcggatgaagaaacgcacaggaggagtgacactcttcgaagagaagaaatagtccttggccagagacatccatctaagctttccttttatgcattgatcttctcaactgttctctactgtggtgaggttgccttaggttgatacatgtttgagatttatcgaaagagctaatgacagcattctggatgtcatttaccatctagcttgtattattgtgggggcaattgtggatccaaattatcctgatgtttatcaattaaagacttgaggagaagataatggctgtcgattacttggttcggcacattcttcttttaggacctatggtgaggtgtatgcacaccattagaaatgaccacaaatggtttgaacaatcttgaaaccaggagaaggacacgagactcaagttagcatcaccaaagagcaaacacgatgctggacaggggaacattgcattctcaatccggggataacttttcatgcaagcagaaggcttcaagatacatgtcaagtgcattcaggcttttctcgagtcttgtccacaattaattttgccagatgtataatccaggacgtcactaatacgaaaaaattggcttttgaaatagcagccttggctgactgaacatttgcccctgttattcacgtactttattgggggccaaccgttggcatattcttggccatccaaaatcaagaatgatgattataacaataagctaaccgccgatacaatctccgg

SEQ ID NO: 648281 - DNA, 148 bp, Homo sapiens
gagcaccacagcaacactatcatcatatcactatcaccaccatcatcaccatcacctcaacaccaacaccaccaccaccaccgtcatcatccatcatcaccatcaccatcgcctatttgacaccaacccctgttcggttgagcggaga

SEQ ID NO: 648282 - DNA, 315 bp, Homo sapiens
cttcctgtcttcgcctattctacttttgcccctcttcagtccagttctcttctgcaggcagaaagatcccagtaaagacacaggtcaggatcaggtgtggtgtctcacacctgtaatcctagcaccctggaaggctaagacaggaggattgcttgaggccagaaattcgagaccagtctggactgcatagtgagagccgatctctacgaatctaaaaatgaaaataaaagtatctgggtgtcatggtgcacacctgtattcccagctacccgggaggctgaagtgggatgatcactagagggcagaagcaggaag

SEQ ID NO: 648283 - DNA, 237 bp, Homo sapiens
gaggactgttgtctacctgctcacgatgatctgtgcagacgggtactcgcgggtaggcaggtacactgagggccgtcggttcgaggctttgcacacggagtccgcgatgaaatcgactaaaattgctttatgttagtaaacaggcagatcctttcaaaaatactctgccatcattctagatttcctccgatcgccagcctcgagccgccagcctcagacctccaccggccgccacgc

SEQ ID NO: 648284 - DNA, 156 bp, Homo sapiens
gaaacaaaaaccccaaaccgtctctacacaaattcacgacaccggtcttcgcccccctcccccccaaaccacctttaaaaaacaatactacagacacacctttcgccgacacgtctgtaagttaacaataataatacaggatgttcgtaattaatt

SEQ ID NO: 648285 - DNA, 823 bp, Homo sapiens
cccacgcgtcgctggaagtataaacaagaaaggaggctgacggctctagaagtccccaagcctgttgtgatcttcagtagacaaacactcctggtgtgtcacaggattcaggccactaaacctcggcggctgtctcctggaatgaagaaagcaaaggaagcctagagtggagacaaagaagcccgaggcactctgagagctgccatcttttccttgtttgccgcctgacacttctcagcaggatccacataccctaagcagggagtggagagaggcctgggctgggccaggttttctgggctttttcctgtgctccgagtaggtgggttgtattttacccagtaggagtggaagactccttggcgcttggtgcttcaaccggactgacttcctgggcctggagttggcgattagaggtctgacatggctcacctgatgactgtgcagttgttgctcctggtgatgtggatggccgaatgtgctcagtccagagctactcgggccaggactgaacttctcaatgtctgcatggatgccaaacaccacaaagaaaaaccgggccctgaggacaatttacacgacagtgcagccctggaagacgaattcctgctgttccacgaacacaaagccaggaagcacataaggacatttctcacctgtacggttcaactggaaccactgggaactatgacatcggaatgcaaagggactttatccaaagacacctggctctattgagtgtccggaaatggggacctggttcacgcaggggcagaagtgggcaagaggggtcttggagtccctgtgcagagctgccatgggg

SEQ ID NO: 648286 - DNA, 130 bp, Homo sapiens
gttatagagatacccactgaagctggtctggctcttctaaacacggcaggacctcccccacagccacccccacaggttctctgtttcccaagtcctgatggattcaggcaatgaccttcacacagttcac

SEQ ID NO: 648287 - DNA, 266 bp, Homo sapiens
tgtatacctgcatgctctctctgatggaggactaataaaaaaagccactctagactgggcgcagtggtcatgctataatcccagcactttgggaggccaaggcaggcagatcacttgaggccaggagtttgagactagactggcaaacatggcaaaaccccatctctagtaaaaataaaaattagctgggcgtagtggcgtgcacctgtagtcccagctgctcaggaggattgcttgaacccagaagacagaggttgcaccaccgc

SEQ ID NO: 648288 - DNA, 172 bp, Homo sapiens
ctgatcgcttttcattgtcttacctcagaatcatgatgtacacagaactatgggcaaggtccctcaattccggtcaatcaggtatcattcaatttgagtaaaactgattgtgctcacaaactgtgcatgggtccagacaggtgcagcgtagacatattctacgctgcacctt

SEQ ID NO: 648289 - DNA, 419 bp, Homo sapiens
ccctcgaggaacgtgttatccggcaacggtagcttagaggagattccacgtctaggacagctgcgcttcttctattcagctagttacgttacacggctatgccctgcaactgcaccagtatacaggtaacccgcggggtgcatcgcgtcctggggactgggacgtgggccccggacaccgacgacggctacgacggtgacgacagaccgttggacacgacacgtgaccggctgacaggaacctcacgctggggaccccacctgacggactactggtacactaaacctggaacactcacgtagggacgacatgggcaaacgtgcagacccgacgccgctttgacgctagcgactaacccaggaccgaggacacgggcttaaactacacggaccggaacccacgtaacgggggcggactct

SEQ ID NO: 648290 - DNA, 117 bp, Homo sapiens
ttaactgtgccggaaccgacacggagaccaacggtaattgtcatcacattaccactgacactgacgatcaccgcaggggagctgctggttcgcagtgtatcgaagtgtacgcctccg

SEQ ID NO: 648291 - DNA, 145 bp, Homo sapiens
tgaattaaaggctgagttggaacgtaagaagcagcgactggctcaaatcagagaggaaaagaagagaaaagaagaagaaaggaaaaaaaaagaaacagaccagaagaaggaagctgttgctcctgtgcaagaagaatcagatctt

SEQ ID NO: 648292 - DNA, 1069 bp, Homo sapiens
  misc_feature (126)..(126): n is a, c, g, or t
gatcgtgggccccgtctgggcttcttggtacctagagagtgtagctggtcagatagcatgattgtgaatggtgagcgatagctaggtgccggatagctagtgagtacgggttagtgttgaaacagncgtgatgtgtagtgactgtaattgaagctatataaccaagaaagagttaaagacatatttcatggcgaaaatattttcattttcttccgccaagtctgagctgggattagcgctctaaattcgctagacatttttgtgatcaacccattgaggcctcaatgaacggtggagttcttttcccatatatccctacgcgctagagcaatgtgtacggtcatactttcttaggttggggaatctacgcgtggtttggttctatgatcacacacaaacgtcgcaaatatgggacagttacattgtcaggaggtctaactaatttaaccgtgatgtaagtggttgcctggtacatacatattggtttggtgtataggcatgtgagactccttctcagagaaattaatttattagctttctttcagaaggacctggattgtttgcactcctggtactgcaataacgttaattgaggaaagtctcctatctggtgagctcatcccaacagggtacttcgaagaaagcgctatacacataagcttgtgtgccaccgagaaggaactcagcacgtgaagcaggtccttaaatggacggtacgattccaatccctttcgggccgttggtgagctatctttggcgatttctatgaccgaagattggaggaacatgtcacttgggcgtacaaacttcacaaacactctttgtgagctttgcaaaggttttcattaggtctgcgagcactcttatgattccaaggtggtgacaagggaaccattgaaggtttctggagcgcactgtggccacatccactaaatggttggcgctcgcacacttttccgcgggagtatcacgtgcgggccaaccctggtttttcttgcaaaacaacacattacatcaagtgggggaaaaaccacggggccttttggacagagaggcccgtattaccaca

SEQ ID NO: 648293 - DNA, 1028 bp, Homo sapiens
ggaagaggaggaagacgaggattacattgcatttatctggaaaatgttgtatgagttcttgaataaatacttgtggaaccaagaatggtggtttatccttgtagtctctgccgtggtggattgaaccagaaaaatggaacatccatgagtccaaagggcttcccattgcgtgtcgccgacgtcgattgtatccagtaacgttgcacgttctgttgtttatccacctgctctagaaacattgccaattcgtcgtgggtcaatacccagcagtgagaacggagcagggtgcacgtataacgcgacactgacagccattggggcaggcccgataccgggatgctggacggtgtggaggcatgacacgtgtaccctgacctcgtctcgactctcttcactcaacggtcgtcgagcatcgctgcaacatcccgtcctacccgacctcgctcttcgcttcaaatgaccttcaccggcactagcaacactgaggacatctcctcctcatttcgctcacccactgcaacgagccggcgcagccatactttgcccctcccgggactatactaccaagatggccgcacacatatggcactctcgctccacacacgaaaacacagtgtcgcgggctactcctagagagagccgattatccgctactttggaccttttccactccacaacatctgcacttaaacccaccaactctctccactctcgtggtaaaccgcgtctaccaaccatacgtgataagtaggttacctaggccattacccagtccccctatccctattacgatttcccattaacgcaacggacggatgacccaaccgtgggttgacttccccatttccacgaggtggatctgccattggcccaacttaaacaaagcggggtcataaggagggggaaaaatccagcaaaatatgaatacaacatacggtcccccgcacgggtcacctcaaacgacttacacatgcttacacatgtggatggtaagccaatacaacaagttgacaaccgggattgttaag

SEQ ID NO: 648294 - DNA, 559 bp, Homo sapiens
gaccagattccttctaaaagaaggaaggccatgtctgcctgaagcctattggccgggcctactctggacccgcccctcttttttttttcatgacacacaccacaggcgaagtctgtgcggaatcctaaaccagcccaatttacatccattcatgaatctgtgacgtcagcaagccttggggctcctttgcggtgggctggaggattgtgtgggtggaatccccctcccctttatttttccaattctgcaaggcttttaaaattcaccttacatcttttcaaagcaagaaaatggaacagcatgtgtaggaattcttcgttgtgtgagtattggcactctgtttttcctgtttcttcagtatttatttcacaaggacagacagagaatgtgtgatctggaggtgattagaaagctgatattattgagggcgacaccgtgagagagacagagagacagaggcggagagaaacccgaaaccccgttacagctaggagcctccgaaactgacagctggttttccttgtgcttgtctgcctgctagacgtggacatttttcatt

SEQ ID NO: 648295 - DNA, 146 bp, Homo sapiens
tacttttccacaggccaaggcaagagagaagaaacttcacctaggctgctgagcctactgatatgttacaaacgcttcctacttgacagaaccccccccccccccaccaagacacaactcatatcaccgtggttgcagtacccagc

SEQ ID NO: 648296 - DNA, 370 bp, Homo sapiens
cttgtcgtggcgtttggcatcccggtacacccatttaaactgctcgttcagctgctccagcaaggaggaggtgttgagcatcttccactgttagcgactttacccagctcgtttagtttttcctggctccatctctcagtgacctggatggcttcgtcgatctcctcgctcgtcgcttagcctgggaggggttgttggtgctcagtccactcgacagatctcccggtctttgtcacactggtccttcttccgctggcagcccgtggagttgtggcggatctcccggtgcacagtccggttcatcgtcgccttctcgtatgaattctgttgcgggtcgggtggccgggctgtggaagcgggtcgggtggcg

SEQ ID NO: 648297 - DNA, 229 bp, Homo sapiens
  misc_feature (2)..(2): n is a, c, g, or t
gngagacgggggtctcaccacatggtccaggctcagattttttggttgggtttgggtggtttccaggtccacggtcatctcagcggcaaaacaccaaagtcagaaggaaggtaatctcccaagttttttggttttggtttggtttggtttttggagacagtcttcactcggtcacccaggcgggagtgcaggggcacaattttcaacttcttggcaaccttcggccttc

SEQ ID NO: 648298 - DNA, 636 bp, Homo sapiens
  misc_feature (39)..(39): n is a, c, g, or t
  misc_feature (61)..(61): n is a, c, g, or t
  misc_feature (79)..(79): n is a, c, g, or t
  misc_feature (156)..(156): n is a, c, g, or t
taatagccggttccaatgcctaggggtattcctggggtnaccatgtctttggttttttttntttagcatatgaagcttnggtatgtacaaggtcagtagtaagatgccactagtctcagggcttgtgtaatatctgggaggtcattaaatgcaganatggtcaagcaattaacacagtatttatgactctgttaagcataccgtttgtctgtcacattagtagattctgagattaaaaaaaatttttaaagagtgatcatttaaataatttctaaaagggtcttttcaagctctaacaaagtcactaacacatcatcaattttcgacagcattagatgttagtagtgcagtgccgcatattcagggaaagagtgtgaggaattgcatttcagcatagttcgctcgtgtgtttgacctaagaatgatcgtcgcctgaagtgttggcctttacagtgtagcatatatggcccaacatgataggattccttaggatgtgtcccccccgtgggccccaaaccagcctgctgtctcaggaagctgtagaaggagtgtttgtcagtttctggccactgccttgcttccttacggaggattaaatgttgcctgtctctgttacttaaattatctgtttaatat

SEQ ID NO: 648299 - DNA, 615 bp, Homo sapiens
gaggaggatgagagtggcactcgagaaaagagagcttatgcatgtgtcttcaggggcatatgggattccattggtgaccagccagatgaactgtccttccaccggggtggcttcatccgtattttgagcaaggagtataacatgtatggctggtgggtgggagaactgaacagcctcgttgggattgttccaaaggagtatctcacccctgcctttgaagtggaagaaagatgaaacccaggaaatatattcttccctctctcctgcctttatgaggaaactgatcatcaaaagttccccctccctatttttgcccccccaccaacgccttggattcctttttttgctgaagagacccaagtttcttcccccctcaaagtggttgtaagcacccattaaaccagtgggaaaaggcccgtttttcaaacctgttattaaaccagcctagttatagctcatccccatctttaaatgtgtccccccaaccccatttgccttttccccaagctttttccaaaaaaggtgaaaaaaaaggaacccttgggaggaggccattcttggttgttttggttggttttaaaagcccaaataaacttgggatgtggttcctttcca

SEQ ID NO: 648300 - DNA, 1937 bp, Homo sapiens
tgtcgtgtccggcaccatgggtagtccgtctgcgcactcggacgagtaaaagagctgtgtgcatagatgacgcagaggagcctcgttcagctggagtcaccttcggggaagtttcgaacgactctgaggcagactcaaacagaagttctctgtgggcgacaatacagctcacgaaagacgagagctaatgctcgataggggcagcgttgagaccggggagcagacacgtgttcacgaccatcaatgcatgcgcgcgcacgcctggctggcaatccttctctccagtccagcgcgaggttgtgcccgcccaccgggagctacgaatgcaaaatcgtatgtgagcgttgtacatgtacatacacgctcgtgtgtaccaggggctgcgctctcgcaatggaactgcatatccacgagaacgcgaaagcaaaaggcacggtcaagctgcacgaggcgtcttatcgcacaggtgacccgtgtgcgtccccattcacatagccttcacccgttgggatagcccagggacccaccggggtcagcgactacctggaagagtgtcgccttctgcctgtccgacactctctccgtccccgaaataaggaacctaatagtgaagtaactggaattagcacagcacacagaatccacaaaaagcggggccgaggactcgtgcgcaaataagcacagaaacttacccgccccagcgttagagggccgtgcaaccgccccagtcaagaaaccacacaggcaaacccacaagtgggttggacccaccccttagccagccacaggcaattcaaggtgctccctgggcaaatgaaagaagattgaggtcgcagaataggataggcacagcgcaaaggacagccaacgcgctgcgccagcgagtgacccacccacacggacagtagacaagccggcgcatgcgagagcacaacctatacggtatcgtggaccacagacggggggccccaacgagccaagcgctcacaaggcaaccgaaggaagcaactgtgccgtgccacacaacaatggggaagcatacgcaacaacaccacgagaacgcccgacgccactgcgcgccgcacggcacgcatggaccacccgtagcgacccatatctcacagcaacaccacgtagtatcacaacccagggacataccagaggtgggctggtacacatcaacaggcacgcaaggacagcatgcacggcaaatggccggcacacaacaccaaaaacaccaactaacagggaccaacagcaagcccacccacaagccgagaccgcgtcacccagctcaacacgcaacatgaggcaccaccacaagtcaactacaagatcgatggtagagaagacgatctcacgggcctggacttgtgcagcgtggcaaaacgatgaacaccaacgagccggcacgcccaccacacaagagcccagcactatgtgacgacaaggcccacgatcaacagagccggcactacagcgcgagcaaacgcgcaagctgaacaacgagggccaagagcgacaacgctgcacaacacatcaacagatacggatgcacaaaccagtgggtgacgacggacagacatagtacacgacgcggcagctaacacacgcacagagagaaacaaacaccaaggcaaccgcatgaggacagatacacagacaacatacacgccgcgaccagccaccacgatgccacacaagccacaagcagcagagacgcacgaacgccgacacaagaccacaacagacgaaacatcacgagcacacacgacgaacacccacggcagcaacacgaagacagcacaccacagcaacggcaagccgcagcgcgccgaacacacacacagcacaaatagcacgggcagcacgaagacagatagtaagcactacgactaacacgtaccaacagaacaacgacgagcacacgcaacgac

SEQ ID NO: 648301 - DNA, 534 bp, Homo sapiens
ggggagtggacagcaatagctagtgagcctagcttcaccaaggctctcgcgcctctccaccaccaaaatatcaaagaggaaggaaggtcagctcagctgaagggatagtgaaggaagagcccaggtggagacccagcacagttctcagctaactctgctcctacaaaagtggacaggaaaccaaaaaaggcagcaggaaaggatacatcttcagacaaaacaaaagtgaaaaggaaagcagagaaaatacatcgcagtggcaaaccaagaaactaaagatttacctacctacagaaaacagagaaactaaactgagaaagccagaggaaaaaaaagccaagtgtgattaatatcacataccttgtcttatgagtcattcctgtttcccttcttgtactatccacaggaattttctggttttttcgttgttgtagttttgttttgtgttttttaaattggagtttcactcttgttgcctaggctggagtacaacggtatggtctaggctcactacaacctccactcccgtaccag

SEQ ID NO: 648302 - DNA, 1026 bp, Homo sapiens
  misc_feature (135)..(135): n is a, c, g, or t
acggggtttgccatcagcgtggtcgtcgttctcgggcccattaaccacagctaccgctgatcgcagctcaagtcgtgttggatgttcaagattgacagtacttagtggtgctgctcccagctgcctcgcgtgggnggcgttcttacatatttattaccccaccgtggcgcctttccccggttataagtggtggtgtacaccccgctccgcacggattttttcgccccccccgggggagatgaccccccactatcattgccaggcgcgcacggttttttttggagcccccctcgtcccgtatgtggagagtacaccccctcgcggggggctctggtatttcacaaaggcccttctccccggaggccatttttgtcgccccttttagtggtcgcccgctgggtggtcccgttgatatattatacacccacttggtctactacacacaccgggggggaaacacagcgtgatatgtaccccacccttaattgggggccccttatctttacggcggacacacaccatctagggcacacacacagttgtgtgagacacacatcaataagcacacgcgggcgtcggggacaacccgcgttctcctgcgagaatttctccccgcgggagatatttctctgtctggcacacccacgcgcgctcccgcgattgttttgtctctttcttatctagaaaaggaaaatgaggattaccacacgtcaataccttccaccacgagagggtaaactcctaaaatttcctactgattcttctgaaccctattttaaaccccttcctaaaaattaaaataatcattttggtgttttttatgtagaatttagacttctaaaggcgggctctgacataatgttgcttgggcattgatagctcaccactgattagccacaagcatataaagcatcccttacccaccataataaagaccttgctttatcggccttgccatcattttgaacccttaacctcatagatttagaacgaaacactgtataaaaaccaacagataaagggtta

SEQ ID NO: 648303 - DNA, 258 bp, Homo sapiens
gcttacatttgttctgcgatttactgtacggattgcctggagtacaggtggcgggaggattcgacagctgctcttccatttacggcttgcttcacatactggcacgagttccccaacagcacgaggctattaagtactttcagggatatcaacccaaaatagaagagtatgacacaggcatatgacaggagtccttgcactctaattgagcttgtgacaactctgatgagtaaaacagctagtgggagaggaataaag

SEQ ID NO: 648304 - DNA, 1319 bp, Homo sapiens
ccagatgggcctagacaagacgcgtggcaacggacgaccggcgcagaagtactccgcggcccccccgtatgcccaagggccccgccaagagaggggctggatggtagtttgggggggcgaagaacaagtccccacggccggggatcggcggtgtcgcgaaatagttcaagagtggcctgctgaggccaagcgctacccgggcccgggacacccaaaggggactggccccgaggcgcccagaggagaaccacacggggggagaccccgtggcgtcgccccggggagagatctttgttgtcgcccgccaccacgccaggaggtttcgcgccgaaaaggcgaggccccgtgccccaaaacgttgagggggaacccctggggggagggggcccgcgcccccggggtcgccagttctgctggccccacctggccctggcgctgaatcctgggagccccgtggccccgtggcaaatgcggggcacacacagcccccaacgtcgccctgggaggagaaaattcctggggaaagggcccttggagagggagtgggcccacccaccccccgtgtgggcccccctttccttggggaagacgtctgtccccctgtgtagtgggtggggcttgggcccccacgcactgtggctcggcacattgccgtcccccgtcgcgttctgtctcttagaccccccccttggggtgctttggccttaaaaagcgtttcccctttttcacgaacttgtcctggggaacctgagtctcccccacaggcctgggacgcctggtgccccccccttggtgtgtgccctttgggaattttggcaaccacacgtcccctctctctccttgtgggttgaaagggagcacagagagccccccccgctcgtgtgagcactgcacgcgctcgcgtgttctgttcccctctttgccggcttttcacctctgcttgggttttctcgtgttctctccctcgggggaagctccgtgggccacgcaccctctttgaggcctcttggcccaccacctgagggcttatggcctccttctgcctcgggaatgggctcccacccctccccctgagggagtggcctcggagttcaccgccccttcttgtttcctctttggggctccaaagcccttcctacctctggtgaatggtttccaccacggaacacacagcactctttcacccaagaatgggtggcacccaaccttgctgggaacttggagatcccacaggggcttaatctcttcaaagtgtggaagggggcacagggtccacgccttctgctgtagcttatgaaattaactaattggaaattcca

SEQ ID NO: 648305 - DNA, 1690 bp, Homo sapiens
  misc_feature (1120)..(1120): n is a, c, g, or t
  misc_feature (1219)..(1219): n is a, c, g, or t
taccttgtactttacctgaatgatcaagtgcgtaacgatacatcgcaaaattagtgtctgaggacatgactgatatgtctgatgtactatcatcgaaattgttcccaattgggcaccactagagcgacctaattatcaatagtcctgctatgcatgtatatgctcacgtattgcgatcaagtcttacacgcatactcaagtccctgttcgttgagctcaccataattgatcgacactattgtgtgctagtactaagctctatatagcccctgctatggacgatatcaccacccttggatgagtgttgcctcacgcacaagggacgaaatacatatctgccattaactacggtagactaacagtgagtcagggaccctgacgaaattgttaaacggattagacactaatatagccttagacacacacccgtatgattcacacagaggtatggcttaaactaaggatcagaagacttccgtacaccataatccctaggtacaattactttaaagcgaaattgggagattccgaaaataacttggacagcgtttaaaggccaaacaacagcacaagtgggccaggcggaaactcaatgggtgaggtagggaacactatcatgagaaacaaccccagattatgcccccatttaattatggaaggatagagtttccccatgacaaagtctcctcggcacaaaaggccggactcacacaacatacgtatcggacactttacaacggtgacacatcttacattggggagaggcgtaccgattatattcacaagagggccatggcacaatatggcaaaacatgtggtctatattacactcctgtggattaaccacagcggagaggccccccgattttatttaaactcacgtaccaacagttactggaacctacgcaacttaaacaagagaagtgttaacatatccgctatttccgaggacaaacagtaaaagtactaaccagtagttgatacaccagatagtttagcacagtactcatatcaacacgccaactggatatataggagtacagccagggagacacaaccattgaggaatggagagaaagtaaggacacgagaacggtatatcatagacgacacatgaganacacattaacagggtaactcgcaacaggcaggagcacctagtcagagtcacgacaagacagtgatagtagtccagacacagcgattgagctaagaccgngcacagacatgtcacagatatcgtggggtcgagctcacatagaagcattagtctattagttaagcagcgcatagacgtgtagacgatctggcagtgtcagacgtagtagaggcaacaagatcacgatacacccatgtaggtacggaacagggaggatacgcataacgtataacgccacaccgagagtatagcaggcacaaaggtagacgccacgcaatcggcacatagtaggataccgcgatcgaaacagtagaacgaaaaggtgcaatagaagacagggagaacacactatacacattatggacatattagcgcaagaacagaagcaccggacacaataggtattgacactgatctagcactacgcggaggagcactatcgagtgtgactatcaagagatagagcaccagcgaggcgtaagagaagagaatgaggtagagaagagagaccatagggacgaaaaccaccaa

SEQ ID NO: 648306 - DNA, 152 bp, Homo sapiens
cactactaagctacatgatggctacacagtaaattggcagctgggtctatatgtagcccagttagctgtagttcctacaggggcacggtcaacacggtatacgacaagttcgggatgacgctctaatggatacttaccttgatggatagctt

SEQ ID NO: 648307 - DNA, 341 bp, Homo sapiens
tcggtggccttgatgttccgcacacgctgcaggtccacgtgcagcacacagatgcggttcgagtgcctgcacggcctgcaccgccaccttgctcgtgccatacaggttccgcgagaactcggcatgctcgatgaagtcgccggcggctatgtcacgctgcatcacctccgtggttacgaagtagtaatctttgccgttctcctcgccgggcgtcgggttcctcgtggtatgggacaccgtgaagccaaagatggcggtgtgctcctggagcagcctcttcggcaggtgctcttcccagctcgcgaaggcccgctcagcaccatcagcctggggcccgacat

SEQ ID NO: 648308 - DNA, 933 bp, Homo sapiens
ggcacggagatctcgccggggtttacgtgcgaggcctcggtgtctgcagcaacccatcacggattcctctcctaggcgactgatgacccatgggctagaattgcaccatgtctattctcaagatccatgccagggagatctttgagtctcgcgggaatccccactcgttgaggtattgatctcttccaccgtcaaagaggtgctctctcagagctgctgtgcccagtggtgcttcatactggtatctatgaggccctagagctccgggacaatgataagactcgcgtagtatggggaacgggatgtcgtcagaaggcctgttgaggcgtccagttgaactaatacttttgcgccgtgcccgtggctatagaccgagaattcctcgataggctcctcagaatcaggagaacgatggaggaacagatgatcgagatggatggtaccagacgaatcatgtctagagtcccgtctagcgaaaaggtcgccccctccgtgaaggcggtgatccacattgtccggtcctgtgtgaatctgaggggactcgcttcgaacaaaggggaggatccaatattcatagactgcctaattcggctgtaccgttgggacttggtgatacttctggatgaattcgtggccgcacagctacacggatatacccagataggtcattgggaacgcgtggcacgagtgccttcaataggcctgtgccatagccgtttcctttgggcacgtagccacttgacggttccgattgaatcccttcacacatgtccaagttggaggtatgggacttcccacgaggacactgccagatgcgacagtccgtgggcagacgtgccgaccattgaaacctggatggaaattggtcggtgaaacggtgaacatcatgggaaagcgatgcgacccattgagggcagattgaaggacggacaa

SEQ ID NO: 648309 - DNA, 166 bp, Homo sapiens
cacctctgcctcctgggatcagccatcctcccacctcagactttcgaatagctgcaagcacgtccaccactccaggctaaattttaaaatatataaaaagtagagatggggctttgccatgttgcccaggctggtctcaaacttctgagctcaagcgatcggccca

SEQ ID NO: 648310 - DNA, 126 bp, Homo sapiens
acgtatgccaattaacgcggttatttggggggcttcttatattgcttcgatgaatggtttgatgggccatgattaagagggtttgatgaagggtttggatagggtttgatgacagggtttcgatga

SEQ ID NO: 648311 - DNA, 347 bp, Homo sapiens
gcctcgcagtgctgccgttacataggtatacatgtgccatggtggtttgctgaacccatcaacccgtcatcttcaaagataaggccttcagtatatcaagatcagtggatcaaagaaacatcctcaagaaactaagaaacaacacaagattctctctgatgaaatgcttaagtataaggaaaatgatggaagacacagaagagcagcagaattgggtagaagactactacagatgccagatcgccacttctgaaagaaagggtttacggacaactgggctctgtgttttaagcctcgcagagggaggatggcaaggaggaaggaagggttgccttacaaggcaggca

SEQ ID NO: 648312 - DNA, 588 bp, Homo sapiens
agcgggggtgcgaaggagaacgcagcaagcctcaggcggcgggtggaaaggctggaggacacctaccgtaatacatgtggaatcccaagtgccgggcagtccagggccaaatccatatccccccaatattagggtgcccgtggaggttcccaatcctggcacatcgcagacagtctatgaatcacacacctgtcacgacgagtgcgcgtgtctgtggtcgtcacacggagtgccgcgagtggggaggacatactagcgctacagagcgagctgagctcgatgctgtgcgtgaggctggcggacggtcgcacttgactgcaggaacctggtgccggagatcgccgaaacacagattactaggcaggtagaccgcagacattcaagggcacgcatgtcgtggacatggaactaaacgtcgtgtaattgcctccttcggggctttgaggtgcaaccagcgcggcgggtatccgcttgggaatgctcctggacggaacttaccgatcaactggacctacagataccctatactagcacgcaacgtcgaacatccaaccatccgaggcttccatcaaggctgccagcaatggc

SEQ ID NO: 648313 - DNA, 938 bp, Homo sapiens
cgcctgtccagtggacacatgacccatgtgaccttaccgtattattggagatggttcacattccattaccctgcccctttgtctctatatccaataacatatcagtgcagccgtggcactttggggcccacgtacatggtctccgtggtcttggtggtacgtggtccccgcaggacccaggatgtctgtttgcttttaacaaataaaatagacacaaaaaagaacacacatacatacagagaaaaaagaacaaaaaagaagacataaagaaaggaggagaggtggggcaaaagagtaagatccaccgaaagtgcgaggacctctgttctcaacctgtcagcatgtcttatatgcagcaagcgagtcgtacgcccgcagaatcgaaggcggatatatctttgggaaatcaagtccctcgtaccagggatatctataaacaggaacattgccgagaagggagatggcgaagacgtggacagctatcatctgacgttacacacgaagacatctggaagaccgtatatcccgagggctagggacacgcacagggccatacaagtcttgcatatgccctcgatcgtgttagagcttcaagatcaatcacgcagaggaaagccatgggagggaatgatcaaacaaaaggtcccctcaaagctttggtagaaatccaatattgaaagcagcacaggggtccggacagaactttaataagtctaagacagttatgtgtgggaaagccgagggccctgtgcttggaaattggcggtcggactttccgggacgaacagttctttggacgactttcggggctagccaaaattgcttaaggtggcccaaccaacataacagggaagccttcgtatcccatgaaaaacaggacacatggaagaagccctggttgaggaattccctaaccctttttgttacttgctagccca

SEQ ID NO: 648314 - DNA, 803 bp, Homo sapiens
cacgcgtcggacaaacattcggtggaggtcaccaatggcatgttcagtagccagacaatgagtcatgaagatgaagtgggtgttgacatggaatatgctaacaatatgtatgaactggtcataaaaaggtttcgccaacatgagctcatccctgtgcactggtacgctactggccatgacatcacagagcactctgtgctgttccatgagtactacacccgagaggcccccaacccattcagctcacgtgtggacacaagtctccattgaaggggcgcatgagcatcgaaagcctaccgtcagtgactttaagtgggagtccctggagaggaccatgggagtgatgttcgacgacctctgacagtgaaatactgcgtactacgacgagtgaacgcatacggagtagacctgatcaatgatgacctgctttatccccaacagagtgattggactctcaagtgacttgcagctaagtaggaggggcatcagtcgcatccaggatgccctgagtaacagtgtcgcggaatatgcagaggatgtactgtactggaacgtgtcgtcaagctgacagatactggtgggccgcttccgtgaatgagcctggttaaccgaagtaccgaacaatagtttccccgatgactttgatgaccagtgctcaaccagcaacatcaatgaccgttttgatggtgacctacctggcaggctcacacagtcacagattgcgtcatgaaaaactggtaactgtgaatggccccagaggaaaacatgtggctagggataacccagatccaattgagcaatgg

SEQ ID NO: 648315 - DNA, 430 bp, Homo sapiens
tattagtataaaaacgaaaacacaagagagtatcaatacatacatagtcccttctaggaaaaatattaagaaagaataaagtaaatgctaagtatctatccttgtgtttaatttttaaatttaccatttctcagtgtttctgattatttaatcaattccacagcagctctaatagcaattttatcccacatatatgcttcaaaaaatggaaaagtaatgaaattcaatttaagttctgctctcaaatcaacttgtgaatgaaaatctacatcacagaaaacctgagctatacatgagtgaaatgcctcaaaaaaagttctcagacactgtaaatgaaatattaaaccataacattatagtatataatttacttaactgaaaacctattatgtaaatggcataaggtctgaaactgtcccaagacagcaaa

SEQ ID NO: 648316 - DNA, 157 bp, Homo sapiens
ctatgctaggggtgagtggtatgaagttccgacactcggaggcgtatgagttggccttacctgttcctgtgttaaaatgttcgaattcataagaacagggaggttagaagtagggtcttggtgacaaaatatgttgtgtagagttcagggtcttggt

SEQ ID NO: 648317 - DNA, 115 bp, Homo sapiens
atccacttcagttccaagcatggttccaagtgcatggtccaagtgcatggtccaagtgcatggtccaagtgcatggtccaagtgcatggttccctggctggggatcacggcagct

SEQ ID NO: 648318 - DNA, 390 bp, Homo sapiens
acagtgtttccaatcagatcatcgcacgcccttcatctgctccaacgttgccgctactgccgccgctttcaaggccagaacgtgacaccgcgtccccgcaggaagagcaggctgccacacgggccaatggagacagcgaactggccatgcaatacgcgatcgccctgaacctggctggccgtcgcactcatgttgaagacttcgatcacattgctccccactccacctttggccaatggtggaggcacttgcatgatgccttccaattgcccgatgttcagcagtggatcaaggccttgggggttgataccacctcgataaaaatcgatccaaaatcaggtcagatttccttttaccgtgagcgctttcttgacccgctaaggtcgacgc

SEQ ID NO: 648319 - DNA, 453 bp, Homo sapiens
aactatctccgccttacacgcccccaaaacgcatatcactcaccatctgctgtctctgatccatgacagccaccctagaggtgctggtgccctgagtcttctaccctgcggcagactcacactgacctggcagcgggctgggtgcggaccagacccaggacacggagctcgtggacgaccaggcctgcaggggatggaaccttccagcaagtgggcggctgtggtggtgccttctggacaggagcagagatacacctgccatgtgcagcatgagggtttgcccaagccactcaacctgagatgggagccgtcttccctagtccaccatccccatcgagggcatcattgctggcctggttccctttggagctgtgatcactggagctgtggtcgctgctgtgatagtggaaggaggaagaggtacaaataaaaaaggagggagctacactcagg

SEQ ID NO: 648320 - DNA, 329 bp, Homo sapiens
  misc_feature (150)..(150): n is a, c, g, or t
ctgggggctggggagggagtattcaaaagtgtcccaattttttggcccagcgtgatggctcacccctatcatcccagcaatttgagaggctgaggcaggaggatccctttggttcaggagtttgagaccagcctgggcaacatagcgagnctacatctctacaaaaaagaaaaaacttagctgggcatggtggtggtgcattcctgtggccccagctactttggaagctacggcaggaggatcccttgagcctaggagttcgagactgcagtgacccatgattgtgccatggccctccagcctgggcaacagagcaagactttgtttca

SEQ ID NO: 648321 - DNA, 451 bp, Homo sapiens
cctcatttaccattctgaaaatcctagtgcccttaagaagtatgcaaaaatctactgtgtgctgatcattgaaacaggaaagcctgtatagtagcatatctgtttacagtatgttttactgaatattttaagcccactattgagatctacagctcagaaaaaaagatttctttcaaaatattactgctcattgagaatgtgcttagtcaccaaagaggtctcatggagatgagtaagattaatgttaacatctgttctgcagcccatggatcaaggagtaatttcaactctcaaatcttacttaagaaatgcatcttgaggctgagcacggtggctcatgcctgtactcgcagcacttcgggaggccaaagctggtggatcgcttgagctcaggagttagagaccagccggggcagcatagtgagaccaccccctccactgccagtctctt

SEQ ID NO: 648322 - DNA, 267 bp, Homo sapiens
atgacggcagatgtcaacagagaccaagcaatgacatgccaggatgtgatacattgcccacaggaaacaagtctcctggccagtgaacctcactcctgcccctcaggtgcccctgcaacatgctgacgcagtgaacatatacacgctcatagccgtcagcccctactagggcgccccagggtccgctctccctgcccgctgccccagccaggaagcatcacctagcgctatctctcatccccttccctgcccagccccagctgtcgg

SEQ ID NO: 648323 - DNA, 515 bp, Homo sapiens
attgtctatgatccattgatggctctgtgtggtacccctgtgatcagctacagaaacttcaaaggtagtccatgaaagcagacaggaggggggctataccctgacaaaaccacaggggtggagctgcccaaggctgtgggaccccacctcttgcatcagcaagaccaggttgtgagatatggagtcaaaggagatcatttgggaactttaaggtttaatgactgctctactgcatttcaaacttgcctggggcctgtaacccctttgttttggccaatttctctcatttggaatgcatatatttacctaatgcctgtacccccactgtatctaggaagtaactaacttgcttttgattttacaggctcataggcataagggacttgccttgtctcagatgagactttggacttgaactttagggttaatgctggaatgagttaagactttgggggaatgttggaaaggcatgactgcattttgaaatgtgaagacatgcgattttggaggggcca

SEQ ID NO: 648324 - DNA, 1223 bp, Homo sapiens
gttttttccctcttggggctgtcaagtggtcagttcagggtatttaatctgacgcaggcttatgcggaggagaatggttcatgtcacttatactacacatttagcttctctctactagcgggtgatagcatgtggctccaactggggctgtgcaggagatcagtccatagtgtcggcgcgcactcaccaaggctacctgccgctgctcgcagctagcaaccgcattccctatcactcggccgagcaggtgcattaccagcgcccacacctagtgcgcgatgctacaaccacttcacccacacctcctactccatacacaggccctcacacacccacacacggcacccaaacgcaagcgtgcctccacctccctcgccaccataaacacgccaaccccaccccaccacaggcgcgaacattccgcaagagcgctccctgccgggccccaactccacaacgcccgcaccaacacaactccccaccccccgcgccccaaccccagccctactccacccagcgcctcgccccccagccccgccccccccccacccccaacacacctcaccccacaccaaccacgcgcccaccctccaccgcgaccgccgccccctcaccacccagccccctcacggcatagccccgcacagcatacccggcgccccccccaccctccgcccccaccctgtacaacccccaacaccccaaaccacaacccccacatcccccacaccgcaacccggccgcccccccccacccacccccctccgccccgcccccccccccaccccccccccccccccccccccccccccccccaccgccccccggtccacacccccccccccacccccaactcgcgcccacagctccgccccacactgaccgcacaccacgccacaccgcccctccccacccctcccctcaacaccaccacaccgccccactcccccccaccccccccccagacacccccactccccaccccccccccacacgcccccccccacccctctcctcccccctccaccctctcccacaccatacaacccccccccccctccccccctctccctccccccccctcatctccatctttccatacccctcccctcctaactactaccactaccacttcaatcaacacactccacccctcctccactccatcttcacaacaactaactttctacgctccctctactcaccacacaccacctcacccc

SEQ ID NO: 648325 - DNA, 1121 bp, Homo sapiens
gcacagagccatgagctggaaagtccatgagatgctgaagaagtgggtgggatgctgaaggttctcccttccgaggccagccgattcagaccctgccatgttcaacatctccccgggggctgtgcagttttcatgacacagaaggaaaggaaaccctcgccggtggggaggcagagccttatcctcggctgcccattcttggatcccatgcattccagggaattgctcgactatgtaataaccctagccatcctttctttcaagggtgaaccagagccattccacaccatgaccattgacaatctccagcactgttccagcagaaggtgcggggccagacatgcatatgtgagatggccgctgtggactgacacatgagtgaaaggtgtacgaaatgcaggcagaggatatcgcagcaaattgggatcacatgcttatgtctccacagtgaacacaggcaactgcaggcagacatgtcattatactcccctgactctactagcttgctgaagtatgagaccgctattactgtcttgcatgtacttatgggtaagggatgtggacgtagaacagatggactcatacaggcggaagctagcaaagatcaaaagcaaagtgtcgatgaaaggcatctggctgacttgccaatcgaagtgcggcaagggcacagggaacatagcgcctgatgccatatggagggcgatgacatcactggggggagacacatcccttttgggcaccacatatgaggcccaccttagtgaggagaagccatatcaacgtatgaggtcataatcaattggcgcacaattagcaccgcattgtaacataaaaatctagattgacaatatacagaccgattagccaatcgagagccagtccacattgaggtcaaacgaaaagcaaggattagaagtagcaccatgagacaagcaccaaatggtataggcaaccaagtatacataaaggacatgcaataccgacgacgaaaaaaagacaccataagagatacaaaggaagacataaccatcgatccacaataacatagcaaacgcagaggagaaatacattagagaacaatcactagacgaacgacgtatgagaagaacaaattgcaatac

SEQ ID NO: 648326 - DNA, 177 bp, Homo sapiens
gcgttaccgcgccatgtctgcttggccctgctgcagggcggcctccagcgtcggacaacttggcgttagcgatccttaatggccagctctccacgctgctcggcatctgccatgtcggcctcgagggactgccctctaggccctttgaggctcctgaatcctcacgcctgtgagccg

SEQ ID NO: 648327 - DNA, 971 bp, Homo sapiens
tgcggcctggcgctgctgtgcgcgctcagcctgggtcatgctgccccaccgtggggtccgggtgcggccctgggctgcctcctgcttgtgtgacgggaacggacgcgcgctgctgccgggttcacactgaccgctgctgctgccgcgattaccctgggtaatgtaaaccgcgttcacttaactgctggaccgtgccaatggctgtccctgcgtgaagccagggatgggtgtggctgcccccacttccactgtgctcatgacctggagttgctagagtgtctaaaggagtggtggtgcaacaagagaccagatcacgacagctggtgacgccttccggagcgggaggcaggatcccgaacagcggcagagcaggacgagtgttgcccaacatccaggcccaagtaggacccggcaccgggcacagcacgggcttgacgcccatgtcggcgaagctggctcctccaaagaaaggagatcatcgggcgtctacggaggggtgtgcagcgatgcgactaggaacccgagagctaccactaaaattggagcgaaggcaaaccgactgtcaaccaccaacttggacccatatcagacaaacatagaacaaacaagtacgcatgaaccacaaaatatcaaggagacacccaaacttgacaaaacgtttacccggtgcaagatccatagtatagaatcttggaacatcatggaaaagtgaaagacccatacgcacagcacaagagacgaagattacaaatgcaatggaacacgccgagcactgggacacttgggaactaagtgacaagtatacacataccttaaaggtaaaacccacacgaagaagcgcatctaacatccatatgcaacgaggaccattgatattggattgggcaatccaagaatagccaatacgtcgacgcagcacacctcaacaaaattactatcacgttagatagtcaaactcatatacactcccg

SEQ ID NO: 648328 - DNA, 1318 bp, Homo sapiens
cctgtaactgcatcagctgcatcaaattatgctaggatgatcttatcctgtagcttcgtcttaggactaatgtgtcaccataccctagaactcgctaggaacggctgttctagggaatagagtgattacatatccgagagtctcgagattattgacttgaccaaaatccgcgatgagtcgtgcttcagatggaaggcaaggatgggtgaattatcatagctttgtcagaaagtgaccgtaattgctactcttacgattgaggcgttagtacttgaccgtgaacaccctgatgaataattcgcttcgctactacctatgtacatgcagatgcagcatcctatgttctcgtgtgatgcgtaaaagatgcgaattgtggctagtattaccgcattagtggcgccagtttatagggcatgtcgatagactcatatttctcacacatttcaacgggttgggtaatgatacgttgttgctcaccgtagagtccatgaaagctctaccagttgtggttccgtttgaagactgggtcggacacacatcgcgtttgatatggcgcacctctgagtgacgttagcgaagctgcggtctacatggcatagggagtttcaggtctgtaaagcatataccaatgtggttctcgcgagagagcgacttgtcagaaaaacgcaggtcctgggaggaagtaagttaggccctaggcattcaacacctaggtggactgcagatgaggtcatactgcggagttgtaagtgcccgttacatatgggtccccagttgcggtgagccttgaaagtaccttgtgtcacatagtagcaagattccctgggagaagggcttcctcatatgactcgcaaaagagggggatgcgttggatcgggcttttgtcaagtgaacccgtagtcactccttttcgcgtgttcacgctactagtgggcacgaaattcgcctggctgttcatttggtggaaggccttgggacgtcgagcgtttggtgtaggaccttcaaggataggggcgaaatcctgtggattgtaaacgctattacgttcacctaccgagcctttagtgcgagcccttgtaattggaacctcatggaaagtccagacttgcgcgtgtatatcggaatccccagtgataatagttacctggtgcgaattggaaatcactccaggaaggcataaaaatgctcgcatggggccacacattgtggcacacgcaggagacactttctgtggtctgaaagcgcaaggactccaacgccgtgagatcttcagaaccactggtcaccgtgagaacccagcaagcgctttctgcagacc

SEQ ID NO: 648329 - DNA, 460 bp, Homo sapiens
  misc_feature (246)..(246): n is a, c, g, or t
  misc_feature (255)..(255): n is a, c, g, or t
  misc_feature (285)..(285): n is a, c, g, or t
  misc_feature (294)..(294): n is a, c, g, or t
  misc_feature (312)..(312): n is a, c, g, or t
  misc_feature (322)..(322): n is a, c, g, or t
  misc_feature (401)..(401): n is a, c, g, or t
  misc_feature (420)..(420): n is a, c, g, or t
gagctggacctcagtacatggaggatggaactctagagaaggctggtcagtactactctggagcatttctcatcagtagttcacatacaaatcatccatccttgccaatagtgtcatcctcatgggtggtgaggtcatgcgcaaagactcaaaagatgatgttatcaatgggtacccagtgaaaaaggggacaaatattatcctgagatattggcataggatgcacagcactacgagtttttcccncaaacccanatgaatttactctatgaaaattttgcaaangaatgttcncttataggatactttcangccatttggnctattgggccccagatggctgtgcacggacaagtacatttcgccatggtgatgaaatgaaatgccatcctcgttacacnttctagagacgattccacngtgaagacattgcaaggacagtgtgttgagagcatacaga

SEQ ID NO: 648330 - DNA, 283 bp, Homo sapiens
ctctcagcagagaataaccacacaagccacagtataggacacagcagtcacacactaggcatcagacacaggactaatgtccagactccaaaggaactgaaagaaatcagcaagaagaaaaggtgacaattaccaccttcctgactcattggccagaaccaatgttagtggaattaacatatgccccaccccaagtgacttctaacgggctcactcaccacaaggagagtcagagcagatcttggaactgagacctacaggacacaggtactgcttctactct

SEQ ID NO: 648331 - DNA, 669 bp, Homo sapiens
  misc_feature (33)..(33): n is a, c, g, or t
  misc_feature (51)..(51): n is a, c, g, or t
tttccaaccattcgcacttgtaccaagatgccnttccccagtctgtcactnactatccctgtcaccttccgttcgtaggtcttgttgtccaagctgattttacatgatagtttctcatacagtacaggctcattagaaacgccaatacattccactcagttctcgaatgttctattcattgtagcattaccataggtacaggcagtctgtatgccaaatgttcatcagacagtgaccgctgtaggttacggggtcatgacaaagtcagcaatcctaagagcctagttaggcacaatgtttgccattatcattttaggctccccccacacaggcctccatatgtgcttttaaggcaggatcctctctgtaaattccctcataattcgatgctctttcaattcgctcatcattgtcattcacacgccgtctgtgacacacgtggatctattccagcagagcccatttaatctagtcataagagatccatatatatcgatatatgcccacatatattggactattatctaggttatttatagattacccgctcagctatagggcacacgtgcacagtgtgcaggcatgctccataggcactcatgtgccatgttggtgtgttgtacccagtgtatgctcgtctaccgtaggtatatctcgtgacgttggtcc

SEQ ID NO: 648332 - DNA, 170 bp, Homo sapiens
  misc_feature (50)..(51): n is a, c, g, or t
gttgccttcctttcagaaatggtggaagtcctgcaaatgcataactgagnnactggatttaacctatcctggaaacatctgtgaaacaaatattgttggcggagattggacttaggataaagtggatacatttttatttacacctctgtattgactaatatggctctcaa

SEQ ID NO: 648333 - DNA, 108 bp, Homo sapiens
agctcttgctctcacccatctgcatatttcacttcagatacctttccccgagctagttaccattgcacctctagctgtcacgcagctcacacagcatggaacaaaatt

SEQ ID NO: 648334 - DNA, 265 bp, Homo sapiens
cggatcctttgatggcaggacactggggagtgggcattgtaaccggggttgttgggaccactcttggggtcaggccctgggtgaggcacaggaggctgcacacatggcactgtggtgggttctagccgggtcaggctgggaaggcaggagtagtgtctgtggcaggatgggaagaagcttcagtacttccctctcttgcacctctgcccactccaccttgaggcgttggctccctccccgctcatcctctcaccacattgcctga

SEQ ID NO: 648335 - DNA, 543 bp, Homo sapiens
  misc_feature (56)..(56): n is a, c, g, or t
  misc_feature (80)..(80): n is a, c, g, or t
  misc_feature (87)..(87): n is a, c, g, or t
tgaagtccttgcttgactgattgctttctattagcagaaagaaaacaggtccatcntatgtatctgagaaacaacatcancaccctntcgtatgtggtttgtattccctgacgcggcggacatttttgcagcagaaatttctccatcactgtccagattctggccctggtgggcaggtctccatgacacctttagtccctctgttcaacattcttaaaccatggacctttttgtttgtttgtggccgggggaggtggtgagaaacgttacttgaagcttgatcattctttcaatttcatttgtttctttatttttaatctgttagatgcaaattgaaatgcaatgctttttgaaaatcagcaatagtgtctgtagtatatgatgctgtcacaaaatctcaataaattgatcctgctgccattccttccaaatacccatccatgcttttcttcccctcgtgttttgtttggtttgttttaaacttttcgtacatgtacctctctcccaggtttaacaagcatgacgagaccactctggcattct

SEQ ID NO: 648336 - DNA, 460 bp, Homo sapiens
aggaggttagaaagaggaaaacggggacgggcgcagtggctaacgcctgtaatcctaacacttaaggaggctgataagggtggagcacctgaggtcaggagttcgaggctagcctagccaacatggggaaaccccgtctctactaaaaatacaaaaattagccgggggaggtggtgagaaacgttacttgaagcttgatcattctttcaatttcatttgtttctttatttttaatctgttagatgcaaattgaaatgcaatgctttttgaaaatcagcaatagtgtctgtagtatatgatgctgtcacaaaatctcaataaattgatcctgctgccattccttccaaatacccatccatgcttttcttcccctcgtgttttgtttggtttgttttaaacttttcgtacatgtacctctctcccaggtttaacaagcatgacgagaccactctggcattct

SEQ ID NO: 648337 - DNA, 117 bp, Homo sapiens
tagagtggcgtggagtgcaagaacccggctactgccgagctgttggaggaggctgaagcggctggccaagtccgaccccatggttgcagtgcttcatcgagggagtcgggagagcac

SEQ ID NO: 648338 - DNA, 958 bp, Homo sapiens
  misc_feature (958)..(958): n is a, c, g, or t
ctacttgggaggctgaggcaggagaatcgcctggacctgggagactaaggcaggagaatcgcctgggctgggaggcggaggttgcagtgagcccagacggaccattgcactctagcctgggcaacaacacgaaactccgtcccaaaaaaaaaaaaaaaaaaaaccccaggggggttgaggttggcaaaaccgaattacccttcttatttataaccgccattacttccgtgtttaacagaggaggaatattaagaagagacaggtattcaaggcgagagagctctcaggggtgcacagacacctggtggaggggttggaccttacaagagcttctggcgcttacgaaaagttcttctttagacggggtgaattattcgccgagtatagagaacgtgtataggggtgcggcgttgggataagagagcacgtgggggggggtgtcgcacttttaggcggaggagaaggggagtatgatcaaggggaggtaattgctgtttataagcgacgacgccccaaaaagaggagggaagagattatccaaggggtgtggcgacaagggcgagatttgggcccttgagcgagggtggggggggatatttttggtgcgcggcgccaatagtgggacatttccttttacggcaaaaggtgttccgcaatatgaggtgggttcttttacaacccactgtggggggtgtggcagacagtgcgtgagatgagacaaaagttgtgttacaagacagagtgttaatgtgggagcgcgcactcacgtgggtggggtcttctgtgggagagggggtctctaaagggcgaggaataacggggggtgaaaacaacgggggggagaaggagaagaggagaggagaaaagcacagtataggatagaagcggcccttttgtggaggaatatttatgatgatatgacgactatgtgcggaacacacatttttttttgtttgtn

SEQ ID NO: 648339 - DNA, 311 bp, Homo sapiens
atgatgtgacggtggtagtggaggtgaaggagatataaagtcctctcttggtaaggattccaagggacacgtgtcaacctctataccagctctggctgcgtctgccctccacttaaggtaaatgaggaatatatcatcatgggctatgaagatgaggaacgtaccagatgactctgggtggaaggctctatagctgagaagtggaaggatcgactcggtaaaaaagttaagcgctgggatatgaagcttcgtcatcttggactcagtaaaagtgattctagcaatagtgattccactcagagtcagaagtc

SEQ ID NO: 648340 - DNA, 921 bp, Homo sapiens
agtcgtcggggtttccgtgcttcaacagtgcttggacggatgccggcgctcgttccccaccccggtgcggccgcccactagccggccctccgtcacctcttcaccgcaccctcggacggccccaaggcccccgctcccgctccagcgccgcgcaggcaccggcgcgtcgctgcgcctctccttagtcgctcggcatgacgcaccgcgtccacctcgcatggtgcccggagctaccatcaggactcagaggccggcatcaaccgtcagatcaaactggagctctactgcgctcctagcgttgtacctgtcctagtggtcttacatatcttgtgactcggctgattgatgtggcttgggacagaggttttgccgagtatactttgtctgacaccaatgctcatgaggagagggacccatgctgcagaagacctgatggaagctgcacgaaagccaacggagtgttgtgaccgaagtcttgcgctgtgagagatatgcaagaaagcaagagctgtgatgacctgggagagcggtgctgaaatgttcatggagtgtgcattgatgattgtggataaaaaaggtgtgaactcagtcagtactggaactgggacaagactggcgcccttgatcaagtaatgacgccatttgtgttgactttcatttgaagacacattataccttgaattgagccggtgaaaagccttcaaggaatggggtgacccccgtgaccaaacttgggcgagatgggagcgcgcgaatctgcttcgggggcatatctctttgaaaagcaccccctgggacaccgtgatactgaaagctacgcctcgggctaattcccattagccgtgggttgattcctcgttcacgccaggacatgatgttgtgggttcctaacctatctaacgtttgcaaatccctaagccg

SEQ ID NO: 648341 - DNA, 137 bp, Homo sapiens
aggaggttgagctctggcagtagggcacgactgctgctgggctgagctcttgccgaagctgaagcttccttcggcgctatgcaggagttggggttgagactggagctggccttgggatttaatggggaagaaggcct

SEQ ID NO: 648342 - DNA, 85 bp, Homo sapiens
ccatttccgtggtttctcatgagctgtgttcacagacctcaagcagggcatcgcatggaccgcaggagggcagattcggaccact

SEQ ID NO: 648343 - DNA, 182 bp, Homo sapiens
atcaactattcacctagtacaagcttcacattacaatttaatcaaaggtaataaacatgcacaaaagtcaatatctcatctatatgccagcagtttaaatgctattggttcagtctcagcacattttcaaacaatatgacagttatcacttaactaacacaatctttctattatttcactga

SEQ ID NO: 648344 - DNA, 332 bp, Homo sapiens
  misc_feature (304)..(304): n is a, c, g, or t
cacagtaacatgaccatccctctgctttctgtacctggaatgctgtttcaagagaccaaaagccattaaaaaataaaaacatccctgaaagatggatattaacactatttactaagaggaagcattactgagttttcaaatgcaacatgcacaataatcaaaaagcttaccttgatgacctgttggggcagaagcaaccagggtaaagagaaaccacaagttacatctattctactaagctggtaaagagacactccgttttacctcgttctctggggtgggagatggcgttgcgagaactaangtgacccgtttcctaaagaaccctggag

SEQ ID NO: 648345 - DNA, 111 bp, Homo sapiens
tgcagaagtggagctgctatagacatggcccctcaccaggagagtcatcagtcccggagaaacttgcaggtaaggccgactatcacgtgacaccagcttgctcctgggata

SEQ ID NO: 648346 - DNA, 311 bp, Homo sapiens
  misc_feature (142)..(142): n is a, c, g, or t
cttcccttcttaaaaccccccccctttttttttagggggaagggcccgtttttttcccaggtccccacggggggggtgaaagcattgtttttgggtaaattttggaaggcaaaattttttattttttcccccaaaaactttntattttggttttatttggaagggggggctttggggcccccccttcccctttttttttcccccaatttgaaaggtttgagggtttttgttttcctggggggggggggggggcggccggggtttcccggtcccttgtttttggcccgtttgaataaaggggccccctttta

SEQ ID NO: 648347 - DNA, 779 bp, Homo sapiens
  misc_feature (616)..(616): n is a, c, g, or t
tttttttttcagaacttgtcaggcatggctcagagcttgaagattaggagaaacactttcttattaattcttcacctgttatgtatgaaggaatcattccaggtgctagaaaatttagccctttaaacacgtcttagagccttttatctgcagaacatcgatttgtgtttttattcatttcatacagaattaattccagttattgcgtgattttaaaggcagagaagtttctcaaagtttaatttcaccctatgtgtttatttgggtgctccaacgttgtgttatgtgtttgaacattactttcaaaaattaatgtgtgccagtggtgggttgagtttaattttaccaagagttaactttactcgtggtgtttaaacaagtacgttaataactgttatggtaatctttcatccaaaatatttttcggcagttatattagtgaagatggtttcaactccagattggtcttgcaacttcagtttatattttggccagggcaaaaaaactcttaactcgtgtgtgtatatcgagaatcccttaaaattaccagacaacaacattttaaacttcacgttgttatccctaggggatgactgttgatgagtatccttttccncgtgtgtaacccgtagtggtatcctctgtatttctaggccaggttggtttgctaagacgccttaagaggattcctttgcttccaacatagggaaggtctggacttttaaacctaaaagggtctctctctatggtccatggtctgcaggtgcaggtaactaatt

SEQ ID NO: 648348 - DNA, 115 bp, Homo sapiens
aaaaaaaccgccaaaagccaaaatggggggcttttgatgtttccataaaagttttataacccggggaaccagttttttatgtaaaaaattaaaaaactatgatgatgccctttta

SEQ ID NO: 648349 - DNA, 1686 bp, Homo sapiens
  misc_feature (1360)..(1360): n is a, c, g, or t
  misc_feature (1430)..(1430): n is a, c, g, or t
cctgcctagattgtgttctgggtgtgcctcccccttgttattactccatccgccccctgtggtgtttttcctctcattagctcggccggtctgggaaattactatcttctatcagtgcactcctcttcggttgcgatcttgctattcacccgtttgctttcagtggggcattgtctgcttaatcacgtagtgtctttgctctcttttgtgtgggaggtagtttgtctcttcccctactgcctacacatcttatccagcttcgttttttgtttgggtctcctgcggctgtgttgttgtgtctccccttcccctcaccctgtggggcttctcctgctctgaagactggtccatggggcgctctcctccatcattaacattttacttgtcctccctcagttgcttccctgcttggttgttcaggtatgctggagctgcttctcctcatgtggttgtatcttcctcttctgtcctgggggacttgttcttatttgttatcagggtcgcctcacatgcgtgcctttgtgtggtgtgggggcgccctctcttctgtggtgtgtcgtattcttgtggcataccgtcttgttgtttttctctactctcctctctctgtcttctaacctcggtgtgtttgttgtccagcgtaccccaacgagctgttgttgtcccagccaccagcatggggggtatgtatgccttcgccgctgtgtttgtctcgtcttcgtcctgtgcgcttctctctccgttgtagtggcttttctccctgtggtttggtctccctctacctacttctttgcctccaacactctggtgcgccctgctcgcacaatgacagtcgccccttgcggtgccggtactgtgtgggtcgttcctaatctttcttttctggtctttcgccgtggtggcaactcggcgcctgcatctgttggtggccccaactctgtccgcggcgtcggacaagagctttttgggtgtccctcctctctgcaggatgatgcgttgcgccccgcgatgatgtatctttctgttgagtgcgcagagggtgtgcgcggccgtctctcactacacctctcagatcgtctcttgttcccggcgcgctctctttctctctctctcagtgttatgtcttcccagagtatctttgtgccactcgcgccaccctcctctctctctgtgcggcgtgtgtgtgcccagagtgagtgcgctctctctgtgcgcacgacgagctctctcccagagacaccactactgtgcgtgagctctgtgtggtgtgtgtgtttgtgtgtctgcgcgctcaccactggtgcgatcccctctctcccgccaccctctctccctactctccacaggagagcggttgtcnccccctcactcgtgcggcggtttcttacgcgagcgcgctcctctcggcctctcctccgccaccgcggcgnccctcttcttctggtttattgtgttggctcacagaggcctcgccccgccgcgggtgggtggacttttctcctgcgtggcgcttctctccctcgccctcggcgtctccgctggtgttctctctgacatttttgtttccctcttcgtaatatctctctctattcaaggacttttggggaacttgtgcccctgctttttctttttacaaataaagaaacccttttacccccaaaaaaaacacaaaaacaaaaaagaaaa

SEQ ID NO: 648350 - DNA, 491 bp, Homo sapiens
tgaatcgacggtttctcaatcacagttcatatttattggtagaaaagccaccatggattactgcagacaaaatgcattaggatgaaaacagacccaaaatatccctagaaaccaatttaaaaatgatcaactttctaataaatggttttaaaaaataaaaatccgtgagtgatttttaaacacccttatcatagatatatttgtgtttcaaaggattatttctctttaagacatgttaacaattaagaataaaaccatcaccgggtgcagtggctcatgcctgtaatcccagcactttgagaggttgaggcgggcaaagcacttgaggtcatgaattccagaccagcctggccaaaatggtgaaaccccgtctctaccaaaaacacaaaaatcagctgggcatggtggcacacgcctgtaatcccagctacttggaaggctgagattgcagtgagctgaaatcgtgccaccgaattccagcctgggcaaga

SEQ ID NO: 648351 - DNA, 471 bp, Homo sapiens
ctaatgcataagataataattcgcatttaggtcgcctctcccgccttacccccttttcgatcccgataagaggtaacttcacccctctcgccagcttggcccatgttctcggcgccatccagtcctatgcccacctcatccacgtccagcgactcatccgccgttagcacaccgttccggaaggcaaaagccttgtatgcctgcaaagctgaacgtgactcagaactttcgttcacaggaggcacggccttcgataatgcagagtgtccttcagctttcacagccatcttcactgccacaccggagctacaggcaccttcacctttaacctgggcacttccactggtcgtgtgacacaccttctcacatctcgtcttgctgccataaccccatctttacagagcagcgagagtgatttctgaaacacagaattggttttccagcccttgagtggactaccattgctttaat

SEQ ID NO: 648352 - DNA, 273 bp, Homo sapiens
gggcatgtgctcatttaaaaattaacttatagggaggcaaggcgggcggataacgaggtcaggagatcgagaccaccctcgctaacacaatggaaacttatttttaataaaaaattaaaaaaataaggcaggcgtggtggcaggcgccttaatcccagctacttgggaggcagaggcaggataatcttttgaacctgggaggtggaggttgcagcagtgaatcgagatcgagcatggcactctagcctgggggacaagagcgagacttctctc

SEQ ID NO: 648353 - DNA, 183 bp, Homo sapiens
  misc_feature (100)..(100): n is a, c, g, or t
gtcagcatcccctgtgtggacgagagctgcccgagcgtagacgtctgccctcctccccaggagaatcaccctcagcacctgcagacctgcagacacaccntaaaccagagtgcagggcctgtgcctcctggtgaacacttcattcattgcctgtgggccgtgaggtcatcaagttcaggggtc

SEQ ID NO: 648354 - DNA, 744 bp, Homo sapiens
gcagtccacaaggagaagagagtcttcattgaactctttcgaacgaaccttatgacgaactggaggtagaaaccatacacagagccatttgaacaaccttattatgaaagaaaccacgactgaacgaacctaatgaccgagattaacggtaagaacgctaaaaaagaagttcccgacggacactgggacagaagattttgaacgacagggccagacctactactgacacacgggaccgaacggctatgaccgacagggggacggacagagttgggacacgaaggcttacccaagaaacgggaacgtcacttcacagttccaaacacgggacggtctactgaacgacactcaccatgacgacgaaacacgttcccaggccacaagtaccctgacaaaggaaaaggcaccgaacacgcttccttaaaagtttactacaaggaacgcccagtacactttgaacaaacaacttggcacacaaggactttcgtcgacaggaattggacgggaccgaaagacaaggtttccaagttccaacgcaaaaagttacccttgcaaggttttccacaacgcaacaggattggttccccaccaaaaaaccttttccccgggaactccacagctcacacgggacagcaaaggtttatttggcacggtggacaaagtttaccaagcgtgtgtgcaatttacccaagcgacgactgggttcaatttccacggaaggcaaccaaatgttcctttgcttct

SEQ ID NO: 648355 - DNA, 1164 bp, Homo sapiens
  misc_feature (1)..(1): n is a, c, g, or t
ntcttttatttcgtttgtggctgtctcaccaaaccatctatagtcgctcataagcccgacatagtcccttgcttgttgtgtgatgaactcccctccacaagatgtgtttgtgcttgtcacacaggggtttctccattgctccagaaatgtcctcctgttgttggtgcgacaaatggttctttttggggatcgccaacatagttgaacctcaagggcttggcccctcaaaggggcgtcttgaacacaatggataccttgatccagaggtcggccgttctaacttttgttctcaagattgcgcccttgttgggtaacactcctcattctaatgtgtagttattttctttgtcactcttgggatacacccacttcatggtatcccataagccttttcccccgtataagtaatttgtgtcttccccctagaccaccctttctcaatcctcatctttgtacaacacaccaaaggagatttctacgggacccccctaatctttccgcaccccaagatgtatttttctccttggtaagattccactccctaccaccccaattttcgtttctaaccccacgtggcttctaatgttgaggttgtaaacccaactcccacgcctataccccccttagttaataataaggtatcatctaagcccccagtggcacacctgtagtgacacccacccctggattttacacagccagccttgtggagctctcttagccagtattacccaacctcggggccatagccaggaaacaccccagagaggctccaagaaggggccagccctcccgccattagaggtagtatatctgagcttcttgccgctccttcccagaggccccgagccaccgtcaagaggccgccaccagcggccagccccggaagcccccccggcacccaccatcactctctagaggaaagggagcccaccgcgaggctcacaggcagggccctggccccacgggcaagggcgagcctcggaaaccccctggaggacgtgctgtggctgcaggaggtctcccacacctgtcagagtggctgagtcccaacccatgggccctgaacccgggtcccccttcccgcaagcagcccccccgaatccggaggctgcgggcaaccgttatcccgctggtttaattaacctcccgcgcgctcaccca

SEQ ID NO: 648356 - DNA, 984 bp, Homo sapiens
  misc_feature (713)..(713): n is a, c, g, or t
gcgcctacaaagtggtgctgatcctggtgtggtgagagtgtctgggaacctggataagcgtttcagcgggtggtacgatgccgacctgagacccggtgggtgcacgaggaggcgaggggcggagtgcaggcgctgggagatgctggctatgagtttgactatccatgcttcacgctcagtgcatcaaggatgaagcgatctcgtgacgccgttctgggactacgtgctaggattgccgagttgcagtcagtagtgtgtgctgccgaggtgtgtgagggacgttgagtagcctcgaagtggagtcgggcacgtattgggggagtctataccaggatctcagataaggagcacgaagctgcatgctagagacagtggctgacgtggcccatggttgacgtatcatcggaggcggcgtccgtatgatgtcccgaccaacctcgcagagtgggaggcccacgacacactccctttctacacgtcgaacatcaggataggggggcctcgcaggtctagtgcgagatgctcacagtaaagattcaaggataacccttccgtgatgagtaggtcgtgatccggatacttagttgccatagagtggtcgtgccacttcctggcaatgaagaaggctagattcgcccagagtcacaggcagtggggagaattggtgtactgaatttaggatgaccatttgggagaacagaccgtcggggggntaatttgtccaatgctggtggtggaagggtctcttcatgtgagaggcgtatcaagtggaagcttgatagacatgccagataatgaggtatgacccattttgcttgtatgaattgggactcaggagggctttgaaagggctagtaaaaggccattcatgattgtggggggcatgaagaaagagaggtgagaagggccatgtgaaccttgttggttgcttggattggccatgaaatgtaaagtcggccaagagaataagttcgcagggaaacg

SEQ ID NO: 648357 - DNA, 153 bp, Homo sapiens
tgggtcatgcggagatttttccacagagggggaaaaagtttttttttaaaaaaagaacatattaataaatacattccaaaacagagcaaatgtgttggattttaacatgtcaaacaattctttttattttttttttttttttttttttttttt

SEQ ID NO: 648358 - DNA, 195 bp, Homo sapiens
caaagcgagacctgtcaaaaccgccactcggtgaagaggggtggcagcaccggggcgccacgcacaggcgggaacgcagggcaccccgggaggacgcaagagcgcggacgccaaccaatggaccgcgcagaaccaaaaaggccggcgccggcggaaccaggacgaacccccacccacccacggcccgagcgaccg

SEQ ID NO: 648359 - DNA, 139 bp, Homo sapiens
tgctccggttacattgcaatctagctttattttttaattataaagaaaatctttcatctacagagaacagaatgcgacataatatcaatggcgatgaatgctgggaaagaaaacataagccaagaaacagcgatgtcta

SEQ ID NO: 648360 - DNA, 825 bp, Homo sapiens
  misc_feature (419)..(419): n is a, c, g, or t
gccatgcatcatcgtcaccatgcccccagttgtggctggatcaacactgcccacaggcatgggtgtctgcgtgcttggggacttgcatcagctggagtggaatgaagggggaaggcatctgtgaagcctacctaggcgcgggggatgtagcagtctcgtaccaggcgagtgtggctggaccggtcgtggtccgagagtccatctccagctcttgtttcagtctctatgatgtgctggagctggatcgaagcgatgcggaggagacttcgcgtagagttcatggacgcaggcttgatgaggggataccatgtgccttcacctgttgccctgacgaggtacccggtcatccaacatcaagacatgtcaacacaggcacagtgtatcccaggggcgagtgcctgggtgctgtcgtgcggtantagactagccggtggtatgctaagagatggcgcaagcgtcatagaatggcatacgcactgtaaacctcaagcgcaggcatgcaaacagtggatcgttcatgttgcatgtccttgtcgcacggcctgttacttcaccgtaaccgtagtaaactgggccgggaaggagtccagcttgtgagacggactgcttggggtgcagggcttgggggaagccgccggcggctggaatgttgttagcgttggggccgtttggaattggttgataatgacttcgcaggggggaaccggtgggtcgggagggggcgccgattgtcgaacaacgaggacgcaaggtcggattgggaggcctggattccggaaaaggccattggcctatctaccgtgggctttggtaatggacccccgc

SEQ ID NO: 648361 - DNA, 229 bp, Homo sapiens
aactggaaatttaaaatcatgctacactctcccatccggagactgttggagcaatatagccaaggccgcgtctataaggaattgcacttgacttggcacacatttctatgctgctctgaaggtctcgattcatgttgccatatcccgctgaaaattgttccactatcaggagatttcgacgtgttttcctctctgaatctgttatgaacacgttggttggcttatcgag

SEQ ID NO: 648362 - DNA, 615 bp, Homo sapiens
  misc_feature (16)..(16): n is a, c, g, or t
ccttgggcctcggganccagacgacacaagatgttccccccgtccagtggcttctggcgaacggagcagctggtgcggagtggcgggggccccctgtctctcttctattcaggctcgcccacttcctacttcaccaagcgactgcaggctggcctcgagcagagccacctcagtaaggcaatcggtcttccccgctggggtccggagaagggctcctgggcctcagacccgggcctaatggtcacagccacctgctgaagaccccactgggcggcagaaacgcagctttgaccacactgctgccctcgcaccgagcccagcccagaaggcagctatgtgggccagcactcccaggcctcggacggccactacgcggactcctacctgaagcggaagaggacttcactaagtggctggcaccagagataactcaagggcctgcaccaaatcgcttagggtttactgatgtcaagtaaagagtaaaaataaaccatttactctcttacggtaatagaaaaatctctgaaagactttactgaccaatcagacggagcaccaggagaccaaggggtgtgggggagtctggaggcctcattatgtctctggtatgatccc

SEQ ID NO: 648363 - DNA, 85 bp, Homo sapiens
accctcgggcggtaccgcccaggcagccctaaatccagcctcccaggcccccagcagcgccctccgccccttctgtcgtcttctc

SEQ ID NO: 648364 - DNA, 361 bp, Homo sapiens
cgccatgctgagttccccggcccgcgtgggtcctgtgcggccgagccttcccgacgagcgccggcccttgctccacgatgcccagtcccatcgaccacccaagggctgaggagtgcgggctcacggttacaggattcccatttcagaactacgaccatttgaaaaatagaagatttaaagattgacgcaaagtgcatgtaccatgcatacaccagacggagtctcactctctcgcccaagcttgagtacagtggcgcaatctcggctcactgcaagctccgcctcccgggttcacaccattttcctgcctcagcctcccgatagctaggactacaggcggccgccaccacgccggctaatt

SEQ ID NO: 648365 - DNA, 187 bp, Homo sapiens
acagcaaggagtcgtcaacgagttaaagcagctcgggctggagacatagcattcattcctgttcagattgcgacctttggtggcctcctactccttgcccccaacccggccccgccctttcctttttgttccccagttctttgacctcaacaatattgaggcaattcttttgttaccttgtttcaac

SEQ ID NO: 648366 - DNA, 476 bp, Homo sapiens
tggttttggtcaatttatttagaaaaaaattaagcaggggcaaatgagatacctcagggttacaacagagtatagaaatgtctagcaatagtcaaataattggatctttaaatacaaaataaccacatgaacacctaatatacaggttcatctgaatacatatttattagataaattattagaggtggtcacattcatctaactacattacagccttggcaagactagaaatcacaatttagtttttggaccagtttaaagtatgaaagttgatggcttggtacatacgagtgtacaaagacgagtgagtggttccgtgggggagtaacttcaggcgtgcacgtggtggggtgtgtaatgtgtgtacgtgtgaatcaccggttgatcatgatatcaaagaattatacaaagtatgaattgggttacaatgttcttctgaaatcccggtttctttgtcattatttccatagcacccc

SEQ ID NO: 648367 - DNA, 233 bp, Homo sapiens
  misc_feature (64)..(65): n is a, c, g, or t
  misc_feature (67)..(68): n is a, c, g, or t
  misc_feature (184)..(184): n is a, c, g, or t
  misc_feature (203)..(203): n is a, c, g, or t
  misc_feature (216)..(216): n is a, c, g, or t
ggggctctaacagaaaaaggagttggaatacagaatgcccatcctttccaggagaaagaccacnntnnggtcagaagagcaggtctcaggacagcaggggcagctgctctctctcctgaagcatggctcaggtgtggagaagggtttcagaacacttctgggaatccggtcattaacagctgangagaagacggattacaganaagcaccttgganttgtgcccgtagaccca

SEQ ID NO: 648368 - DNA, 994 bp, Homo sapiens
ccagagtgactcaaagaagtgatggtgctgaacgcacagaatcatttgtatatgagcccaagagcagaagaaaatgtttcatgccacagtggcactgagaatgaagtcttccgagtgaaggtttttaatattgacctaaaggagaagttcacccccaagaagatcattggcctagcaattatgtttgccgcatgggttcctggaggtatattctttcacacttggtggctgatgtgaattggctggaccgaaacatgggagattcccaaaggattgacttagaagtggccgcgtaactcctaaaatcaatcagctttgctcacaaactaaaggcagttctcgtgaaatggggtggttcgagagtacctataaaaccacagtgagggtgaaaatcactctattatgacatacacagataatacacgggacatgggagtggtggtgcgctgggacgacctgagctacccatcaactgtgtagcgaacgcgatatactgtgaaatcacctgcttttgaatttggggccgcccaaaggtgggaatacccgcgagttgagatctgtaattctattagtcacactcacaggcatcaagaccaccgacaaaacacgaaagacatactccatcctgatttccagtatttgtaaacttcacccgacattttcttctaaaaatctggatgtcatttgacgaagcacatggttactggagactaacgacttagtgcttcaaaaatgtcattttccggctggaatcaaaatataataaacaccatattttaactgtatcccatggaagggatcgggaagcgctaactttccacgctttaaaaaggcgatttgctttcactctattgacaaaaaagggggctaaaaacacgaggggcatagacgccagtttgcaagggccataggttataacaagcgcggtacacgagcaaatgatgcacactggtgagaccaaacggaagatgctggagaaaacaaacgggggaac

SEQ ID NO: 648369 - DNA, 181 bp, Homo sapiens
agcgataacggtgcgctccaggtatggccataggtaccgggaagcaggatgagagccgggcggtggagctgcgctgaacctggattcgcgaccgacctggattcgcgaccgagcctggattcgcgaccgacctggattcgcgaccgaacctggattcgcgaccgacctggattcgcgaccg

SEQ ID NO: 648370 - DNA, 1398 bp, Homo sapiens
  misc_feature (550)..(550): n is a, c, g, or t
  misc_feature (689)..(689): n is a, c, g, or t
  misc_feature (889)..(889): n is a, c, g, or t
gcctcgcttattttaacctaggtgattcctcagtggaggagccaccgtctatcgggacacatgagggtgtcaaaccgttgaccgaagagagtaactcccatgttaatcatccctactagtgaacgatctgataatagtcaagaccactgaattgagagaatagccgtgcaaagccatcgacgtcgcattgtaccataggaaagatcccggcagaatcatgagctgtcacatacctacatctacctctaattgagtgcaactcacaatacttattttcagcctaagttatgatacgcagactaattgtgttcagtaatgtaggtaagcaatgagcaaacgttgtgcgtctccctaccggcaatgaattgccttcgcgttctacccagttaatagtaacccactttgcagaccgtggcaacaagagtcttagatccgaggtcgcctaggaatttagttgcgtcaacaagaatatcaaacccaatagcaataggctgccaatatggagtttcaactccccttgcaaggcgtgtgctaccacattcgcgcaaanaacaacaaaggggcccaattgtcttcctgttgaaaggagaccaccatgggttttgacacctatcaataatgttccccggcccgcgcggcagacccttcggttggcgagccacatttgcgtgtatagcttctcccaggcnctatgggtaatgtagcaccacattacaaagtgagtcgaactccttcgtgagatcaattcatcacgacgtagagtttcaaggatgagccgagcctaggcccatttgtctcgcaagtggttggcaccgaatcgactttgtgtttttagaccctagatgctgccagcccgcgaatatagcgctgcgattaatgagtccccggnttggggcatggagacgcaggttgagcaccaagttaaaaagattccactcgtgtggtctctccccttttaaccctctgtaggggaggaagcccctctgtataacttgtaaattggggcacgttgcacaaccggaaggcgcgttatttttccaagcccattgggttcattacatatttactctttctcatgttagaagacccaggcttggaagctagaatatggaagtccccgttggaacccctgtattgtacacatggcaacggggcccgttggggcctactatgaagcaaccctagggcacaaaacagccaaccggacgtgttaggagtgaaacgcctcattaagttgggagaaaggcccttatatagatctgtgtctaacttttacacacctgggtgcacatatccaaaggatataatattccttttaacaacccaaagttatccgctccacacgtagtgtggtgtccgcattataggagagtattaatcgcgaaaagagcacgtgtg

SEQ ID NO: 648371 - DNA, 441 bp, Homo sapiens
gtaaaacttcaacacggtctgcttcaggcagggcttacactcttcccagagggccatcatggtctcgttgcacacttccgggaatgccttcagctttgtctcggagtcccgggtctcatttagggcatcctccttattcttcttggcttcctctaagacactgagcagcgtcttgcgctcttcgttcgttttctctatcagagtcttgatctcctgcacgcccttgacggcattctgaatttccctatcgatgtacttactcccttgagtggacatttcctgcagctcattgtcggagaccagctggtctcccaggacctgcccacgctcccagctcagcagcagccccacacacagcagcagagtcttcatcttgcctcctcctcctcggatactggggcccaagaatgcctcggtctgcggcgccggcgctcgtgcgct

SEQ ID NO: 648372 - DNA, 401 bp, Homo sapiens
cataccgtggaccttctgtaattgtccgttcttttgtctattctttttattatctttttattgttgatctgtaggaagttcttcatgtactccatgcaaaaatcctttctcagatatatgtatttttccaattctgtggcctgtgtactccttctttattttttttttgagacagagtctcgctctgtcacccaagctggagtgcagtggtgtgatatcagttcactgcaacctctgcctcccagattcaagcgattctcctgcctcagcctctggagtagctgggattacaggcgtgtaccaccatgtccggctaatttgttgtatttttaccagagacggagccccaccatattggccaggctggtctcgaacccctgatctcaagtgagctgcccacc

SEQ ID NO: 648373 - DNA, 165 bp, Homo sapiens
ctttgctacaaattaaagaaatcctaaaagttttccttggtcataaagttggggaatgacagaatttttttttgttgtgaaatgtatgtacagagtagaccatctctagccctgtggtgaaaaaggtacactcgaatgtttgcataaagcaagtgccaaatgcca

SEQ ID NO: 648374 - DNA, 190 bp, Homo sapiens
tatagctgacgtgagagacgtgttgcatggggggcatgtggcttctggaagtctctccagtggctctgtagctggtcttggaaagaaatgttctagaccaagggttgtcaaacctacagctcatgggccaaatccagcctgctgttctgcttttgtaagtaaagttttattggaacaaagccatgttcat

SEQ ID NO: 648375 - DNA, 328 bp, Homo sapiens
aggctccagcttacgatatttggaggtcagcactgatgctcacgtgtcgacggaacttgtacagggaagtgcatgcaccgaagtggtaaatacacgtctgaccaggctccatataaacgatatttggaggtcagcacggttctcatgtattgacggaacttgtccaggaaggcatgcaccgcagtggtaaatacacgtcgagctggaggcatgctagcgtagctctggtactgaaaggatcctctaaaagtcgaccaggctccagcttaacgatatttggaggtcagcacggtgctcacgtagtcgacggaactaagtacagggaggc

SEQ ID NO: 648376 - DNA, 339 bp, Homo sapiens
ctcatagctgattctagaggatcccagtcaggtgcaacaatcaatgctcaaggaaataaaagaggatacaaacaaatggaagaatattccatgctcatggataggaagaatcaatatcatgaaaatggccatactgcccaaggtaatttatagattcaatgccatccccatcaagctaccaatgactttcttcacagaattggaaaaaactactttaacgttcatatggacccaaaaaagagcctgcattgtcaagtcaatactaagccaaaagaacaaagctggaggcatcatgctacctgacttcaaactatactacaaggctacagtaaccaaaac

SEQ ID NO: 648377 - DNA, 336 bp, Homo sapiens
taaagaagaaaaagaaatatgtgggttgtaataagctgctgtattgtgggagggcctcagaatggacagaggactcatggtgatacagctgatgtagcaaatggatttggggatgtaaaggtcgaaatggaattatttggtccttttaattaccgcttaacactttgaacaggatcctttgtcaaaatccctaccaactgcacagaatggtttttgactctccttttttggaaaggatcatttttaagagattactcttagactctggcaaaaggattgttagtatattagtccatttgtgagtgggaaaaaaatatctaaaaccactgttaattg

SEQ ID NO: 648378 - DNA, 898 bp, Homo sapiens
cttggaacatagactgtttcgctggggacaaatgcccctgtgggtccccccgagcactatttgtgtgccttcctaatgcggccccccggggtcgcccatattacggtgtgtttcggccagccacttcgttggaacgggcgtcgcctgccttgctgttctcttggccgtcctccgccctgaatgagccggggagctaactcaatctttactgcgctctcatcaggcggggcaaccgacacttcgtttgggcccttttatgccttgcattgcggaccgagtgttcgccgcctccggatttgtactcgacccgagggctgtcctccccgccgtggaccgttacgtgtctggctcccaccctctgttccttgggggctgttatgatcccagacaagtgggcccccccccgggggtgtgtctccaaaaggtgatctttcccatccctgggtcacctctcccaggtcgccgtggcagggtcagacggaccccgcctccttctcaagcgtgggcgtggccgaaggcccacccacataccggtctgccccccctagagtgtcccgcctcaagttaccgccgcccccaggacgtttatgtctgccgcggacaaccgcgcgtgcgcgtgtggttgcctccccaggaggtacgagtgtctcgtctctcaccagtgatgggcggccacccctgttgcaggacattggggcgccctctacatgtacatgtatcatgccgtgttctatcaatcacccctacgccctcccccccgggggaggattgagccctccgagtctctcccgggtggaggggtctgtttcttctccgccacccccagcgctccgccccattgtcgcgctgccctcccagacccccccaaaaaaattccccttctccacccccccataac

SEQ ID NO: 648379 - DNA, 257 bp, Homo sapiens
attgtgaggtaatgatctttcttacttctaatacaccatgcccggctcttttgtgtgtgtaaattttatttataagagatggagtcttgctctgtcgcccaggctggagtgcaatggtgcgatctcggctcactgcaacctcctcctcctgggttcaaacagctctcctgcctcagcctccggagtggctgggattacaggcgcccaccaccacgcccagcttatttttgtatttttaacagagacggagtttcact

SEQ ID NO: 648380 - DNA, 448 bp, Homo sapiens
cgctcccgctgagaggagacagacagagcgactccaccctctagctcgacggcagagcgccccgggcgacaggcccgagacgacaggccggcgcgtgccgggccccacacttcgaccaccgccagcgctctcaggccccggcgcttcccgcgtctgccggcaccgggcccttcgcttcggccgcagaggcaaccatgagcgccgccaggatgggccccgtccgcgtcgccttcgtgggcctcctcgccctcttggagacgggcgggcgtcggccacaactgtgaagggccgcgccggtgcccggacgagccggcgccgcgctgtccggcgggcgtgagcctcgtgctggacagctgcggctgctgtcgcgtgtgcgccaagcagctgggcgagctgtgcaccgagcgcgaaccctgcgaaccgcacgggcctcttctgtgacttggct

SEQ ID NO: 648381 - DNA, 203 bp, Homo sapiens
ccataatggaaacttcctgtcattcaagggccatgtatcccatcaatatggaatcagtaccttaacagaaaaaggcagctcttcaatggaattaaacgtgatataaaatgtttcgataataggcaagtacttattataaacacacggatacagctggaaatatgctcccgtgcatcacgttaactgacgggtaccgagactcg

SEQ ID NO: 648382 - DNA, 1263 bp, Homo sapiens
tttttaactgaaggaaccagttgtaacagtctcaattttaagctaaaacttgacagaactcaaaacaacaatgcagacacctttcagccatggttgtggccaagactggttaacaactgtcactgcaagcaaccaaatgcactgtgatgtggcaccaactcaattagcaagccatgcacatttttcacgccacagcagtgcaaaacacaaggcacacacatctcacgcatggccttgaaagtttaaacgagcagaaactccatgactaccaaattctcatgcacgtggcatcccaatagcagcacctcaatcaggttcaagagaaccgtccagacaggggccctgtgcataccacgcgactagtgacagcacagacatataacagtcgcctgcacgcattgtagcattaagccatctgggcaatttctatcccaacaacgatggctccacaagcgcatatcggctaaactcacccttgcaccagccccttacaatcttccttaaacgcacactcactactttataccttgggacttcgacgctgatcgatattccaagaggacagaagccccccaacggcacctctccggtaaagtgtccttcatcacaagggggcccccgaacagcattcttctatcctatacaccgcctatacatctatccagcttccacaacaataatacacaccagaccaccgaccaacaacgatctgcaaatacaacacacaccctagggaaccaaccacacaaccaacaaggaggagcacccacacaaccaccccatacacagcgcagcacgcaggaccacgacagaaccacataatacgcgggcggcaaacaacaccacagcacgttatggtgcactgcggacgcacaccaacaccaacccgtggtaacctacgcgcacacaccgagacacaaaccctaccgcgccgcgcaagacaaaccaatactatatcagcccacagccgacataaccacctacatgcccgatcagctgcacggcacgataccacctagcagcgagcacacaccaactctcaccaccaacaaggcggatcgctgacaacaacaccacaagagacaaggctgaccaacaccagcccaccacgcagagcggccccccccgcgactacagaatactacgatagccaagcatccaacagcagcgccacagcggtgagccaccaacacgcgggacagcgacccactatgcacacacaaccgaggggcgcactcacacagaccgcgccagacgatggtg

SEQ ID NO: 648383 - DNA, 136 bp, Homo sapiens
gaatgcatcaacgcgcatgtgactgcagtcacatgcggcgttggatgcagtcacatgcggcgttggatgcagtcacatgcggcgttggatgcagtcacatgcggcgttggatgcagtcagcggcgttggatgcagt

SEQ ID NO: 648384 - DNA, 155 bp, Homo sapiens
agctcatctgcaaactccaaatggtagcctcctgaatacacggcttcctgcacccacggcctgcgaacacagaacattggcagaacttcctccctcctagagcctctggcaaattcaatctgcagcgcatcacttcgaggcggtgctctctcctc

SEQ ID NO: 648385 - DNA, 588 bp, Homo sapiens
gcacgattgattttttgaagggtttttcatgtctctatctccttcagttctgcactgatcttgttatttcttgccttctgctagcttttgaatgtgtttgctcttgtttctctagttcttttaattgtgatgttagggtgtcaattttagatctttcctgctttctcctgtgggcatttagtgctataaatttccctctacacactgctttaaatatgtcccagagattctggtatgttgtgtctttgttctcattggtttcaaagagcatctttatttctgccttcatttcgttatgtacccagtagtcattcaggagtgggttgttcagtttccatgtagttgagtggttttgagtgagtttcttaatcctgagttctagtttgattgcactgtagtctgagagactgttggttcttatttctgttcttttacatttgccgaggagtgctttacttccaactatgtgcgacgtggtgctgagaagaaagtatattctgttgatttggggtggagagttctgtagatgtctattaggtctgcttggtgcacacctaataagtttggaataagtgcgacgtggtgctc

SEQ ID NO: 648386 - DNA, 1148 bp, Homo sapiens
ggtgtgaggacagcctgccatagtctggtctctggagcactatggtgacacacgacctcctcccagctctgctttcttgtcctcctggtattgggatttgaggtccatgggtgatccaatcagtcgctagcaatgatgagtatgctctatgacccgatcctttcctcaaccaggtgtaacggaattctcttctaccagttacgtgggagtcatgccaaacgtagcagcctgaccagaaaactgtacgagaacgacgatactctgctccgctgtcagaatgtagaacatcatctagggaacttgttctgcatacacgtcgacagcagccatgagcacttgctacaggcatttataatctgtaccaggtggtacttttccttgtgcttgaagggcagaggatgtaatcaggccagtaacccccactcaattctagtggaatcaatggggaagtagatccaccatatatctctctggatcaccgcagtgttcaggattgtatgcctccttggctttcccaggtaaggcatccattggccagttccgtcacattccactaattctccttacgtccgttgacaaattcctgtttgcagtgaaataaggacacccagaagccagaattgacacagacacgaagcgatggcctaagtgtccaacggtcaaaggtgcgcctactacgaaagcaccggcttattcggggcggactaactcgggctttttccagtgcccgtccgggcccattatacaggccactggaggttatgagttcgccgttaaccagtggttcgccaacaactcccagttggatgtaactcctctaaggaagacacactatgtggggcgccccttatccgataagaagcggggccttgcgggtcactatatatgcccagtccctaaatgatccctaacattaaaccttagggacccgtctgtttccccattaagtgcgcatgctcatgtgtctgtagtgaccaacaaatttctatcgccgcaccacgtgtgtgacagcggccttctgtttacgtggactgcccccctttgctgagcgtgtgcgaccctttttaattaccacacgctcgaggggaagtcggcccacgagagacataccgtatgtctacttactatatactaaattatattcccgc

SEQ ID NO: 648387 - DNA, 190 bp, Homo sapiens
ttgatgcgttctcctgtgtgttttctgtcttgcttcttccaggtcccatgcatgcccagctgcatgttgtccagtacacatgaaaccaaactggctgggatggaagcagattattctgccatttttccaggtctttgatttgcacgtcaaatctgaggctgatcaccccacacttgtttagcctgcctgt

SEQ ID NO: 648388 - DNA, 211 bp, Homo sapiens
catgtttccctatgggttgacctacaaatatggcattgcgccagtaaacgatgcgagttgcctcgcgaagatgattaaatataccgcactttaagaaaattgccaaatccgatatcagagtgggtttgttgcgaaaagttgatttttttctgtcaggcggagaatgggaatatgtttcctttgtacccgtcaggataccactcagtttaga

SEQ ID NO: 648389 - DNA, 493 bp, Homo sapiens
gaggcggcacgctgactgtcgtggggccaggacaggctcagcaccagcgatcagcgccatgggcttgtcccgaggagtcagggaggacacagagcccactctgcagggctcggaggacggggggccagccaggccagaaaggtcaggcacagatgccagtcagcagcgccgagagtctccgctcaatgcacagtttgcacttggtgacgttctcgatgtcgggctggtccgagagcaggtgctgcagcccctccaggagcagcagggccttgtggtagcgtgagacgcacccctcacggggctggaccatctcgtccagggcagccgactgcaccatctgcacagcgtggctgaagatgagcctctcggcagtgatgctgtgaatgcggtccaggagccgttgcttgtccaggaagaagcgctgcacgcgcatgctcaggccctggcaggccaccaggctgaccttgtacagctcattcagcctggggtccga

SEQ ID NO: 648390 - DNA, 637 bp, Homo sapiens
agcgggacggcttgggagagcaagccgcggagagaacttgaagccaccatggcagatgaagattgggaagcagaaatcaaccactcatatgtcttcctatgtacccatatttcgagaaggataggtattcatggagaaaatggagacaattctaactaggactcgagcttcatcgatcagtaaatggatgatggaccttctcgaagagatcatttgatgaaaagtggatttgccatctggtgtggaatttatggagacagagatgctggtgagtgtaataagcgagtataatacatccacaatgggtggtttcaggagtaggaaagagtatggaaacagaggtatatcatagagcagaaggtttgaagatggtgatagctctggttgcttggagagagtctagtaatgactgcgaaagataatcgcaaaagaggaatcagagggttggccaaagagagagcggctcatcgagatggaacatacattggcagaagcttctatggggctatacatgaagaggtggaagaggtagttaccgaagtttgcgtggaggataaggtctaggaacgtccaagataatgacttatagccttgacgacatgtgtgcagcgcacttggtgggcttgaggttctagaa

SEQ ID NO: 648391 - DNA, 534 bp, Homo sapiens
attacatagctagaatataatagaaatgggggtacgcattcccgacagaagcagtgtgttattagttttagaactctgaacagagatctgcgagatctttcaataaagaccatctaattcttcattggctgagaacgacgtttaataatagtcttaaataaggcttagtttgcattgtttgagttcaaggggccttattattgaatggaattgcacaagcctttctttgtgcaatctaaccattgttattggtagttctgtaaagggaaactgtggcaatcgatattggcatgtgtgagttcatagcttttttctggtgagtgtggcttccgagaaatgttgcaattcaaaatgcactaagtctgtgatttattggagatttggagattctaaataatatttttaaaaaacttccatgcaacttctggtttaatgtttggcaactccacatgataaaaaaataaaaacagcccaaccgagtctcggaattaagtattcttctagtaagtgattcaaacttgtaatatttgccac

SEQ ID NO: 648392 - DNA, 517 bp, Homo sapiens
cgcaaaagggcggggtggggggttttcccccccaatttttccctttgggcgcatccaaggaaaaaaacaacccccgataaccctggggatctgcccgggtccggggtcccccaagcttcccccggggcgccgtcccccaagaaggtgagaagctcctaagaaaaggggcgggcccatttgttccttttttgaagcgtgagcaccaaaaactgtgcggcccgggttttttgggccccgtttttatatattaagtcatggcaagtcgcccaccataatttttcccaaggtagattggttgggaaagcacacttccctttgtgtaaaggacttgggtgctgcagttctttttatggccaaagtgtctcctctccctagaaaaaaaaaaaaaaggccaggcccagtggctcacccttgtacttcaggcgctttgggagcctgacccaggcacttgagcctaggagttcgagacaagcctgggcaaaatggcaaacccccatctctcccaaaggtgccgggt

SEQ ID NO: 648393 - DNA, 816 bp, Homo sapiens
cagcatggcggttggcagtaacaagcgccttacgatgagtgcggtaatagggagccgagatagtaaatgtggtagatccattttctatgagagattggtatgatgtgaaagcaccgtgctatgcttcattataagaaactattgggaaagactgctcgtcagcagggacccaaggtagccaacaattgacatgctgatgcgtctcaaggcgttcgtgtgcttctcgagagtgagttcttgcctgattttcgcagaatgatgaaagtggcatttaggaaatattcagagctgattactcgaaggatgttcatgtgctacaaagactgacctgtagctaatcgttccatgggctatggcagtcttaacccgtgaacaaacatgtgttgccatgggtcaacaaaactgtgcagaacaaatgattgaacgctcacggttgattttctagaactacacgatggtgtacttgtcttcgatcgtgtgtctgtggtcggattttaactaataaaatggcagacacatcaggatacaggacagactctcttattgcctcagtgaccaagcaaggtaccgcccaaagtcgcggaacgaacgaatgatgcgaaatcatgatgccgagaggtgcagactgaatgcacttgcaacgaagtggtccatgaaattgagttaccagtacagcaattggaacaagacatacgaaagaggcttgtcagatctatttatcctctccatgatgtcttcgtcgagaacaagtactacttgctgcaagaagcgccaagtttgaactcggagagacgctcaatggagcttcatggtgaa

SEQ ID NO: 648394 - DNA, 663 bp, Homo sapiens
  misc_feature (594)..(594): n is a, c, g, or t
gttacactagagtaagagtattatagacccaaggacttcttgtgaggtcaagttcagatattgatatgaatatgagaataccaagggtcccataggtagttcagtagtaacgtggcaaagtctaaacagaaatgaacaaaactaatgctagcaggtaaaaatcaatcaaaatgttgaaaaattgattctgtcctcagcatgttatttcctcaggctctgataattgagtggtgcgtgggtatacagagaatttgatgttgaacgttataaagtcaaagaactgcttgtttagatgaggtttatttttatttctgatattattcattcttgtcacacatcaagaagaaaacactagagtgctgctggaattccaaatctgaagaattctaacgactgcattcttggttattaaaaagggcacaatccttcctttttatttggcagtttaatttcagtaggaagcatgtcacatgtgcactgtaggttagaattatgcatctgtcatgcctgactgctgaaccctacctaagcctttgggcgcagtataaaacctatactggtggactgtgaacctcaaaacaaatgggtattgtngggtttcgaggatagatgttactccttaaagttggtattgggggcatggaaaactactgaaagacgaaa

SEQ ID NO: 648395 - DNA, 228 bp, Homo sapiens
cacacccgtgccagcagactgatctgtctgggcctgaattaattcaatccaggaatagactcccagcttatccaaggtgcctcctgtgtgcccagaccacgtccggtgatcattggcaaccttgcagccacatgccggcagggcaggtgggaggaccaggctgaccttgtcaaccacacccccttgtgtatgcttgtccacaagctgctggcgccagtgatcagcggt

SEQ ID NO: 648396 - DNA, 422 bp, Homo sapiens
  misc_feature (157)..(157): n is a, c, g, or t
  misc_feature (176)..(176): n is a, c, g, or t
  misc_feature (326)..(326): n is a, c, g, or t
tgggtgcctttccatgtgcatgatgtggaaaggtctgatgcatctttcataaaatgaatatcaaatgggattgaggatctttggttcgagtgttgctttgcaagaaacattgtcagctgctgctttcttccttcagatatgaacatttcagcctggnctctacagtaccatgaaanctaaattacttacttctctccagcttaatcctaggtggaggaattctagctgtggtttgtgaatgtacacaggtcagagaggtttagcaccttttgggaggaggaggtcagaatgcggtggtgaaacctctcccactgtgaccaacaaancctcatacttaaaaagaagcatgcacctctggcttaaggatctggatgctactggaatttttgtctgtttcaattgtattcattagctttgaagag

SEQ ID NO: 648397 - DNA, 293 bp, Homo sapiens
  misc_feature (98)..(98): n is a, c, g, or t
  misc_feature (124)..(124): n is a, c, g, or t
  misc_feature (127)..(127): n is a, c, g, or t
  misc_feature (136)..(136): n is a, c, g, or t
  misc_feature (192)..(192): n is a, c, g, or t
  misc_feature (197)..(197): n is a, c, g, or t
  misc_feature (221)..(221): n is a, c, g, or t
  misc_feature (281)..(281): n is a, c, g, or t
  misc_feature (290)..(290): n is a, c, g, or t
gaagatccgcgaccaggacaggaacacgaggcggatgaggcgtcttgcaacacggccccggctgggtaaccagcccatcagcacacggctcccacggnattctcagaagattgggccgcctctnctncatcttctngcaaggacagaggcgaggggacagcccagcgccatcctgaggatcgggtgggagtngagtnggggcttccaggtggcccttcccngcacacattccatttgttgagccccagtcctgccccccaccccaccctccctaacccctncccagtctnttg

SEQ ID NO: 648398 - DNA, 223 bp, Homo sapiens
gagctcgaattcgtcgagccctcggcatagtggctgtgggagccctgatggccctgagccaggggtgacccctccccagatccccagagctgattccccacacctccttatttggccagtctgcctcaaagggtgtcaggaccatgggctccatgttccgtttttttttggcggccctggtccagctctttctgcccacagcggctgcctacacctgcgtgag

SEQ ID NO: 648399 - DNA, 253 bp, Homo sapiens
  misc_feature (46)..(46): n is a, c, g, or t
  misc_feature (83)..(83): n is a, c, g, or t
aggagggagttaatccaaaccacacaatgaagtcttcaaaccaccncccgaacagggctgctgattgttcctttcacttttgnggtgaccttgagctcccttaaaaaaaaaacttggagaatcacaactggcaatgcaccgcagttctcgaactacacaagcatagtctgactaagtcacatgtgtttccatatcaacttgtttgacagggcgacctactgcaaagcaggctcagttaccccaccagtcaacc

SEQ ID NO: 648400 - DNA, 177 bp, Homo sapiens
  misc_feature (161)..(161): n is a, c, g, or t
cggctccctcccccgcgtccctgcgaccgccgcggcgaagatggcctcaggagtgcaagtagctgatgaagtatgtcgcatttttgtatgacatgaaagttcggtaaatgctccagcaccagaagaagatcaagacaaagaaagaagtgctgtcatttttntgtatcaagtgcagag

SEQ ID NO: 648401 - DNA, 269 bp, Homo sapiens
gttagaggtacactctcagcacttgggatgccgaggcgggtggctcacaaggtcaggagatcgagaccatcctggctaacacggtgaaaccccgtctctactaaaaatacaaaaaaattagctgggcgtagtggcgggtgcctatagtcccagctactcgggaggctgaggcaggagaattccttgaatccacggacgggggaggtggccgggcaccgagatggtgccacggcactccagcctacgcaacagagtgagaccggtctcac

SEQ ID NO: 648402 - DNA, 195 bp, Homo sapiens
  misc_feature (18)..(18): n is a, c, g, or t
  misc_feature (65)..(65): n is a, c, g, or t
  misc_feature (68)..(68): n is a, c, g, or t
acgggggcgcaggacagnagtgcgcgaggaggggggggggaggggggaggcgggggagggaaggnggnggagagggcagaggacgaagagggccggggagaggcggagaggagccagccggcgccaaggggccggagcggagggggggcggggagcatcggcggcgcctctcagagagggagagcgcactctcgg

SEQ ID NO: 648403 - DNA, 686 bp, Homo sapiens
taaactctaagtggttagccagtaaagaccaaagataagagctagaataactacagaaatgactaaaaagagcattatacataagtatagactcagacacataatcattgaataacgtaacccactatgtaagtaaatgtagtaaataaaaataacatacaacaagtatacagtctaacaaagtatgccgtaaaatagtatctagatgataaaaattgaggtataattcatcctaaattccaaacttgtaaagtgcagaaaatataatagaggaaaaaaatacataaacctaagagagtataagcttcatatataactactactttttataaggccaatatatatatatagtaaaggatctatctatatataaatatatagtaatcaataagcatattaaaactgaagtgggtgcatactattctctgttcatgagaacagagaaattagtgtcctgaatatttgaaagtgtagcttatatcatgagctattcccccatgtagtagatatctagaggctagttttaaaaacgagaggcattggggtgcatctctctgacaatctgtataggatccaagtaaagcccttttgatgtcctcaggggctggtggtcaaaaagatttcgagtggacgagttgtatttctggcaactaggctctctcaggttattttgtgccttcatggtc

SEQ ID NO: 648404 - DNA, 480 bp, Homo sapiens
  misc_feature (29)..(29): n is a, c, g, or t
  misc_feature (41)..(41): n is a, c, g, or t
  misc_feature (74)..(74): n is a, c, g, or t
aaaaaacttcctctgcctaattccccaantcctgtgaactnttaggccaaagttaacttcctctgtgcctacantttccctcctaataaaattaaggacagtaagcaccctgccctcaggggggtcctccttaaaataagttaaatagatgccaacatgtttaagaacattgcccatgggctcggcgctgtggctcatgccctgtaatctcccacaatttgtgaaggccaaggcgggtggatcacctgaggtcccggagttcgagacccatccctgacccaacatggcgaaaccccgtctctactgaaaatacaaaaattagcccaagtgtggtggcatgcacctgtaatcccagctactcaggaggctgagacaggagaattgcttgaacctgggaggtggaggttgcagtgagccaaggtcacaccattgcactccagcttgggtaacaagagtgaaactccatctctagaaaaaaaa

SEQ ID NO: 648405 - DNA, 825 bp, Homo sapiens
acggccggggtaagtgtacattgtacccaatatgtggttttttataccttgcccccctcttaccctccccacttgagtctctagtgtccaattatgtcactctgtataccttttgtacccataagttagctctcacttataagtgagaacacacagtattgggttttccattcctgagttgcttcacttagaataatatcctccagctccatccaaaatgctgcaaaaaaaaaaaaaaaccacaaacttcaatttgggtgcttttttatgggcgtaagtcatatcccaatgggtggtacgagataccaaatttaattaatccactcactgggtcggatgcggtgggtcccacatcttggcattggtgactggtccgtggccatcacggttgtcttcggggtataaggactctttcctgtggggtagatacccaggagcgggcatcggctcaaatcaatggggttctcaacatttttctctggggatctcattcctggaaatttaaaggcaccagtatagggtgcgtcggtcggtaaactcaaaatgcatcggatggtattggctcatccactttttacacttaatgcttaaattccggtatagtgcgggttagaaaattcttgtaggcacgaatttctctttgtgggactcaattacaatggagtgggtaatttaagtttaatcttggatgacggagaaacgtggttccttaaatgggactaagtgggtaaaaagggcagctttcggttctagataaaattaggaataagaggatctatgtaagaaatcttcattaaaatattacggggtgataatttaggtatg

SEQ ID NO: 648406 - DNA, 315 bp, Homo sapiens
ggtgtaacagtgaaaacaaattccctactttgagaccagtgccaaggagcgccatcaacgtgagcaggcgtgcagacgattgcacggaatgcacttaaggcaggaaacggaggtggagctgtacaacgaatttcctgaacctatcaaactggacaagaatgaccgggccaaggcctcggcagaaagctgcagttgctgagggggcggtgagagttgagcacagagtccttcacaaaccaagaacacacgtaggccttcaacacaattcccctctcctcttccaagacaaaacatacattggatcatctcactatc

SEQ ID NO: 648407 - DNA, 650 bp, Homo sapiens
caacgatggtctcagctactgggggctgaggcaagaggattgcttgagcctgggaacttgaggctgcagtgagccgaggtcacacctctgtactccagcctgggtgacaaagtgaaaccctttaaaaaaaaagttttttgttttttttttagacagagtctcgctctgtagcccaggctggactgcagtggtgcaatctcgactcactgcaagctctgcctccgggattcatgccattctcctgcctcagcctcccgagcagctgggactataggcgcccgccaccatgcctggctaatgtttggtatttttagtagagacggggtttcaccatgttggtaaggctggtctccaactcctgaccttgggtgatcctcccgcctcggtctcccaaagcgctgggattacaggcatgagccagcgcctaccaccgctatgggtactttcacacggatgctaaagttatggtgctggccgtgttaagggtcaggcatcaaaatggccgctcaagagaatgaagctttctctttgtgcagatgcaacgggtgggatggggtgcacaattatcacagtgctggttgtggtgtacctcgacttctgccttaagctgaggaccatcgtggggtacgagctcgaatcgtatctgctag

SEQ ID NO: 648408 - DNA, 150 bp, Homo sapiens
gggagctccaggtctcgtcctcactactctgtgtcttcctgcttttaggggcgcactcttgttggccctgtgaccctgcccccctggaagcctagaaattggactgttgacatttagggatgtggccatagaattctctctgaggagttg

SEQ ID NO: 648409 - DNA, 165 bp, Homo sapiens
cactaaggatggctctcgagcatggaagtccaaagctaggcagaccaagggagtacccaatccaatgcaaacagcccagtgccttccagtccaaagctaccaagaactttccgtcagcccaccgtcaggacggctctatgtccgacacctttcggaggtcctcgc

SEQ ID NO: 648410 - DNA, 303 bp, Homo sapiens
acaatccatatggtcttagggaaccagggaggccttgaagagagcaacaagagatgggggaatgcccacttgctcaagcagtcagaatacacacaacattgataatttaagttagccatcttatatgagcatagttcatagcatcccaaaacaattacaatagtaacatcaaagatcactgaccacagaacaccgtaatagactgaaaagtttaaaatattgagagaattaataaaatgtgacacaaagtgagcaccacagacttgctcacccagggttgccacaaaccatcaatttgttaaa

SEQ ID NO: 648411 - DNA, 265 bp, Homo sapiens
  misc_feature (7)..(7): n is a, c, g, or t
tgtgtantgacgcatcaggcgggtcatgctagccgagggcatgtatcccatgcctgattgaagtacttgaaggctcaggagcttgcgcggctggagatctgcgggaggccgcatagtccgccatcttgaggagagtgtctttgttgggtccaattttgagttgcactccaccacggcatccactgcaggcgagctgtccccaaccaccaacagagcaggcactgcagggtttactgtgtgggttcccggcattggtcgctcaatc

SEQ ID NO: 648412 - DNA, 107 bp, Homo sapiens
ctcatttagctccatttatataatcatgataaaatgtaaatttcaggaaactcatttagctccatttatataatcatgataaagatatataaaatactcaatttcta

SEQ ID NO: 648413 - DNA, 1060 bp, Homo sapiens
  misc_feature (468)..(468): n is a, c, g, or t
  misc_feature (523)..(523): n is a, c, g, or t
  misc_feature (525)..(525): n is a, c, g, or t
  misc_feature (536)..(537): n is a, c, g, or t
  misc_feature (553)..(553): n is a, c, g, or t
  misc_feature (590)..(590): n is a, c, g, or t
gacatccaacaagtactctctgtatccagaaacactaacttatctaagagcagagaattcacaggaaccctataatcgtcagttaggttttgcatcaaaacagatgcagcaagaaaagccgcatctcaatgccgttgtgactttatgaaggtggacaatcctggttgagcagagatattgcagatgtctcccctgtcatggaggataacctgccttcccagcttgtcttacagatgctgaagaagctcccaaaatatagttgggattttagtaacaaatatcctatgagttgctgaattgaattcagtaatctcagaaaacccagcctggccctccaaactcaagcctctccactgggtctcacaccttgacagtatgctccatcacaccgccatttctacaccccacgcctgggcctggctgaaacttcaaggctccccttggaaggcagcccatctttgaggtcanaagaaaacatgtcattctgaaagttggccactcaccttcgaaatatcccatcccnanggtttttttgnngttgtttgttttgttnaaaggcaacaaaacggctagtctgtgacccataccanagctgttaaaacagaaggattaactctagacttggccccaagtgctggcaaatgtttttgagaacggagttggggatgtttgagaacactgagaactcacgcttgtaacgtgaagatgtggcgaacctggagtgagttcagagaagtgacaaagatgatgaaagggctaaagaatggtttctgagggaaggctaaagggattctttttgcctttatcccaagaaatgagaaaataatgattattaacttcaaagccagtttgctcttcatgtctgcaacaaacccaatgaatggaaataggctcgaattaaaagcaggagagaattgggtgaggtaaaaggaagactttcttgtgcttcagaggaagaaatatggcaatctgaggtcatggagtacagatgtgtatacagattttaatagagggatagaccacacattttttataattaaacttgacttctcatttttta

SEQ ID NO: 648414 - DNA, 457 bp, Homo sapiens
agcggagtggttgccaggcatcaggccaatggagagggaagaaggtggttggcactggaaggacaatgggaggcatccttgtgcagaggaaagggtctgtatgttgagtgcgccgaggtactacagctgtccaagatgccaccggtgggggaaataggttgacctgagtattctgccaacagactgacctagcaggtcagtccccaggccgggctctacccctgggaatggcacccctcctccagaggaagcatttcccaaatgccccaggataggagttggcgcggaaggagagccaagccggcgatgaagacattctccgctggacacaggaacgccaagagccaacgctaagaagcggcctccacactggacggcggcctccattagccagctgctgctggtaaaacaaagagaaggccgtgggcaggcggcgctgagtgcagataaccgtccg

SEQ ID NO: 648415 - DNA, 371 bp, Homo sapiens
tgatgtagaagacagcagtcactccagagatgtatcttatcttagtcaggcccttcgtcttcatgggccacatgtatctgcgtgagcttaggcccattgaggactaaggatcgtgaccctttctttaccccctacccgttgtggctctcaccctgtctcggacaggtttacagtgtcctggttcacacccaggacttatctttgcaagctgaacctgttagaagcccaagtcttaactactggtctcgtaaggttccactgagacgagatgtctgagaacaaccaaagaaggcctgctctttgctgcttttcaaaaatgacacttaaatgtgcagattccccaagcacccgatgacctataacagcagccg

SEQ ID NO: 648416 - DNA, 168 bp, Homo sapiens
agcatctcatagatagtatagcatatgtataaagcctcaatggcagctctccattcttgatgtcaaaacgtagcatacctgagaggtaagcagtgtaagcctgagcctctaatttggtcttggcatccacgcgatcgctctcacacaagcgttccaattcctctgcat

SEQ ID NO: 648417 - DNA, 796 bp, Homo sapiens
  misc_feature (27)..(27): n is a, c, g, or t
  misc_feature (184)..(185): n is a, c, g, or t
  misc_feature (337)..(337): n is a, c, g, or t
  misc_feature (643)..(643): n is a, c, g, or t
  misc_feature (651)..(651): n is a, c, g, or t
  misc_feature (654)..(654): n is a, c, g, or t
  misc_feature (660)..(660): n is a, c, g, or t
ggacatggtggtgcgagcggcggcggnggcggaggctgccatggacgacgaggaggagacgtacctggctctggaaaatccgcaagaccatcatgcagctgtgccacgacctgtggctatctggtgacccaggacgagcttgaccatgaccctgtgaggagttcaaagcccaatttggggacanngccgatgtgaggggcgtgccgcggcgcacggacctcaccgtgctggtggcccacaacgatgaccccaccgaccagatgtttgtgttctttccagaggagcccaatggtgggcatcaatgaccatcaatggtgtactgccatgcgcatgcagngaggagaacatcacacgggctctcatcgtggtgcagcagggcatgacaccctccgccaagcagtccctgggtcgacatggcccccaaagtacatcctggagcagtttctgcagacaggagctgctcatcaacatcacggagcacgagctagtccctgagcacgtcgtcatgaccaaggaggaggtgacagagctgctggcccgatataagctccgagagaaccagctgccaggatccaggcgggggaccctgtggcgcgctactttgggataaagcgtgggcaggtggggaagatcatccggccantgagaggntgnaggacntcaactaccggtgtgcagtattaccgcctgaaagccctagaagcggacacagggaacccaactggcggaaagcccttctcaaatcggccccagtttacgggggggctctgaccagaggggccaccgcccgccggga

SEQ ID NO: 648418 - DNA, 259 bp, Homo sapiens
accgcagtgtgaacatgtctccctcatcccactgtatctgctgattcagattagatcatcaacgtttcatcggcatctcatcaatctgagtggaatagtactgctcgatagtctctgaggatgcggatgtagtcatactttacaaaggttagtgtacacacccttccggccgtatcgaccatgttctcccaagttctgtgatatgtacaattcttcgtgttattaaaggagcatcgatagtttaatgcatcgagggaca

SEQ ID NO: 648419 - DNA, 333 bp, Homo sapiens
tgtcactgtgtaaccaggaggaaagttagtctgaagatatcagagcagaaagatggaaggaacttgacatcatggttgagccatttaataagcaagcctggagccactccacctccagatgtccagttaggtaaggttgtaacatgtctttgttgtttaaattagaagagtgagggccttctgttacttgcagacaagagcatcctaaccaaacaacatggtacacagagtccatcgtggcctgccttgtggcacactctccagtctcatctctcagtattgctttctccagtcccaaacttcagacccactgcattgcaacacggtctctca

SEQ ID NO: 648420 - DNA, 394 bp, Homo sapiens
actacatacttccgcacaagaacctgcatgtgtatatatataggtgaagatgactgatatggtttggctttggccccacccaaatctcatgttgaattcccacatgttgggggagggacccagtgggaggtaactgaatcatggcggcaggtctttcccatggcgttctcatgatagtgaataaatctcacgtgaataagtctcatgagactgatggctttataaggcagagtttccctgcccaatctctctctttgcctgctgccatccatgtaagacatgactttctcctccttgccttctgccacgattgtgaggcctccctagtcatatggaaatgtaagtccattaaacctctttcttttgtaaattgccccggaagtagggtaccgag

SEQ ID NO: 648421 - DNA, 721 bp, Homo sapiens
ccatgattatgtcactgtactctggcctggtgtgacagagcaaggccctctgtcttaaaaaaaaaaaaaaagaaaaaaatggagtttcaggtgggagtgtggattgatgttggcacccgttttgagactgaaaagaataatggggcaggctacttttgggagcatctggcttttcaatgggaacagagaatcggcctggcggttgccctgtgagaaggaggtggagtagcatgtggggcccatcttaatgcctacatgcacccggtgagctacacgagcttactacatcaaggcgctgtccaaggatctgccgaaaggctgggggagctcctgggtgacacttgtgcagaactgtagtctgggaagactcacatgattgacgaaggaacgtgatgtgatcctgcggtgagatgcaggagaatgatcgcatctatgcgagatgtggtctttaacgtacctgcgattgccgacagcgattccagggtgcacaccttcttagcgccaggcatgtggacggggcccagtctgagacatgtcgggacagcgtgtctcgttgcagtactttgagccgagatacctctaggaacactttacaagtgccgctcgaatggtgctggcatgtagctggacggagtggatgctaccatgcaaagttgttagacctcgcccagaagcacctcgggtggcatcccatggacatatgcctaggacgctgtgccca

SEQ ID NO: 648422 - DNA, 251 bp, Homo sapiens
gctctagactatagaggatcccgacgaaacaacttgaatccattactggaatcatttggaacctttacattatgccgtggcctaatgctgctacgctatactttctccggagaacaccttagctagcgcagggtagctcaacacttgcccggtaattaacgacgctgaactggccaatgactaaaccatatgatgcgagaggagcgacactgaccatcggcattggacctatagcgggaaggagagccgct

SEQ ID NO: 648423 - DNA, 550 bp, Homo sapiens
  misc_feature (172)..(172): n is a, c, g, or t
  misc_feature (179)..(179): n is a, c, g, or t
  misc_feature (183)..(183): n is a, c, g, or t
  misc_feature (187)..(187): n is a, c, g, or t
  misc_feature (189)..(189): n is a, c, g, or t
  misc_feature (218)..(218): n is a, c, g, or t
  misc_feature (241)..(241): n is a, c, g, or t
  misc_feature (283)..(283): n is a, c, g, or t
  misc_feature (428)..(428): n is a, c, g, or t
  misc_feature (460)..(460): n is a, c, g, or t
  misc_feature (529)..(529): n is a, c, g, or t
  misc_feature (540)..(540): n is a, c, g, or t
tatcaggtcactgattgcctaactagacattgtgggacgaaaagatcagtaaaactgaatttaactacaacttgtagagactgtgcctatactgtttagtgactgttgacttagttttgtatacatgttaaataatttgcataattgactgtatttgggtaatgtttactgnttttttnaggntttngnttttttttccagaacattaataatatggntgtaaattccgattttctgtatntcttatttactatttcagactttggctgagcaaaacactaanaatcctaaaagcactactggtagaaggttccaaatctaaagaggtaaaaaatagatcacagaccctaacccttctttttcatctccatagcacaagttcatctatcttataacttgtgcctgccttaacaatgttagagactaanagtttagagcaagggataggaatgagatggtntggttttaacttatctctaatcctaccatttttactttttgaccttgagctagtctcaccttggggttncttgaggcggnggggcgggct

SEQ ID NO: 648424 - DNA, 2367 bp, Homo sapiens
ggcgtgtcacattgccatctggggtcctttggggtttccaggttgtcaccatgctgtcccatttgggaatcccatacctgcctgtccccactgcgctggctgacccttgctgcctgctgcctcttgggagggctttgtccctgcctctgagctggtgggcaggatggctgggtggcccccagagaagcacagacctgagatggggtctccatgcccggtttgctgttggaatgatctgaacaggaccccaaatgcctcttccctctggtcatgcctcactatctctaggagctccatcctgtggcttccagagtgtgcacttccagcccacccgggcagtgctgagagggaggaggagaacaaggatggccagcctcccctccctcccctagaccacggggcaggcagctcgggttcctggagggctgtttcccccacgctgtccctacatctgctctgatctaaaatgtctttccttttatgctgcgcccagtcttggggctcaaagatttgcccaaacctcattggccctcgtgactaggctcatctagatggtgctcacgctggtgtttgaggcatttccactgtgatctccacgaggggatgttttccgggacacatctctggctctgggaactgcctgactcactgaagaaactacttttcaggcactgtagggtcacccatatgcctccagctcagttgacgcttaaaaacaggtgcagaaaagctcgcgatggaaggtcttaatgagagtgtctgtctatgccaatcatgtaaaatgacgtttcttgaaaaagattcagtggttcagctttgtcagcatcatctcaacacaagcctgctggctctttttagcatctcatccaaccatgtcatcgtccagatgagaaatcttagcccaggtgaggggagtaacttgcttgaggtcacacagctggctgttggcaaagctgggattagaaccctcaacccagggtcccttcctctgcagcgcctacatggttggttgaataagtggctgcgtttcctggggccctgggttttggggaagccagttagctgctgctttggcactggcatggaggtgagcagtcaaggatgctggtgaggctgcagtttctgctctttttcatcaggggggatagtctctaggatttttcagtgaggacccttgggctttggatgcagcttgaaccaagaaaacgaggagggaaagggattcagtgaactattcctcagtgggatcggttcttcagctcctgatgggggctgtgtaatgggggcagaggccagggaaaaagatgctgttcacccaccctcagcttcccttttcctaaattaagaggaaaagtggtcaaagaaaaactcttcatttctccctgattcttaaacgaaggtggttaatagaaactcaggctcccgtgacaaggcaggacaagagcctgtttcgctttcctccctgaccctgccaggtgccaactcaaacactacctttctcattggtttctaagtcagtagagacagatctgttttaagcagttgggggttcgagtagatctcatgggtacaggaggccagcagggaccaggccagtcagccatgctcaggacccctcggctcctcccccagcctctagctaccctgtatcgaggcaaggggaggccagtaaagtttgccaagcctgatcctgcagcctggtggggctggctggggtattcttttaccaaactctgttttaccgccagccccttgtacaccccaatcccatgtctccctcccttcagctggaccgtgtgcccctttgggaggaagaagacaagccccactagggccaagggcagcagagccctgccgagtgagaggctgtggggcagcggctctgtcctgtgccttaccagccctggggagggggacatttggctggaagactggaatttaattgccatcgtctttgattttgtgacatttctgcttggaagtgtgaactaccccccccccccgcttcctgctccttagcatgcgtgcagctctctcctgttttgggtgttccccttggacactccagctcggggactgctggcgtgtgagtgtgcagattcccctgtgtggtcgaacctaagaactgtggcttggaagtgatgctccatgtgacgacgactttgctttctttcctcttagtgaggaggtgattcgtagatcccaactgcctatgtaatgtaaataatgtacatttaatttattgctatggtagcacattgtatttgttaatgtacaaaacaaattctaaaaggttgacaaatgtatattttgttgcttaaatgtgtctttgcagaaattgacaataaataacatattttgtgtcca

SEQ ID NO: 648425 - DNA, 177 bp, Homo sapiens
ctaaccagtgaaatgactggcgtgaagaggcgggcataacacagcaagacgagaagagcctatggaggctgtaatgtctattaatggcaaacgagtagctaacaaacccagcaggtcctagagtaccaaacctgcattaaaaatttcggtgggggcgacctcggagcagaacccaac

SEQ ID NO: 648426 - DNA, 1381 bp, Homo sapiens
  misc_feature (1374)..(1374): n is a, c, g, or t
  misc_feature (1378)..(1378): n is a, c, g, or t
  misc_feature (1380)..(1380): n is a, c, g, or t
ggcgtgtcacattgccatctggggtcctttggggtttccaggttgtcaccatgctgtcccatttgggaatcccatacctgcctgtccccactgcgctggctgacccttgctgcctgctgcctcttgggagggctttgtccctgcctctgagctggtgggcaggatggctgggtggcccccagagaagcacagacctgagatggggtctccatgcccggtttgctgttggaatgatctgaacaggaccccaaatgcctcttccctctggtcatgcctcactatctctaggagctccatcctgtggcttccagagtgtgcacttccagcccacccgggcagtgctgagagggaggaggagaacaaggatggccagcctcccctccctcccctagaccacggggcaggcagctcgggttcctggagggctgtttcccccacgctgtccctacatctgctctgatctaaaatgtctttccttttatgctgcgcccagtcttggggctcaaagatttgcccaaacctcattggccctcgtgactaggctcatctagatggtgctcacgctggtgtttgaggcatttccactgtgatctccacgaggggatgttttccgggacacatctctggctctgggaactgcctgactcactgaagaaactacttttcaggcactgtagggtcacccatatgcctccagctcagttgacgcttaaaaacaggtgcagaaaagctcgcgatggaaggtcttaatgagagtgtctgtctatgccaatcatgtaaaatgacgtttcttgaaaaagattcagtggttcagctttgtcagcatcatctcaacacaagcctgctggctctttttagcatctcatccaaccatgtcatcgtccagatgagaaatcttagcccaggtgaggggagtaacttgcttgaggtcacacagctggctgttggcaaagctgggattagaaccctcaacccagggtcccttcctctgcagcgcctacatggttggttgaataagtggctgcgtttcctggggccctgggttttggggaagccagttagctgctgctttggcactggcatggaggtgagcagtcaaggatgctggtgaggctgcagtttctgctctttttcatcaggggggatagtctctaggatttttcagtgaggacccttgggctttggatgcagcttgaaccaagaaaacgaggagggaaagggattcagtgaactattcctcagtgggatcggttcttcagctcctgatgggggctgtgtaatgggggcagaggccagggaaaaagatgctgttcacccaccctcatccgcttatccaatgggggatcctggagattcccaatacaggcaagcttncctnang

SEQ ID NO: 648427 - DNA, 2634 bp, Homo sapiens
ggcgtgtcacattgccatctggggtcctttggggtttccaggttgtcaccatgctgtcccatttgggaatcccatacctgcctgtccccactgcgctggctgacccttgctgcctgctgcctcttgggagggctttgtccctgcctctgagctggtgggcaggatggctgggtggcccccagagaagcacagacctgagatggggtctccatgcccggtttgctgttggaatgatctgaacaggaccccaaatgcctcttccctctggtcatgcctcactatctctaggagctccatcctgtggcttccagagtgtgcacttccagcccacccgggcagtgctgagagggaggaggagaacaaggatggccagcctcccctccctcccctagaccacggggcaggcagctcgggttcctggagggctgtttcccccacgctgtccctacatctgctctgatctaaaatgtctttccttttatgctgcgcccagtcttggggctcaaagatttgcccaaacctcattggccctcgtgactaggctcatctagatggtgctcacgctggtgtttgaggcatttccactgtgatctccacgaggggatgttttccgggacacatctctggctctgggaactgcctgactcactgaagaaactacttttcaggcactgtagggtcacccatatgcctccagctcagttgacgcttaaaaacaggtgcagaaaagctcgcgatggaaggtcttaatgagagtgtctgtctatgccaatcatgtaaaatgacgtttcttgaaaaagattcagtggttcagctttgtcagcatcatctcaacacaagcctgctggctctttttagcatctcatccaaccatgtcatcgtccagatgagaaatcttagcccaggtgaggggagtaacttgcttgaggtcacacagctggctgttggcaaagctgggattagaaccctcaacccagggtcccttcctctgcagcgcctacatggttggttgaataagtggctgcgtttcctggggccctgggttttggggaagccagttagctgctgctttggcactggcatggaggtgagcagtcaaggatgctggtgaggctgcagtttctgctctttttcatcaggggggatagtctctaggatttttcagtgaggacccttgggctttggatgcagcttgaaccaagaaaacgaggagggaaagggattcagtgaactattcctcagtgggatcggttcttcagctcctgatgggggctgtgtaatgggggcagaggccagggaaaaagatgctgttcacccaccctcagcttcccttttcctaaattaagaggaaaagtggtcaaagaaaaactcttcatttctccctgattcttaaacgaaggtggttaatagaaactcaggctcccgtgacaaggcaggacaagagcctgtttcgctttcctccctgaccctgccaggtgccaactcaaacactacctttctcattggtttctaagtcagtagagacagatctgttttaagcagttgggggttcgagtagatctcatgggtacaggaggccagcagggaccaggccagtcagccatgctcaggacccctcggctcctcccccagcctctagctaccctgtatcgaggcaaggggaggccagtaaagtttgccaagcctgatcctgcagcctggtggggctggctggggtattcttttaccaaactctgttttaccgccagccccttgtacaccccaatcccatgtctccctcccttcagctggaccgtgtgcccctttgggaggaagaagacaagccccactagggccaagggcagcagagccctgccgagtgagaggctgtggggcagcggctctgtcctgtgccttaccagccctggggagggggacatttggctggaagactggaatttaattgccatcgtctttgattttgtgacatttctgcttggaagtgtgaactaccccccccccccgcttcctgctccttagcatgcgtgcagctctctcctgttttgggtgttccccttggacactccagctcggggactgctggcgtgtgagtgtgcagattcccctgtgtggtcgaacctaagaactgtggcttggaagtgatgctccatgtgacgacgactttgctttctttcctcttagtgaggaggtgattcgtagatcccaactgcctatgtaatgtaaataatgtacatttaatttattgctatggtagcacattgtatttgttaatgtacaaaacaaattctaaaaggttgacaaatgtatattttgttgcttaaatgtgtctttgcagaaattgacaataaataacatattttgtgtccaaaaaaaaaaaaaaaaaaaaaaaaaaaaaaagaaaaaaaaaaaaaaaaaaaaaaaaaaaaaaaaaaaaaaaaaaaaaaaaaaaaaaaagcaccccaccgggggaggtggtcccgaaaaggacgggtaacacaacccaggggggggggcgacgtgaaacagatatggttctccacagaggggggagtcaacacgacggtggacaactcacgcgaacatacgacagctcgcgtgggagaaaggtgatgccgcggatcccacgaggggagg

SEQ ID NO: 648428 - DNA, 208 bp, Homo sapiens
gagagcggccgtggatagaaaggaatatcaaattcacattccatggcctcctaggattgacccaccagttaccatgaggcagggggaagagaaacctgatgccacatacagtgatgttgccgcctgaaaggaccagattgagaaccggcgagaggaagttgaaaccccattactcaatccagagagttttgtgaacctgggcatggag

SEQ ID NO: 648429 - DNA, 1177 bp, Homo sapiens
tagggctagaccagatcattgttataccctcaaacattaagtcagttaagaactagattggttctgcagctcctgatgggggctgtgtaatgggggcagaggccagggaaaaagatgctgttcacccaccctcagcttcccttttcctaaattaagaggaaaagtggtcaaagaaaaactcttcatttctccctgattcttaaacgaaggtggttaatagaaactcaggctcccgtgacaaggcaggacaagagcctgtttcgctttcctccctgaccctgccaggtgccaactcaaacactacctttctcattggtttctaagtcagtagagacagatctgttttaagcagttgggggttcgagtagatctcatgggtacaggaggccagcagggaccaggccagtcagccatgctcaggacccctcggctcctcccccagcctctagctaccctgtatcgaggcaaggggaggccagtaaagtttgccaagcctgatcctgcagcctggtggggctggctggggtattcttttaccaaactctgttttaccgccagccccttgtacaccccaatcccatgtctccctcccttcagctggaccgtgtgcccctttgggaggaagaagacaagccccactagggccaagggcagcagagccctgccgagtgagaggctgtggggcagcggctctgtcctgtgccttaccagccctggggagggggacatttggctggaagactggaatttaattgccatcgtctttgattttgtgacatttctgcttggaagtgtgaactaccccccccccccgcttcctgctccttagcatgcgtgcagctctctcctgttttgggtgttccccttggacactccagctcggggactgctggcgtgtgagtgtgcagattcccctgtgtggtcgaacctaagaactgtggcttggaagtgatgctccatgtgacgacgactttgctttctttcctcttagtgaggaggtgattcgtagatcccaactgcctatgtaatgtaaataatgtacatttaatttattgctatggtagcacattgtatttgttaatgtacaaaacaaattctaaaaggttgacaaatgtatattttgttgcttaaatgtgtctttgcagaaattgacaataaataacatattttgtgtcca

SEQ ID NO: 648430 - DNA, 226 bp, Homo sapiens
agaaaggcactgtgaaaatccctgtcctgttttgttcttaattgaaagggcatgcagcccccagtcacacacctgctgcttgctcaatcgatcacgaccctctcatgcgcacccccttagagatgtgagcccttaaaagggacaggaattgctcacttgaggagcttcgctcttgagacaggagtcttgctgatgcccccagccgaataaaccccttccttcttta

SEQ ID NO: 648431 - DNA, 706 bp, Homo sapiens
  misc_feature (5)..(5): n is a, c, g, or t
  misc_feature (37)..(37): n is a, c, g, or t
  misc_feature (92)..(92): n is a, c, g, or t
  misc_feature (97)..(97): n is a, c, g, or t
  misc_feature (108)..(108): n is a, c, g, or t
  misc_feature (137)..(137): n is a, c, g, or t
  misc_feature (236)..(236): n is a, c, g, or t
  misc_feature (243)..(243): n is a, c, g, or t
  misc_feature (278)..(278): n is a, c, g, or t
  misc_feature (283)..(283): n is a, c, g, or t
  misc_feature (287)..(287): n is a, c, g, or t
  misc_feature (301)..(301): n is a, c, g, or t
  misc_feature (305)..(305): n is a, c, g, or t
  misc_feature (309)..(309): n is a, c, g, or t
  misc_feature (313)..(313): n is a, c, g, or t
  misc_feature (316)..(316): n is a, c, g, or t
  misc_feature (320)..(320): n is a, c, g, or t
  misc_feature (325)..(325): n is a, c, g, or t
  misc_feature (337)..(337): n is a, c, g, or t
  misc_feature (367)..(367): n is a, c, g, or t
  misc_feature (404)..(404): n is a, c, g, or t
  misc_feature (413)..(413): n is a, c, g, or t
  misc_feature (421)..(422): n is a, c, g, or t
  misc_feature (427)..(427): n is a, c, g, or t
  misc_feature (429)..(429): n is a, c, g, or t
  misc_feature (432)..(432): n is a, c, g, or t
  misc_feature (436)..(436): n is a, c, g, or t
  misc_feature (458)..(458): n is a, c, g, or t
  misc_feature (502)..(502): n is a, c, g, or t
  misc_feature (514)..(514): n is a, c, g, or t
  misc_feature (522)..(522): n is a, c, g, or t
  misc_feature (536)..(536): n is a, c, g, or t
  misc_feature (684)..(684): n is a, c, g, or t
tggcncctgtaagtcattttactttgaatatataggnaacaaaatccacaaacaggaagctatgttctatggttatgtcttttaaacaatgntctgnatttacaaatngtttttttccctaagtaaaagcaccagcngaaaagttataggctgctaaaaccgttacaaatattacaaacccattaaaagacattatgccaaacgtacttattaaaaaccttaacaaaacgaagagncaactgncaacgcaaccaaccaattgggccaccatgctgggntgggnggcngtcccaatttcctngccngggnttcnganaaanggggntgggggtgcttntcccagggggagggtcctcgcccaccgggngggactacagggacagagctggggagaggcagctgtntttcaaggnaacatggnngcctnanttnctgntgttggtggcctcctggtcagnccccctcaacccacagggcaagggggggggctttcaggggggtntggccagctttnggttgttnatttgttaatagantgtttttctgcgaccttgtcctcatccactgaagggtttggagtttttgttttttcctagacacttagctacaggacactgtgtgatgtgtcctcagggacttgctgtctgccttccattgttttttttttttttttttttttgaganaaagtctcaccgtcacccaggc

SEQ ID NO: 648432 - DNA, 193 bp, Homo sapiens
taatcagtcggtcctgcttctgggcgtatggcaaacctcatctctacaaaaaaatacaaaaagtagctgggcgtggtggcgggcgcctgtggttccagctactctggaggctgagacaggagaatcacttgaacccaggagggagaggttgcagtgagctgagatcacaccaccgcatacgcccaggtatgca

SEQ ID NO: 648433 - DNA, 886 bp, Homo sapiens
  misc_feature (23)..(23): n is a, c, g, or t
  misc_feature (886)..(886): n is a, c, g, or t
tttctagaaaaaacgaccgtccntaggcctggccaattgggcccatctgaacaacagggagagcggggggtggacgacgtcaattggtcgacgtgacgacggcggcggacacgaccagcaaggcggaatgcgaaccgaggtgtcacaagttgaccatcgacatctgtggacgggtgaggtcggtactggtcccggtccgggttctgtttcctcaaccctgtcgtctcgaggatgggggatggtagctccgggaggtccggtgacagttgcccctcaccctctttgacgacctccgcgaccggtggaaccaggcgaagctccttttgtgagggtatcccctccggtgcctcttccggatcgtggacgtcagaagaccaccacaaagggacgacgacattgaacgacgtatcccattgaacattcatcagaacccgatccgggggcgggtggccgatgtctagaaccacgtgatccccggatccaagaaccatcacatgacgaggagacagcgcatgttgctggacgcccatgtcaacgtcctggacccgttgatcggggagttgttgaccgtcttggccacgagcctgaacgaactccagttttgacacctccacacacggacattgatgatgaatcagtccctcaacagagagagaaaacctatcatgacgaagttcgttcccaaaccacggctccaggacgtcagagccgtcctcgtcctcaatcgggtgtagttgaagccggactccaacagtgggttggggcagtggacgagggaggcggcggtgttggagaaatgacagccgacgtgtctgtgtctcgggatcatccgtgacaggaagaacttgaagtatagtcacttgaggagcgggcatccggattagtn

SEQ ID NO: 648434 - DNA, 171 bp, Homo sapiens
  misc_feature (148)..(148): n is a, c, g, or t
gcggggatctagagatccagtctggaaagggactgtcaggatgtagctgcactgtcactacagcagctctgtggagatcagcccactgcagaagtgcagtctcacgatggtgggtggcagcagtggtgacagggctgtcgctcgagtngcctccttctgcatttggctgtg

SEQ ID NO: 648435 - DNA, 1280 bp, Homo sapiens
ccacgcgtccgaacaacaattaagtgttccatatttataaattttaaattctgattacttgaggtaaatatttctaacgagaaattttctaaaatgtattatatattttaaatttatattcagtagaaatactacaaacattaattactgtcgtataattatatttccaagcacgactagaattttaaaaccataaagaacaccagctgttgtgtttttaattcctgtttgctctgtgtgtgtgtgtgtgtgtgtgtgtgtgtgtgtgtgtacattatgacatggttgcagagagtgtgtagtgacgtcaacaccagatataggcggccctcctatatatattatagaaaaaatcctccaagaatgtcgcggggactaacagcggcgacgagccacgccgcgccgcgcacacaaataccctaacgagacgaacactaatccacctcaccaagcgtcatcacacatatagcacaaccatcatgcacccaagcagccgcaccacgactgcaccagacgtgagaacacgcgaagcaaaccgtgacacaaaaccagagcacacgtagccacaacacacaacaatactaaccaaaacactccagccggcgcaaccaatacaaaccactctgagacgcatgaaccacacataaaacgactgtacaaacaaacaaaaactggcagcagaaaacgcaacctcgcacccccaaaaaaaatacgacacgacaattggacgaacacttctacatcacaaaacacaccccacacacaaaaaggagaataacaaccggtggcaccaatcacgaaagcgagacacaaaccaaccagccaggacgccgagggaccaatcccagaatagcaacaaacacccttacgcagcaaagacacacaggggagaacaagaacgcaacccgcacagctatcaccacacaacccgaaactacaaggagacgaccaacaacactcaacaacaccaacaacgaaaaccaaaaacacaaaaacacacaagaccaacacaaaaaacacaacaaacaaagacacaacaaaacaccacacgccagcaacacgtacgtcacgcgacacgcacacagccacgccctgaatacaaacacggccacgacactgcaaccagcgcagaagagagcgcaagcacccacaaccaacacacgcacaggacagacgacccagtggcacaaataaacaaccaaagaaacatcagtgacataaggagcgactgcatgcaaacaaacacccgaatccaataacgggccacaagccacgagcac

SEQ ID NO: 648436 - DNA, 142 bp, Homo sapiens
acaggacctatcagggtggcgtgtccttcagcgaggtctcttctgcgaccaggctgaaatcctatttgagcaacactacacagttccgagatcagggtctttggtgcccggagttctggagaacttggaggtgaaatccggg

SEQ ID NO: 648437 - DNA, 554 bp, Homo sapiens
gagtgttggaaaaatgttttaatattttggtttgggtgattttaatatttgcttttatgcatttttgaagagaattttttaggaagacataaagcaacataatggaacaacttattgactaattgtttttaacaattacttttgttgataatctgtgacattgccaaaatgaaaacagataccattcgtgcagcatatataatattaatatgcaagttaaaatgttaggacattttaactacatcatgtatcaagttccagatgcatatatttaattgactattagacctttttacttggaagttcgaaacacatttaaaatttaggatgtcccaaaaataaactttgttttctttttctttgctttcttgctttttttcttgcttactttctttttttttttggacaggatttcactttgtgccaaaggctagaaagaggtgaggggtgtaattacaggttaatggattcttaaacatttcagggctaaagaattctttcaacttaaggcttttggtgtggcgggaccacaagaattttgtggcgaatttttg

SEQ ID NO: 648438 - DNA, 450 bp, Homo sapiens
  misc_feature (1)..(1): n is a, c, g, or t
  misc_feature (14)..(14): n is a, c, g, or t
  misc_feature (56)..(56): n is a, c, g, or t
  misc_feature (98)..(98): n is a, c, g, or t
nacattcgacttcnaacagccccagggaagaaccaaagccccccaaaaattcctcnaagtttttggattaattgtgggttcactgattccagtccaanttggagcttcagagaagaggctccctcctgtgtcatagaatccttgctttgggtctccctgcagagttcaataggtttagtaaggctaatcgattgtttcaagagatgcttatcaaaagcatatggtgtcactgaaggagtattctaaaccaggacacagccacttcatgccagtctagagatgctgggggtaaatgctttgtgagtcctggcaggaatcttcttgcaagtcaagggccgagctggagggggcactcaggagtcacacagcataggttctagccccggatcaggtgcaccggaggcttgggaggaggtttcctctcagagtctaggtcttcctttatcagga

SEQ ID NO: 648439 - DNA, 211 bp, Homo sapiens
tttaacaactaatccaccccctttcccaggcccgtcgataagcactaatctacttactgtctctctgaatggaactgttctgggtagtactcatgttagtggaatcatttactatagtgtactatattcgctgtctaggcttattatcatcatagcatgctttatgcgggttcatcccatattgtatcatgtcatcatgaattttagtttc

SEQ ID NO: 648440 - DNA, 415 bp, Homo sapiens
  misc_feature (49)..(49): n is a, c, g, or t
  misc_feature (61)..(61): n is a, c, g, or t
  misc_feature (82)..(82): n is a, c, g, or t
  misc_feature (84)..(84): n is a, c, g, or t
  misc_feature (141)..(141): n is a, c, g, or t
  misc_feature (341)..(341): n is a, c, g, or t
  misc_feature (389)..(389): n is a, c, g, or t
tgaagcttgaagagtgccctgcagtgccaggcctggagagcgccaggangcaccaagtgtngctgcaggagctgccaggcanangcacatcgagatgctggccaacgccaccaccctggcctatctgaaacgtgtgctccntgggccctgactcctgtgccacaggactcctgtggttcggccgtggacctgctgttggcctctggggctgtcatggcccacgcgttttgcaaagtttgtgactcaccattcaaggccccgagtcttggactgtgaagcatctgccatggggaagtgctgtttgttatcctttctctgtggcagtgaagaaggaagaaatnagagtctagactcaagggacaattggatggcaagaatgctgcttgatngtggaacttgctttgaccttagggac

SEQ ID NO: 648441 - DNA, 117 bp, Homo sapiens
gtacgccagcgagtattgtaactctctaaatgaagtttactttgatcctttaattcactgaagtgtacataatccatgtggtgcttcccttatacaggcaaacacctacaggtattg

SEQ ID NO: 648442 - DNA, 608 bp, Homo sapiens
tcctttcgccgggcgcgatggagccggggcgccggtggggccgcgtgcgctagtagcgctgctgtgcgtgggctgcgcgcttggcgcctgggagcgcccagtaaagagcgcctaacatggtttcgccggcagacttcccctactggggagcgatgctgatggccgctcgaaggtcggcctacgcggcacgctgcgtggacccatgtacgagcgtgcgaagtcaacatggggccggagaagcgttggggccaacctggggagatcagcctaacggggttgcaccggtttggccttgcgcagacagggaaggcgcccttttctttggccccaagctccggggaaactccttgtgggcaacatgagtctcagaaccacgaggaacagcgccctcattggaagagtagccccaccagggaatggccaccccgggctcgggccgagtgccccttctgcaagcctaattccacggaaggttagacacccttacttccgggggcgagactgtttggccaccccgagcgcgaagttggcctacaaaggcgggttagcaacggcataggggcccctgtggctcaggaactttccgggcaaaagtcccaaagacacag

SEQ ID NO: 648443 - DNA, 625 bp, Homo sapiens
tgatgtagaatatatggacatctgcttatgggccatctatatattctgttttcttgccattttatgattattttaattgaagcgctttgacacatttatgtattggggatttgagacctctttgggtatatgctttgcaaacatttactgttagttacaaactggacgttggatattctttacaagaactttatatcacaatcttgaagtaatccaaattatcaatttttccttggattgacagtattcttatggcaagtctaaaaactctttgactaatcctacagctgaagattttctccagttttatttttctaacattttcacattttacgtgttaatctataatctattttaaggaacttttggcataaggtaaaaaattaaggttgaagtttatttctatggatgtccaacagctctcgtatcatttgttgaaaagtctatcattcctccactgcaatgcttttgtgcttttgtcaaaaattagtcgtgcatatttgcgtaggtctatttctgggttgcctattctgttccatcaatatgtctatccctccactgataccacacagtcttgattactataactatataagagtaaaaattggggagactgattgctccc

SEQ ID NO: 648444 - DNA, 403 bp, Homo sapiens
aagtatttctagacttcttaggatctaggcaggatggctcatgcctgtaatctcagcactttgggagactgaggcaggaggatcactcgtggtcagttcagggctacagtgaattatgactgcaccactgcgctccagcctgcgtgacagagtgagtccctgtctctaaataaataaataaataacagagttttgctcattgcccaggctggagtgcaatggtgccatcccggctcactgcaacctccacctgccaggttcaagccattctcctgcctcagcctcacaagtagctgggattataagcacctgctgctacaaccagctaattttttgtattttttagagacggcgttttaccatgttggccaggctggtctcctcctgacctcaggtgtccgcg

SEQ ID NO: 648445 - DNA, 163 bp, Homo sapiens
gataaatgagactgggtaactggattggcggatggacacgatgatggatagatagatggataggtggatggactgatagatggataggatggaagggtggctagatcaattgatgggtggatggatgcatggacagatggatgagtgcacggatggatggtag

SEQ ID NO: 648446 - DNA, 446 bp, Homo sapiens
aacgagggtccgatggacatcatagctacaatcagactatctaagcaatagggaatagtagatatacatataaccataagaaaccctatcatacacctacctagaggggcagtgaatatctaaatattataagtaagcaagagtacactactaaagccaactagactaagagaatagcagaatgaaccggggaggacggcgctagataggcacagccttagaacagtaaccagaacacacccccataaagtagtacacctaccaggaaggcgccccatccccaatacctaccgtatactagggctcataatataggtaaagctactaagactacctagagccaactaaaatagtaactaggctatacctaaggctggggcttgacactaagtacaagaagccaaggagtatcagatactagatagcagagaagtaagtctacatat

SEQ ID NO: 648447 - DNA, 125 bp, Homo sapiens
aagtgtgtatactacttaaacgacttaccccaggctaatactactccgctgctaaagtttctaagaggtgggggtagagcctctgtgcccccaccccgccccccggttacggttcacctaaaccc

SEQ ID NO: 648448 - DNA, 416 bp, Homo sapiens
ccatttggcgaggcagtgagggtctttggggagtgtgcccccttattgggattggttgtggctaccaaggaaatcagatgatcataatgcaaaacttcctccatcccatttctatatgatcttttttttttttttttggagggggagcctgcctctgtgccccagccggggggccagggccagaatctaagctaactgcagccttggtccccaaaataaaagctattattccccggcccaagcctccaaaaaagcggggacaacaggcgggcccaaaatgccgggtaaattttggtattttaagaaaaaacgccccccccaaaggggccccgggcccaaatccgaaacaagggccaaggctgttcccgggggaaaattgtattccgctcccccggaagaagggggtaaaaaacccc

SEQ ID NO: 648449 - DNA, 202 bp, Homo sapiens
ggaacttacggaatgaggtctagaatcagaaggcacttgtagtcagttctagaccagagaacagcagatcacagatcttgatcaggccctggaggtggcacttctagagttgtgtgtctggactagtgagtgtacaggtcatgaggtcagaatctagagactagagcatcgctgtctgagactgtattatagtagcaggtcc

SEQ ID NO: 648450 - DNA, 443 bp, Homo sapiens
ggcagtgcacctgtatcttgtggtcgactctagcaggacccccacaccacctgtagtcactgtgcatgctacaagtgctgcagcctgtctgggtcgccgctctgggtgtcgtgtcacttttaacgtatttggggtgggatgagggcagatgagagcagctccacagacgaggcagactgccccaatttctccatcgaggctgggggacagctgctgcccccactgtagacagcggactgtccttcaataaaatacaggttgtctgcatcgcccagcggcggcgcagtatagaatatcatgacaaagcacacgagatcccactgctcttcagcagggagcagtgccagagtgcgagtttataagacgaaggatcaggaatcctagtattaggaagaatttcctctggacgctctgattttgagaacaccagttaaatggattta

SEQ ID NO: 648451 - DNA, 181 bp, Homo sapiens
gatcccacgagtcatgacagccctactgacgatgccaaatatatgataaagggaacttttgctgaggataaactcatgagagatataattaagatgctttataggaaactattatataaaaaaagccatttcccacccaaggacacagtggatgtgttttccctgactccagcagggcaag

SEQ ID NO: 648452 - DNA, 157 bp, Homo sapiens
gcggtcctctcgcgctcctgcggctggctggtctctgtaggtcgcaagtgcctctcctctgtatcctcccagcatctgtctgtccggaattgggcccgtcctctctgtggaggatcccgagagtaaccaggtaccgcagctcaagttcgtcttcatg

SEQ ID NO: 648453 - DNA, 145 bp, Homo sapiens
gacggctagagatatgtcgcccgtgctcagtaaaaagatcctctcaggctgcagagacagcgttctccgatatatcgtgcatctcgataacaaagaatgggcctgccctgaggaggattatcatgatagtcctaagtctgcccgg

SEQ ID NO: 648454 - DNA, 170 bp, Homo sapiens
tacacgcacttgtgtaacgaactagtatggaagcccaagctgctgagcaagtgggaagaagaaaagaaaacatagtccaaacagatcacacaagggaaccccggacaaatgctgactttggccttatctaggtaacccctattttttgtcataggtgactctaataatag

SEQ ID NO: 648455 - DNA, 446 bp, Homo sapiens
  misc_feature (355)..(355): n is a, c, g, or t
  misc_feature (440)..(440): n is a, c, g, or t
ggggcagccagcagccacctccccagtgcaagtaccctgtaatctctggaggggaggggctcggctgagcaggaaaagcaggggggccaagtgcccagggctatagcggggagtcagcagctttcctctcgtggtggggggcttaactgggacatagtcacatgtagggcagtgatggacccagaacccctcctccctactctcctgtgctccagggtctcggcggcgggggaaggggtccgggggtatgaagtaaatgaagaaaagcacaaccaaaggggattaggaaatgatccagttctaccactctcccgtagaagcttaagattcaaagctaccgagaagagagggagtnccggctgaaagatggcccagtcggaggaggctggaacaaaaaaggaccaggagagagacacagtcttgtctccagagaattggtncctagg

SEQ ID NO: 648456 - DNA, 437 bp, Homo sapiens
  misc_feature (64)..(64): n is a, c, g, or t
aaataaaacctccaataacctcctaaaccttcctaatggaaattgaaacagtaatttaaaatcnccccagaaagaaaatcctagactgtttttactgttacattcctaccaaacatttagggaagaaataattttcacctaatcttacacaaactctttcagatagctatgcacccatgatgcatgcctgtagtcccagtaactcaggaggctgatgcagaaggatctcttgagcccaggagttcaaggctgcagtgagccatgattgtgccactgcactccagccaaggcaacagagcaaaaccctgtctcttaaaaagtaaaaaaagactgggtacggtggctcaaacctgtaatcccagcactttgggaggccgaggcgggcagatcacgaggtcaggagatcgagaccagcccagccaacatggtgaaaccct

SEQ ID NO: 648457 - DNA, 413 bp, Homo sapiens
catgctggtttcagcttttggaaagagtaaaacgaaaccaggatgcaaataaaatgcacaaaaatttgcatttcaaatgtttttctctggtaattttgagatgatatcattcaaaacacacgtaagcaggttcagttgagttctccacatgcaaaaaatgattttaaatagcttgtaaagttaaattgtgcttcgagtagtgaaacacccagcccgtgctgtcagtgtgtgttattataaggatgatcaacattaatatctccctctgctgctgcaggactgactgtgctgttgctgttgttttggtttaaatgtgttttgtttttgttcgtggcaaaaggaaaccctttgtgattcccaaacggcgaagtgagaaaataatcaataaacaattattcatttatattaaccca

SEQ ID NO: 648458 - DNA, 303 bp, Homo sapiens
actagcaggatcctagaccactgtcgccggctccatcaaatcaagcaagactccaggttcctgaagtgctgctgcagcaggggttctcaaagctgtcacttctgtatgtgaagcgaagcttctcaacgatagccttcatcttggcccaacttggttctggagtttgccattgattttcttcaggtaaaggggcatccttcctttttattcattcaggcaacagggtaaaaaaagacccagctggaaagcctgggaggagtccacctgaattttctggtcatccaacttcttcttccctgtggc

SEQ ID NO: 648459 - DNA, 154 bp, Homo sapiens
cgatgctgaattggataaagaactcctgcagtgattttggcaggaagacaaaaagagagtgcttggagctcgtctgactaccagtcacgatcttgtaaggccagatgtcgtcctagaaactgcatggaggcacaatatcatggatttagccatg

SEQ ID NO: 648460 - DNA, 835 bp, Homo sapiens
  misc_feature (162)..(162): n is a, c, g, or t
  misc_feature (170)..(170): n is a, c, g, or t
  misc_feature (174)..(174): n is a, c, g, or t
  misc_feature (192)..(192): n is a, c, g, or t
  misc_feature (210)..(210): n is a, c, g, or t
  misc_feature (261)..(261): n is a, c, g, or t
  misc_feature (271)..(271): n is a, c, g, or t
  misc_feature (287)..(287): n is a, c, g, or t
  misc_feature (293)..(293): n is a, c, g, or t
  misc_feature (310)..(310): n is a, c, g, or t
  misc_feature (327)..(327): n is a, c, g, or t
  misc_feature (388)..(388): n is a, c, g, or t
  misc_feature (392)..(392): n is a, c, g, or t
  misc_feature (404)..(405): n is a, c, g, or t
  misc_feature (412)..(413): n is a, c, g, or t
  misc_feature (426)..(426): n is a, c, g, or t
  misc_feature (428)..(428): n is a, c, g, or t
  misc_feature (432)..(433): n is a, c, g, or t
  misc_feature (440)..(441): n is a, c, g, or t
  misc_feature (448)..(448): n is a, c, g, or t
  misc_feature (459)..(459): n is a, c, g, or t
  misc_feature (461)..(461): n is a, c, g, or t
  misc_feature (466)..(466): n is a, c, g, or t
  misc_feature (472)..(472): n is a, c, g, or t
  misc_feature (474)..(474): n is a, c, g, or t
  misc_feature (485)..(485): n is a, c, g, or t
  misc_feature (524)..(524): n is a, c, g, or t
agcggtctcaggtttcctttcaaatctgctgggaggccattaatctaggaatcagcttgcaacagagcacaaaaaacaccaaaaaaatttcaaacaagaaaaaaaaaaaaaaaagggaaaagaaaaaaatggaactggtaagctttaatgattactttaganttggtttnattntccctcctgcagtgaatnaatgggatatatatcagntgacactgatagatggatatttctgatcgtaattttggtgtaataagcatnggaaatgacntttatacacaccactngtgttngtcagagataacatatnaggggtggttttaaaangcaaaaagaaaaaaacaaaaaccaaactattaaaatcctcctataaatattcttttccttnacangttttccaagcnntgcaaanncagtttattggtnancttnnctggaannaattttnaaccaattaantnggtgnactacntngctggttaccnagcttccttattcctaatacctgggaacaattttttttncaagggatagatttggatgtaaaaaagaccgaaatttatcaaggtatctatagttgaagggactggggaaatacctatcaaaattaactttcttaggaaaaactttcaaccgtatttttaagtactcgggatacgacctgaaacggtttccagtgtttatttctggcgagttgtagacttaagggcttattggtaacagaagcattgctccatttgatgtggcatcctctagtcttgacaggtgggggtgggaattaaacccattagagaagcacgccagtttgtgtttcaccttagacaagcgttaatgg

SEQ ID NO: 648461 - DNA, 1062 bp, Homo sapiens
  misc_feature (669)..(669): n is a, c, g, or t
gtgttgttcacgcaccctgtggggggtttgtccgcacgagagggagcgcttttcttttcttgtgcagcgtcacgaggatgtctccggatggtgagagaggcacgtggtcctcgttggtctttgcgacccttctcccgacgtgcgcatcactcacactggctgtaatgaggacacgcaccacttcttggtagtgaccccctggttgcgcacacacatgacttcgccttctcgcaaaataggagagcagctgatactcttttttctcttccctctctcaataactcatcacctcactgtagtgtagtattttgtgtagacgcccccccccccccaccctcttcttgcacacaagaggcgcccccccacgccccacccacgcgtttgagggggacgacaacagataggtggtgtcggccggatactctcccaccccccccactggtgttcagcgcgccgcaggtgaaaagcccctccgcttttttcttcagcgcggctcgtttgagaagagttcccccacacggctcttttcttcgagagtgtccccccgctttaatacctgttgaggacacccactcttttcttctggcgagaattttggcgcctgtggtgaataaatgttatacacacacgcggcggagagcgtcgttttctcgtggagaacgccgcaancttttgcacttgtagatgtgtgcactagactagggtgtttgtaaacgcgcgttttctcgtatgaggcactcctctctgtaatattaatttccccaggggggaagaactcttatcgaaggagacctgggttgtaatcctcgccacgagttgaagtggggctcaacaacgactaagggtgaagatgtcacagaaaagccgcttgtgattttttaacacagcccaaaaaagagagattgtaaagggtggctttctgcccaggcttgcaactgccgtttccttcgggggtgttcattttcgggaaaagtggtggcggggggtccaataggtttcctgtcccccggtgctccttccgtaaaaaaatgaaatattttatgcccttattaataataaata

SEQ ID NO: 648462 - DNA, 440 bp, Homo sapiens
attttgaaggccggaaccccccgggggtttcaaaaatgtagaacgcagggtgggcccacgctcaacaggtgtgccgtccttccccctggtggggccccctttttagtatacaaagggggccttacccccatctcgcatggatggcagcattgttttgaaggggtttgcaaaaaaaaaagattttctttacataaagtgaatcaaatttgccctttttttagatcccaaagaaatcaggggtgattagttttccaggcatgaatgcatcgtccctttatctgtaagaacccttagtgtcctgtagggggacagaatgggggggccagggggggatttttttttggccaatgcatagtttggcagaaaaatcacccgttcctttaaaagaattttagcaaagattgggatgccttacccaataaaggtaagatggctatgca

SEQ ID NO: 648463 - DNA, 276 bp, Homo sapiens
gtacccgagcttcctgcggctgctgctgtaacgaggcactaatttctagctgagccagtgtttgcccgctgatgaaaccgacgtgtatactgctacattcctaaggctttagacctgtccctgtacatctctgcatatttatctacctacataaacaacttcaaaagccaaatattctactgtttacctcacattctcagctctttcctttccttcaccattccttcttatttatagcttggtttcagcaaggaaagctgctctcatgaatagcaa

SEQ ID NO: 648464 - DNA, 457 bp, Homo sapiens
agggagtagtagaggcagcagcaggtggagcgtcataactatgaatgagcttactagaactatatacttttgagccagacttattagatagaccctaatacagaaaagacgaagatagagggatactcccatgcggccaaaggataccatactggcagcgctccttcaaatacataaagaacaacatagtaggataccatgaacatgattctctttgggaccacaaagcagaagcaagagttgattgaggaagaaagaaaagcagctagggcagagtatgaagcagagaagaagggactgaccatgcgtatcaacataccaactgggaccaatttaccccctgtcagtttcaactctcaaactcctaatatacctttcaataggggagccctgtcagcaatgagtaatcaacagctggaggacctcattaatcaaggaagagaaaaagtggtagaag

SEQ ID NO: 648465 - DNA, 1006 bp, Homo sapiens
ggctgcaacgtgccctgggaatttggcgacgtaattcccgactatgtgctgggccagagcacctgtgccctgttcctcagcctccgctaccacaacctgcacccagactacatccatgggcggctgcagagcctggggaagaacttcgccttgcgggtcctgcttgtccaggtggatgtgaaagatccccagcaggccctcaaggagctggctaagatgtgtatcctggccgactgcacattgatcctcgcctggagccccgaggaagctgggcggtacctggagacctacaaggcctatgagcagaaaccagcggacctcctgatggagaagctagagcaggacttcgtctcccgggtgactgaatgtctgaccaacggtgaagtcaggccaccaaacgggcacggcacagacctctctgtgacccactatggagactctctggaacagctcatcggcgtatcgagagaagatctggccttatgcccaggcctgggccctcaagaaagcccggaggctggaatgatgtcctgcaggagcccttcttgacaagtaccctgatgacccagcttgcaaggaaaccccgagtgtaatcataaatcggtcctcgccaggccagcggtccgtggtgtgctggcctggtgcaggctctaggaaagggacacaggaagagggcccacgagcagcatggaccagaatggccaactacagctaagtataaaccatccacagagacaccagaaggacaaacacagcagaaaggaagcggaacagaaacaggggaacccgggcccagaggccgagaaccacagaaaagcccagaaatacgggaagaacccggaaaatacaccgggggccccgtgagagggaacacatggggcaaacacatccggcagcacccggcgaaggaaagaaaccacgatacgaacggaaacagggagagaaccgagaaaaagagcccacaccaagagaaacagacccaaaagcacgaaccgaagcaaactcc

SEQ ID NO: 648466 - DNA, 224 bp, Homo sapiens
  misc_feature (29)..(29): n is a, c, g, or t
  misc_feature (103)..(103): n is a, c, g, or t
  misc_feature (197)..(197): n is a, c, g, or t
agacgtgcgcctgggggtgaggggaggcncccgggagggcctcacaggaagttgggtcccgcaccacccaggctagggggtcccgccgccgccgccaccaacncacgtccaggggccggtagacaaagtggaagtcgcgcttgggctcgtcgcagcaggtagcccttgatgcagtgcggcagcgcgtcgtccgccantggaagcagcgcccgtccaccagcacg

SEQ ID NO: 648467 - DNA, 151 bp, Homo sapiens
gagcagccagttaggttaaagtgtaaataccgctgcagtcaccctgcccaggaattctctccaaaacactgccactgcccagtgcaatattcattatctatctccagactggattacctgaataacttcttaaatggtctccaggtctcca

SEQ ID NO: 648468 - DNA, 753 bp, Homo sapiens
  misc_feature (8)..(8): n is a, c, g, or t
  misc_feature (48)..(48): n is a, c, g, or t
  misc_feature (203)..(203): n is a, c, g, or t
  misc_feature (205)..(206): n is a, c, g, or t
  misc_feature (208)..(208): n is a, c, g, or t
  misc_feature (226)..(226): n is a, c, g, or t
  misc_feature (311)..(311): n is a, c, g, or t
  misc_feature (378)..(378): n is a, c, g, or t
  misc_feature (431)..(431): n is a, c, g, or t
  misc_feature (493)..(493): n is a, c, g, or t
  misc_feature (498)..(498): n is a, c, g, or t
  misc_feature (572)..(572): n is a, c, g, or t
  misc_feature (574)..(574): n is a, c, g, or t
  misc_feature (578)..(578): n is a, c, g, or t
  misc_feature (658)..(658): n is a, c, g, or t
  misc_feature (697)..(697): n is a, c, g, or t
ttaagacncacaaaatggggggggggggggtgtgttttttataaaacnaaaaaaaacaatatatacaccccccggggaaagatgttttgtgggggcgcccccaaaaaaaaaacactttggggtggggggcccccccctctctttttgggggaaagggggggggggaaaaaaaaagggagggggtcttttaaaaaaaaaaaaantnngngggggggggggaggaggngggagagagcctccttctttttaaaggggggggggccccccccttttttttggggggtgcccccacaaagaaaggggggggccgncgcgccaacaaacaaataatataatttatttttttggggggggcgggacaaaagaaaaacaacaatnttggggggggggggggacacccacttttcttttaaaataaaaataatttttgncccccccccctcttttctaaaaaaaaacaacaaaaggatgggagggagatgatatatttatntgagnggagggcgcccctgcccccccccgccgccccggcgcgatttttttattttttttttttcctccccccccccgcnancttnccccacccaccaccacccacaccaatacactcttttttgtgtttttgtttgggctgaagaaacaacacaccccccctctnctagggtggcgcgcgccctccctctcctattaataaaanagaaagaagaggagaagagaggcccgcgcgcgccctctttttcttttatttatctt

SEQ ID NO: 648469 - DNA, 304 bp, Homo sapiens
agctaggatgagcattaattcattcaatcaggatttgagtgcttccaggcactattctaggcactaaggatacatcggggaaacaagtatttatggagagacagagtcttgctctgcctcctagctgtctgcaacctcgaactcctgggctcaaagaatcccctgcctcagccttctgagtagctacgactgcaggcacatgccaccaggcctggctgatttttatgttttttttgtagagataagagtcttgctgtgttgaccaggctggtctcaaactcctggcctcaagtgatcctcctgc

SEQ ID NO: 648470 - DNA, 120 bp, Homo sapiens
cggatcttaacgtcagcactacttgtgcaggagttagacttttctattagagaagtcaggtgcatgtaatggggaacagtgagggaaaagttgttggtgctcagtgctgggctgtgtctg

SEQ ID NO: 648471 - DNA, 459 bp, Homo sapiens
cttgattatccccgtagcagcgcagccacatcaatagcagctctaaccttaggtgagaggcgtaggagggggcgggagtggaccgggaatctagaaggaaagtgtagtccggggatacgggaattaatcttaccggggggaagatggatgagggggtactttcgtcgtggtagggcggaatatggaagtggtattagtaaggtgcgggggggatctgaggaacaggacctgatagcggtcggggtgcggtgggagtgagtagtctgaaatgggaagtatgattggtggaggtggaaatcgttcccggtgtggccgccctgtgtggggccgtggggtggcggagattaggtgcgctatcggggtagaggaggtaggccggtccgcgcgtgaatcctgttggggggagacgctggtggttggaggctgtgcgtaggtattgatgtggctgcgctgctacgg

SEQ ID NO: 648472 - DNA, 174 bp, Homo sapiens
taaaaatacagacggggtctgggtaaatggcccaggcgggtgtcaaactccgggattccagtgaccctcccatttgggcctcccaaagggcggggataacgggtgtgagtaataataagctggtttcttaagctttatgagtgttgagacgcagggccctgggactaataatgg

SEQ ID NO: 648473 - DNA, 707 bp, Homo sapiens
ccatgtttaagaactgtaacactcaccatgagggttggcggcttcattctggacgtcagcgagaccaagaacccaccaattcctgacacagtatgaaatggttcctttgggagaggaaaggtcctgtgagggtacagtgagaagatggccatctaccagccaggaggaaaggcctaacaagaaaccaactctgctggcaccttgatcgtgaactcccgccctctagaactgtgagaaaataaacgtctgtttaagccaaaaaaaaaaaaaaaaaaaaaaaaaaaaaaaaaaaaaaaaaaaaaaaaaaaaaaaaaaaaaaaaaaaaaaaaaagggggggggggcggaaaaattttcccccgggggggggcattggcgcccttttttttaaaaaaagggggggtccaattagagggggagttatttattaaaagaagagaggggggaggggtattaaaaaagagtggcgtggggggggggaaaaacaagtgttatttctgggatttctttgggagaggaggaagaccaccatttagtgggggggagagcgaaaatatgtggtggggaacactatccacaacaggagatattatcacccttgaggggaaaattaataaaaattggagagggttatgtggggtaaacaaacgagtatatatgtgcggggtaaaaaaaattggtataatggatatattggaaaatttttcag

SEQ ID NO: 648474 - DNA, 793 bp, Homo sapiens
caggctttttaaagtttttaatgacatataatgtacgtatttacagggtaaataatgatgtttgatacatatataatgatcagatcagaacaattagcatatccatcacattgaacatttatcatttattggtgttgagcctttagttctttttttttttggggatagagtctcgctctggtcacccaggctggagtgcagcggtgtgatctgggctcacggcaacctccacccaccggcttcaaccaattctccggcctcagcctccctagtgactgggattacaggcacctgccaccacacccaattttggtatcattaagtagagacggggtttcaccatctgggccaggccaggcgggtctggatctcgtgacctgtgtgatccacccacctcagcttcccagacggcgtggggattacaggcatgagccagggaccccagcagagacagtctctgctatggtcgccaggcatggagatgtggtggcgccatctgggctcactgaacctccaactcccgtggtacacagcggacttccgtgacctcagactcccgagtagcggggattaggggcacgcaccaacatgcccagtggatataggatttcaagtggagacagggtttcaccattgtgggcacggatggactagacactcctggaccatccgagaactgcccacgtgggggagaaccaaggaggagtggtccattgagaccaggcagtatggagaccagcgggcaacctggcgacgacttgaccacgaaccaataacagtcgccaaggcgagg

SEQ ID NO: 648475 - DNA, 118 bp, Homo sapiens
atgtggccgtcgatgttaaacgttgggattggagaacaccgtgtgatgctctatgtggctgatataatatgaactcctttcacacagatggattatttcctttgggatgcatctggaa

SEQ ID NO: 648476 - DNA, 106 bp, Homo sapiens
tgtgtggtgatctacgatccttagtggtgtgggtaggatcctctcagtaaggagtgagacttcattctcctttcagagaggtgagggagcaggttgagcactggtg

SEQ ID NO: 648477 - DNA, 193 bp, Homo sapiens
aattctcctcctcctgtgacaccgtggagcagtctgagcctgcagtggtctcttgtgccccaggtgcctgctggcacgaggacacaccttatgcccctcagatgactgaggtcctaacaagtgtgtgtaaaaacctctgggcccccctggccactcccccctgccttgggactcatgaaggaaacagctcaag

SEQ ID NO: 648478 - DNA, 836 bp, Homo sapiens
gacttaacatgtctttcttcgtgtctcttgtatggactcgtcattctagtcctctgacctgtccaaggtaggggccctctactctggcacctctggggacctggcctcgtggcaagggcgtttcatcagacgaatggagatgccggagcgcccagtatcaggtggtatacgtgctatgtttcgctcctctagcgctcaccctaagcaagtgcagtaggtagaggtgctatcttcctccccaattccagggcaaactcccgcgagttgtgcactagtggttgtgaagctcatgcgatattcggggcctcgccgcctaactcccattgttcctccagctctccctagtccataaccctcctctgctgacctcacagatcaaccgtattaagcaagactatatccatgaatggatggactgctaccagtccctcccacctgcacaaaacctttgggaggccccctcagagctggcctcggacaacgggctgatgttaattagcaccttagtggcctcaagccttagtcctcccacaccacttgcccaagtacagatcgactctcttcgctttgaaacaagcagtgttacccgtcatgccgctgtccaccagcatagtgactggtcactcctggaggagagactcccacgcacatgccagcaagagccccaggtctgcacgtgctgcccctcagggtgagtggcgcagggccgggggtggtccagcacctgcgcctcggcccccaccccagctgcccttggtattgtctgtgcttttgaagagtgttaaatatggaagcccctcaggttcctcctgtctaacggacgggtatttatagta

SEQ ID NO: 648479 - DNA, 269 bp, Homo sapiens
tgcgcatgctggagcatgtgatgatgactgtggacaccaatctggaccgcctcgtgaccctggaggagttgctcgcattcactcagaggaaggagttcggggacaccgttgacgcctgggagacagtggccatgcctcttgccgtcaccgtggaaaagctgaatcactcgcaggaggaccgggctgctcactatgactatcttaatgccaacgcctgcctcctcatctaatagacgacgcgcatgagtggatgaacgagactcccgctg

SEQ ID NO: 648480 - DNA, 170 bp, Homo sapiens
ttttttggttcttttttaaaaaaatccgaaatttttcccctttaggtatgtttaattccaactattcctgctattcctgttttgtcaaaaaattatttttttccaaatatgtttttttgtttgatggggccccgggaacccttattaaaacccccgaggcccgcctggga

SEQ ID NO: 648481 - DNA, 375 bp, Homo sapiens
tcactgcactgctgtgtctgaccttcactcaggcatctgcgatagacatgtagtgtcaaggccgcgcttgggtctcggtgcctccatcaggccgtcatggctctcttgcctcctggtatgccccggctcatcctgcattctctctcctcttccacgttacctgcagatcctaacagcctgctttgggtcattcgccacatggtggcaatgacgtaagcaatgccattgggcctctggttgctattatatttggtttatgacacaggagatgtatcttcaaaagtggcaacaccaatatggcttctactctatggtggtctagggtggtatagactgggcttgaataggcgggatgagtatcagggagtaccgagc

SEQ ID NO: 648482 - DNA, 584 bp, Homo sapiens
ctgcaaaaaaaaaaaaaaaaaaaaaaaaaaaaaaaaaaaaaaaaaaaaaaaaaaaaaaaaaggggggggggttaaaatttttcttgggggggaaattttgggaacatttttttggaaaaggggggcttaggggggttctttattaaaagaatgagacagaggggtcgactgtttataaacagaagatgtgtgagctgtgggaaaagtgctgcacatgtggggatttcttttggtgaagaagagacctcatttattgtgggggggggtggacactaatttggggggaccaaaactcatcctcatcgagtgtttttttgaagagttctgtatgaggtgtaacattttaacaatttttgatgggagtatttagtgggggtaaaacaccaagatgatggattaattgtgatgggggttggcgtggaaaagaatctttgcggtacacgaggagtatttgtattcttagggccaatttattttatagcggaggatctttgtgatcatcttgtgatcaacagaagatatatgtgagcatcagagatatgatacatcaacaaatctaaacagatagagattaagattacagt

SEQ ID NO: 648483 - DNA, 392 bp, Homo sapiens
caaataacaaatacagcatctgctctcttggagcccttacgaactctggatctaatctatagtcccttatgcttggttccatactgcttaaatcagatcctcgagcatcacatctcactgggaggaatttggtagaacgagacgggattcatgctcaaggatggaaattttactcaataaaactcagattaaccacaccgcgtattctttaaatgacgttggacctgtggaataatgctgatggagaaagcaatgactaacctgacagaatcaatgcaacaaaggctcatacccactgtcaagacactactctggcattccccttttgttttcagacaaccaaaatacacaagtgttcaagagtacttgtcttaatagatgaaacactgctc

SEQ ID NO: 648484 - DNA, 380 bp, Homo sapiens
  misc_feature (12)..(12): n is a, c, g, or t
  misc_feature (43)..(43): n is a, c, g, or t
  misc_feature (159)..(159): n is a, c, g, or t
  misc_feature (171)..(171): n is a, c, g, or t
  misc_feature (198)..(198): n is a, c, g, or t
  misc_feature (243)..(243): n is a, c, g, or t
  misc_feature (259)..(259): n is a, c, g, or t
ggcatccccaanttcccatgggaaatgcttaagcttgctgccntgcgaggatggggccctaggactattgggtgttctgagttctaagaaaatgccagaccttggcttggcgcggtggctcacgcctgtatcccagccgctttgggagaccgagttggntggatcacgagnttgaggtcgagatcatcctggccaatntggtgaaaccccatctctgctaaaaatacaaaaattagctgggcntggtggcacgtgcctntagtcccagctacttgggaggctgaggcaggagaattacttgaacctgggaggcagaggttgcagtgagctgagatcgtgccactgcactctagcctggtgacagagtgaggctgtgtctc

SEQ ID NO: 648485 - DNA, 148 bp, Homo sapiens
actgaaggtaagacgtgtattcaccactgcgtgtgcatgcctccgctgtaacaagttaccgtcgacacgtgagcaccgtgctgacctccaaatatcgttaagctggagcctggtcagactctaagtaggatcctcgcagtacccgtag

SEQ ID NO: 648486 - DNA, 105 bp, Homo sapiens
cgatgaatgtgggaaacaatgggcgaagggaaaggaaggattgttttgagcaatgaaatgctgctgcatgtgaaatgtgggcatccagaccctgcccagcattgt

SEQ ID NO: 648487 - DNA, 223 bp, Homo sapiens
  misc_feature (81)..(81): n is a, c, g, or t
  misc_feature (89)..(89): n is a, c, g, or t
ttatcagttagctactcttgggtaaaaaaccactcccaaaccttgagttttcttaccgagataaacaacaatgtattgttnctccagantcggagaggagctgggtggcttgtattatataagtgactgcagtcagctggcaccgcggctggggctggatggcccaagatggactcactcacctgttgtctgctatcctagctctgattgactagggttgtgt

SEQ ID NO: 648488 - DNA, 389 bp, Homo sapiens
  misc_feature (6)..(6): n is a, c, g, or t
  misc_feature (21)..(21): n is a, c, g, or t
  misc_feature (102)..(102): n is a, c, g, or t
  misc_feature (268)..(268): n is a, c, g, or t
  misc_feature (321)..(321): n is a, c, g, or t
  misc_feature (360)..(360): n is a, c, g, or t
  misc_feature (368)..(368): n is a, c, g, or t
ctgggntgcagggaattcacnccaccaaacagtgaggcaggaccgtggaacatctggctaccgtcgatagatcccgcctgtttgtagctgttatcgcgatanaatatttatcactggctgaacagagcggatttttcacattaccgctggtgcccaaatacccccagcccaggccgagcgtaaaatcgaacggcccccaggctttgctggcaacaagatattccgcatcaaacagccccgtaccgccgatatcccgcgcaccaaccgncacttgcggcagccagtaactctcttcccacaaacgcagtttgaggatcgaanggctttatctttatacgtttgatcgccagagaacgcttnggacgctngcttgtaacttgccgggtgcg

SEQ ID NO: 648489 - DNA, 1613 bp, Homo sapiens
  misc_feature (1613)..(1613): n is a, c, g, or t
tgggtccccgggggggggggggggggggggcccaggtggaggagatgggcccaaagtgtccaggggtcggggggggagagggagggagaggttaaattacaagtgtggggtgtaagtggagtgtaagaaaggtttcttgggtggcaaaggggagatgtgtgggaaaattcttttaaaaagtgtgagaaaatatacacctctcgtggcgcattttatacaacacccaagaaatatttttttatagaggggcgctgggggacgcctctctctttaaacaaaacacctctcgagggggatatagagggccgtgtggtcctccgcggtgtctctctaagaaaagccttaaaagcgcgggggccccccgggggctctcacatactcttgtgtgtgaacggcgccccgtgctttaagccatatagaatatcccctttacagagcctgtgtgggagaatattccaccctcttaaataaagagagttaagcgctcttattttgtcggggccccccagagctctcgtgaaaaaaacacctcgtgggccagatatctctaagagaggctcgcgtgagaacatgtgggggcggaaaataccccgcggggggagagagaggtgtacagtgcgggtcagggggcccataaaggtccctcttatccctctgggaagaagacaaaaaaggcccctctaccacaaaaccatccggttggacaaaaaagaggcacctctattatccacaaaacttgcgtctccgacgtggcgagagaggactcatcttacgcgcgtgaagcataatgtctccccctaaaatatcaaaatcctccctaatactgtgggcacccacggcggcggttccgtgggcacacaaaaatctttggccaccattctcgtgggacaacacttgggggtggcgacccaccgttttccccaaagaggttcaagcttaagttgcgtgtcttacacacccccgcgctggcatcacacacacgcgccctcgcggcgggggcaccgccccaaaaagaaaacgccgaggggggaccaaccccccacgcgggggaaggagggggcccctctacccccagcaggaggaagaccctcggacaaagaggaaacaggcgctctcgagaaaaacaaccacagggcccaaatattatcacaaaagagagagcaccctccaacaagggcggtccaccaaaacacccgggccaaccgtgagcgcatataggttatttttcttcgggagaccccggggcaaagaggaaatatcgcttataagagggaagatgtgggggcggagaaagaacagttagtcttctcttcttgggcgccgcaaaaatttagtggaagcaattaatggggtctgttctaagccaaaaacaatgggggcgaggcgaggtacttaggggaatgaaaaaaaaacttggcgttggtcggacaacagccacaccgtgtctctgcgggggagcgagaaaagaagagatggcgtttatagtggctaagcgagtaaatataagttagatgcagtatgaatagagtagcgacatcagaaaataattataattgatcgatgtatcaatcgtggaataatcaatcagtaatgtcataaatatacactgaggn

SEQ ID NO: 648490 - DNA, 415 bp, Homo sapiens
tacaggatcctcggaattgtgtggtgttatggtccgatcctcttcggatatctaaatggtccgatataccgaggagtaagtttccttttctttccgaagcgacgaatgcccttcatgggtgagaccttcaataaaacgaagtctccaaccataaattccaggggtctgcgcctctggtcagcatagctcttcttcctgttttgagctgtcctgatacgatctcggatcaaagccaccttctctgtggtctctctcacgagctctggtcctaacaaaatcctgtcctcaggctctgcccaacatataggagatctgcaaggtcttccatacagggcctcatacggtgccatgtcgatggtggactgatagctgttgttgtatgcaaactcaatcagtggcataaaaccacacaatt

SEQ ID NO: 648491 - DNA, 336 bp, Homo sapiens
ggtgatgatgattattattatagatgttctttattattataattacttcatcttttaagtggagatgcccaacccattatcattattctctgacagaagctcataaaaaattttactaatgcattattaatacattttaaaatcttgtgataaactcaatttcatgtaggaagagatgatgctaaagtagatagcacaggaattttgggaccatatatacatatgaaataaacaccaactcaatcttttagtgtatatgacatgttggcaaatcaataaatatctctgtccctatgtgtttgttaatacaaataaaagaaaaaatacacacccaga

SEQ ID NO: 648492 - DNA, 173 bp, Homo sapiens
cctagtagttatggttcgcgttagcctcagcgcatcagaagagcgccaggctcacctcactacccagtatatgcaaagaatggctagtgtacgagctgtacctcagtcctgtaatcagacccctaccagccaggcaccgtccgttcagggttagcttcagtgggtagactaat

SEQ ID NO: 648493 - DNA, 205 bp, Homo sapiens
  misc_feature (2)..(3): n is a, c, g, or t
  misc_feature (5)..(6): n is a, c, g, or t
  misc_feature (16)..(16): n is a, c, g, or t
  misc_feature (36)..(36): n is a, c, g, or t
  misc_feature (45)..(45): n is a, c, g, or t
  misc_feature (51)..(53): n is a, c, g, or t
  misc_feature (55)..(55): n is a, c, g, or t
  misc_feature (65)..(66): n is a, c, g, or t
  misc_feature (76)..(76): n is a, c, g, or t
  misc_feature (83)..(83): n is a, c, g, or t
  misc_feature (104)..(104): n is a, c, g, or t
  misc_feature (106)..(106): n is a, c, g, or t
  misc_feature (115)..(115): n is a, c, g, or t
  misc_feature (124)..(125): n is a, c, g, or t
  misc_feature (143)..(143): n is a, c, g, or t
  misc_feature (150)..(150): n is a, c, g, or t
  misc_feature (175)..(176): n is a, c, g, or t
cnncnntgggaacatnaacggtggaaatcacttggnatgagactnatcatnnnanaattacaatnntcaacaggangtttaanaaggcagagcttttggacatngnttttcaagnctacttagnnatcctctagtgaagatgnaagaggnagatagaagaggagctacaaggtgnntgaatggagtccatgtagaagaagatggg

SEQ ID NO: 648494 - DNA, 318 bp, Homo sapiens
ttcaggtccacaggttgcgttccggggagtcaaacttccaggagatggttatgcccccgatatctgagtcactaaagcgcaacaagaaggtcccgtcgttcttgtggatgagcaggtcgtggtcctgttgcttattcacaaaacctaggatggccccatcattccatgtgggggcttgtggtgcttcttcaacacctccatcaccccgttcaaactatgccagaaggtgtagttccagcccgtaaagttctccctgttgaaccgggaacaggacacggacaggccactgtagtcctccaggttggcttgatactgctg

SEQ ID NO: 648495 - DNA, 324 bp, Homo sapiens
ctcggaccccaccagaaaggtcagtcagggtaaaacactggtgcaacagcgtcaaattaggaaaaaaaaaaaaactatattattatcaatggacaggtaccacaacggtgcccttgatagataagtattcactcctaaaaatcttcagttgggcaccaggattggtgtgtttaaaaccaccctaaggatgttttggaatctaggctggatttggataagttggagatatacagggagaattttaaaggggttgagaggatactgggggctcaggggaagtaaaagggacaagtgggaaaagtggacccagagaaaaaactctgt

SEQ ID NO: 648496 - DNA, 188 bp, Homo sapiens
gcggccgcctactaccactaaattcgcggccgcgtcgaccgacaccattctatatactttcggcccatccttggacactggctatctaacctccaaacgagcttcaatgccatacaacactccttccgtggcctccaactgctcttaaatgctagtaaaaccaaatgcatgcttttcaactgtcgacg

SEQ ID NO: 648497 - DNA, 165 bp, Homo sapiens
ccagagacatcacggaggcagcgtcacaccgagacgagggtctgcctgggagcccaactctcgacctgccatcattctgcgccactgcgacgcctcactggcccgggctgggaagaggctgcgaacccgctctagctgaccttgggaagacagcctggaaggtgc

SEQ ID NO: 648498 - DNA, 501 bp, Homo sapiens
ttggcacgcgggggctgcaccaaaaccctgcaaccacctgcaccttggcatgtctttgggtggcggctgtgcccagaccccgccccctctcatgccctctgggttctcgggagggtccggagactccagtgatataggctgggacaacgagagcaaggaccctgacaaggtagcaccattaaaaaccatgtctttctaccactctcatatcttccaattactgatgtgtgtgtgtggaaaggaatatagtcttctgactatcagtacagtactgcatagtgttggcacaataccagaacgtagacttcattacagatactaggttttgtatcccgatgttcaataccaaaacgataccgaggcacaaaaaaaaggcatattagccaaagttacagaatggcacatgatccagacagatatgctcagcgtggccagaaggatccttctggccacgcctgggacgacatggagaaaatctggcaccacaccttctacaatgag

SEQ ID NO: 648499 - DNA, 106 bp, Homo sapiens
cctcctgacgaatccgtgataccagagatgagcatccatataccaggatcacatctccattactgctcttctggtcagcaaagcgtgacattgcctgagctactag

SEQ ID NO: 648500 - DNA, 1056 bp, Homo sapiens
ggacggaatggagagtttgagacagagcccactgcactctctcgacttagaattgtggaagtgcgacttccaaccccgggtcctgcctaccgcagtccctaactcgcagctggacgcttcccggagcccagatacttccgtgcgagcttgttcccgcaagccgacttatgctctgctgtcacgtagccacttactggaactgctgagctttgcttaaataacttccctacatgactgccctagtgagcttatgccaccactggggagaagactggtggctagctagtccatgcgccttgtccgtggaatcgcaagttgctcaagaaaagtaagccagttcatggcatgcactcgggtccaatagcgttggagcctgtttactgcgcagcaatctcttgagtttctaccaggggacctcctacgtggtcttcgatctctgcagatatcaggaacgcttcaacaaaccaatttgcaccctgaataaccctttcgcatggggcacgcatccaccggtcagtgcccgtgccgttgccataggggtacctaacgcaagccggagtaggaacctactttatgacggtcgccttgtgggaaacctatgcaggccgagttcgaaacgtccggggcccccttgcatggccctgttgacgttgcttttcttcaatttcgccgacggcggttgcttttcccttttgccagatcggaagcggcgacacttgccagaccttcccacgttgcgcggtcgttacactcccgcggggcactcgctcggggggctcggccacatggaagcgcactggcaccggcggacttccccacttccttctcgggcggttaagccaatacttgttctaccgacggttatgacactttcggcataaggcgatttgtgcggaaggctagagggggggcccaccattgggggtcccggcgggtttgccgtgtcgggttcggggacctgtcgcgcgcgcctcggaatcgcgagaggcgcatccccccgcgttacgccgcccctaggcgattacccgccgtttcgcgcgctttggttccgccccg

SEQ ID NO: 648501 - DNA, 1223 bp, Homo sapiens
gtctccgtatttgtgcttctgttgtcgcttcgtcagcactctgtttgttacgttgtgctgcccgttgttcggtcgtctttgtgttctcctgtgtggtgtgttgtgtttccatatctcttttttatttttttcccccttctttcgctgccctttcttagcttctctggttttgcttcatcattcttcttgcaagttccctcgctgtgggcgccgtttgattttctgtgcccatcttgatcgtctgtgtctgccctctattccctggtctcccgtcgtttctctctcggtgctttctattttctcttcttgcttttctttgttttttctttttttctcctcttcctctgttttgctgtatgcttggttgatttcccctttattgtatctttgtcttctgtctcttggttgtttgcctccatcgttgtacccctgcggtatgttctaccatgtatggtctttctgcactgcttgctgattctggtcgcctgttctggttgtcgctgtgttggtcttctgacgtcttccttcctctttcgtgtcgctcttctgttgtccggtttttcttttacatgtctcgtcattcctttttttgcatatggttatgtcatggtagtatataatttacacattttctatgttcatgtttatatgtactagacctctagatcttatgcattttatgtacaattgttactttctatatttttcgttaaatgtaaagtaagtacagtattcatagtttttatattctttattattgttgtactatagtaagtgttctggtgtaaactatgtagtagttttatgctgtatatgtatctgtttacatgtatgtgtttaaggatatgctatttaaatatgtgtatataacttcctctgcctgttgggataatggagagttttgttactttattgtcttatttttaaatacatgttctgtcagataatgaatagtattgctgtgttggtcaatttatgataataacttaatagttatgtttgtaaatctttagttaactgatatagagatgggtattctggttaactgactcaattctcatgtaggaatatacatataatacataatgtctatttgataaatcgagaatacagaagcattacttagaaatctgagttacctcttaaataatgacgtggcatgttgaagttgaggatgggtcttgagttccatgtgattttaagctcttggatatcgagggtta

SEQ ID NO: 648502 - DNA, 1188 bp, Homo sapiens
gatgtgaaagctttggggttttggaacagttacttacaggtctgttgaagatggtaatatctacgaactaacaatgggaagacattcttatttttgcaactggttgcagattccattcctccaggctggatttaaacccactcgcttcaacttgagtgtctgcatgtgggattttcctgttggaatcaagtgtaataactgtttagtcaattcccatcaccaattacatataaagagtttcaagaacaatatggaccttcaccatagagaagacactctaacgactagaaagaggaaggaaagttctcattacattggacattagaatgtttccttgagacaaagagaagcttctttaagaagctagctattgataactctctttgattatcactaaccttttcatcatcactttgaacaaactagttagcttcttgacctaataaaatttatgatcatgcaatatacacggacatattcatagccacttaggctaaaaagaaggtttctccagtataaagcatactagtcaacaatcggtgataagtttctcattttcttgatatagatacttcataaacctcaataaatagtctcagactggttgtatggatcggatttagcgtatggtagcatggttcataacacagtaaaaactgtgttacctcacagttctttcgccacatttcaggattacctattagcaatgccaccagttccctagggtaattcacgttccacattattccccatttacttcaaaagcgctaactcaacacggccaacttggggtcaactcgggggattatacaaccacgggcgaattaatcggcagagcatctgtccatcaaactaacaacccttcacggtagcaccacaaggtcggaacgacgcttgcgagctctgcctttactatagtcagtctacgcagggatgactacattacacctggacggagtactattataataatagagaaaagtccacgaaggtgtgattcaacaaaaagtaggggggcgagcaacacataatccctacgtaggaagactacctaaaacaataacagacgtaagttaactacggatccgagaagtaagctagatagtaagaatagttgtccgttccttttttttctttgttattttttttttcttggtatcttcctagggaaggaggaggggggaggga

SEQ ID NO: 648503 - DNA, 270 bp, Homo sapiens
caaaggccggatgagtagcatcgtggtgtttaacgacaaaagtactttaccgaaaaaggcgcaatgaattgtattcctcgaaacgaagatagagctcctaagtaagataatgtcaagtgaactgtagtacaaggaggttggaattgaagtagagaggccaaagggatcgttgtaaataagcacttagattgtaagcttaagcgctttaatgaaattaagtggaccaactgacagattgaagaaatggataacgtattcactgactgtgtc

SEQ ID NO: 648504 - DNA, 359 bp, Homo sapiens
tcccgtcggagcgtgactaaacaattctcatataaattcaccctagccatcattctactatcatcattactaataattggctcctttaatctctccacccttatcgcaacacaataacacctcttatttactcctgccatcatgacccttggacacttatatgattcatctccacactagctcatacctaatcgaaccccctttcgacctcttagctgtcgtgtatggttttcatttgttttgaggcttcgtctgattagtcattgttgggtgtgtgcctcgtccgttgttgatccgatctttggaggtggggtactcaatagaggcggaagttcactgctcagttctgcggcgggtat

SEQ ID NO: 648505 - DNA, 277 bp, Homo sapiens
tacaggcctaccaggtacagttatactactattgctctgaagtccatcttcaataagtaatggccattcttcccaaatgtatgcaagatcaatttttccattctttgacgtggcagattctccatctgttactctgcatctccagaatcttactttctcatctgaacatgaagttgccaataaataaggagcactgcatgcaggatatatagaagatgaactcagatgtcctgctgatggcttaatacttattatctcaactccttctggtaaatgc

SEQ ID NO: 648506 - DNA, 744 bp, Homo sapiens
ggcccttcgggacgatctggatgcagaacgttcagtacaaagtgattcgtgctcgagatgctctccagtaccccctccgtactccgccggtgcatacctcagcgcctctcctctcttcgccccggacttcgtctaccacaggtactcttcggtgtacggttttcgcgtatggtccaggcgctccgtccttaggcgtctgggccctcctctgcgaccttaatatggcccggtgcgcgcgcgctctgtttgttgagttgtcgtcttccttccccttacgcctctattccgcttcccgaggtggcccggtgtgtcccgctttcggcgcagtttgttacgagtcggctgcacgcggcctctgtccggttgactttgcggagccatggagggcggcgttctggctccgtatttcgggggctcctggcagcgtggaagctgtgacccatgggctcataatggagcaggtgaaatgtgcagatcgccgtggccaacgcgcaggagctgctgcagaggatgacggacaagtgtttccggaagtgtatagggaaacctgggggctccctggacaatcgtccgagcatgaagtgcatcgccatgtgcatggaccgctacatggacgcctggaacaccgtgtctcgcgcctacaattcgcggtctgcagcgggaacgagccaacatgtgaccggcgagcgcgggtcaccccgacctgttcatttccagtaaacgtgctttgagaggcggggtccg

SEQ ID NO: 648507 - DNA, 81 bp, Homo sapiens
ctagaagattcagcaaagtacttttgtgctcttggggacggccttcctagggatgggggatacgcctccgataaactcact

SEQ ID NO: 648508 - DNA, 227 bp, Homo sapiens
  misc_feature (222)..(222): n is a, c, g, or t
ggcagaaagtcaacgggctcggagtggttaaagtaggacgaatattcattggttgagtagttggaatttgaactggaccttgaaagttgggtagaatttaaatgagtgaagaagagctaggaaataatttcattaaggaaataaatatagctaagatgggacaagcatagcatttctaatgccataccattgtttttataattaatgtagcataaaggcacnaacgc

SEQ ID NO: 648509 - DNA, 401 bp, Homo sapiens
tggggagctgcaaagagtgttgaatgggcaattctacttgggagggatggaaatgttttgaaactaggtagaagtggtggtatcactgaattattcgatttacaaggattaattatatgttatgtgaatttgaactcaataaattattaaatgaaaaacaaatgataggattggaaacgctgcaaccactttggacaagagcttggcccttctccatgcaggtgaagacacgcacgccatgaccagaccccctactctgactgtcggtccctagagggattcaggcacatgtcccttgcaggcagggacacgagtgtgtcgtaacccataagtgaacacagtcaccgtgatcagggttgggaggccgaggtaggcggatcatgaggtcaagaggtcgagct

SEQ ID NO: 648510 - DNA, 643 bp, Homo sapiens
tcctgcttatagtgatctcttgcatgtttacttctcttgctctgaatcccttaaactgctgaggtcttgctcgaacgtttcatccctcagtcctattttctcattctatatgcacactcattatttcagttgaacgagacgttcacatggcttcagagcgaccagtttgagttgttgattaatagcgatatctttgaacccccatatctctctaggtgctgtagacctgatagtttgcatacgttaactaggtatattcacctaaacatcccattagatagtgccgaaatgtcacatgtcgtcctaaatactgataacttgtgcctctactctctccgctggcttcaacatctattctgtcttctcataactgcgtataacttactcgtcccctcaatgttcagtcatcaatcacttcttctgggtctacttgtgagatagccttcgagtgactaacctttgctcaacgtgtcacatcgtatgctggttcctcgtacaatgttcaagaatgatcgtggctggcttttgccagggttgaccatgttaaacctagctttatagagcacacattattgtgaatagattgaggctttaaccgccggagacactatacctagggaaacactcagactaacctctacaa

SEQ ID NO: 648511 - DNA, 557 bp, Homo sapiens
tcgaattcgacggtttctcggtacgagaaacatcaatcagacccatattaacaaaaaaaaaaaaaaagggtcccagggaaaagcctgctgtctctaagctaaaggaccaaaaaaaggacagccaacaaaacaaaaacttttggattatacttgcctgccccgggaaaatagctatgaaaagagatagactctttcccctccccagggagcacggcagctacccagatggggagcagaggtctgtccaccaaccacagcctgaaaaacaaagcagcaacctctccatacctgtgggatttggtgggtaacgagccctataatctttgcctctgcatagtgagagaggcccgtgtcccagatgaaggctctcagcaaaaactatatggcttccttgcccttcagtattgagatagtccccttttgcccctaccctgcacctgactcactggggtgctgtagccaacagatttggggatacacctctcctccatccccatgatgcattattgagccagaataccatatcttctcagttagagagttgacggaggataact

SEQ ID NO: 648512 - DNA, 334 bp, Homo sapiens
tctaggacttttatactttcaggtcttacttttatgtctttaattcatcttgagttaattttggtataagaggtggggtgtggtaggtagctcacacctaaagtcccaactcttgggaagaccaaggggggaggatggcttgagtccaggagttggagaccagctggggcaacaaagtgagaacccgtctctaaaacaataaaaaattgcgctggggggtgatgtgcacctgtaatccctgctacacagaaggctcaggcaggagaatcccttgagtccagggggtcaaggctgtagtgagccatgttcataccatggcacgggcagcctccag

SEQ ID NO: 648513 - DNA, 166 bp, Homo sapiens
cgaggagtattggtgcgggagcttagtatgatgatgggcgtagataagtagtggttactggttgaccatggttgtaggtgtatatacttgtaattgagattgctcgggggaataggttatgtgattaggagtagggttaggatgagtgggaagaagaaagagagga

SEQ ID NO: 648514 - DNA, 479 bp, Homo sapiens
gctgaggtgatctagaggatccagtgtactccacaacagcagcacgggctgaccatgtactggaatcatctgcactcctcacatggaactggcaagctcataaacgaacagcagtgggtgctgaaagcagcaccaaaatggagatttggattccagccccccagtgacagcccagtgcgaagaagcaaactccagatgggcagaaggcagggtgcacaggtggctccagtctcaggaggatgcgcctcctctcccccatcccagccctcagcattgtgccagagtgatacccttaagtgtttgggtttatgtttttcagtttggtttgggaaacagcagttgcacagagagttgggggtactgctgctgccttttcaccgaggcactgccaccaccagctctagcagggatgctcctgagcttggcggacatacttagatcctaacgtgccagtgagacctgtttgtggaggtagcact

SEQ ID NO: 648515 - DNA, 1295 bp, Homo sapiens
  misc_feature (156)..(156): n is a, c, g, or t
  misc_feature (340)..(340): n is a, c, g, or t
  misc_feature (443)..(443): n is a, c, g, or t
  misc_feature (497)..(497): n is a, c, g, or t
  misc_feature (523)..(523): n is a, c, g, or t
  misc_feature (606)..(606): n is a, c, g, or t
  misc_feature (634)..(634): n is a, c, g, or t
  misc_feature (684)..(684): n is a, c, g, or t
  misc_feature (736)..(736): n is a, c, g, or t
  misc_feature (803)..(803): n is a, c, g, or t
  misc_feature (860)..(860): n is a, c, g, or t
  misc_feature (915)..(915): n is a, c, g, or t
  misc_feature (958)..(958): n is a, c, g, or t
  misc_feature (1022)..(1022): n is a, c, g, or t
  misc_feature (1170)..(1170): n is a, c, g, or t
ctcccccccagcggccgccccttgggcgtgcggccccgccggggaattccttggtcctatctatcggtccttgggcgggagcatgctcggttatgttcacagaggtctgtagaggtgtgacgtcgcgtgaccatcctcccattgtgtagtaagagncctcgccgccatatattcatagcgcttatatcccacgtaattgaccagcccgcatacctcgcgctaagtcgtacttgtcaagaccaacggtagccgagtgagtggtatgttgatagtgtgtggctcttgtgtatgagccaacaagcagcaccccgcgtgtagatgtgagacgccgcgtttttgntcgtttatcttataagaataagtggttcgggagcctgacggggccggcgctatgattggcgcatctgctactcctataagcacgacgtcatcccaatgacttntccgactcatcctgctgccacgacagcaagggtttggacgtagttggtggtgtntctctttataagcgaggaaataggangagacagagcggatattgtctcgacggcgcgctaagcgacgcagccaacgcgagactccgccgcgaggcgcacggccgccgangcgaggatcaccgctacagagaagcagnatgagatgtacgggtatacatctagcgtgagatttgttgttgatgatatngctatcgttctgcgttggggcgtcgcctggccgctgacagcgtttcctcgtngcaactcgcgcgagcgagtgcgtattcgctcgagcgtcccggtgacttcgagccgacgtcataacantctatatcactcctctctctccacaactaccccgtcacacgagacgcgctccatgcngcactctctcgctcacacgtggtgagtagtatagttacaggcgagtaggcacatnttcgcatcgccgcggtactatagctcacgtttatctagctgantgcaatccctagtgattattcgtatgtctttcgcttgttcttcgtgtgatagcagtgcgtcgcncacccgccgcacccctctctctactccccgcgcgtccgccctctatctgctcacgaagacgtgtatcagcggatcgtgccgcgcgtgcgcaacgtgtggcctgaagatactatagttgtgctttggactcgatcgggctgtcgagatncgacatacaaatgagaacaacatcgcgtgtcgaggacgcagcgatgactgtgtgcccggcgcgactcgtctctgtattcttcctcgctgtctcttcgcggtatcttgtatcctcgtcgtcgcgag

SEQ ID NO: 648516 - DNA, 502 bp, Homo sapiens
  misc_feature (497)..(497): n is a, c, g, or t
gttatgcagtatctatcatctatatatctatccataactattctcaagatcagtctagtacactatcgatctatcgctgtccatctatctatctatcctaactttgtgcctatacatccacgtatgaatatctattaataactatatccatgagatctatgttcttgctactcaactgtgtccgtgcactgttatctatatcgatcaaggaatcgtctctccttgtctctgtggggttctctatcagtccgtgttttgttatttacgtatctctgcctataatgtatctatgtccatttaatccatgtattgctatgtatctctacatttcatatacgttagcactttcgttagtatatgctatgtctcaaacacgtgcccactcacatttgcatgtgtgtctgaatgtatacacacatacacacacatttagtgaaggggcaccctgacttgatttgtacatatctcagtggtgacagtcatcagcaagaagcagncccag

SEQ ID NO: 648517 - DNA, 282 bp, Homo sapiens
ggacccaggaggtgtctcttgtgccagacggagtgcaaggcacaatctcagtttactggcaacctgtgcctcctgagttcaagcgattctcctgcctcagtctcccaagtagctgggattacagtcatgtgccaccgtgcctgtctaatttggtatttttagtagagacggggtttcaccatgttggtcaggctggtcttaaactcctgacctcaagtgatccacccgcctcggcctcccaaagtgctgggattacaggtgtgagccagtacaacctgccgg

SEQ ID NO: 648518 - DNA, 456 bp, Homo sapiens
  misc_feature (455)..(455): n is a, c, g, or t
ttccggtattactctgctacacgtagcctttttacttttggggttttgtttttgttctgactttcctgttacttttcagggctgacgtcacatgtaggtggcgtgtatgagtggaaacgggcctgggtcttggggactggagggcgggggtccttctgcccctggggtcccagggtgctttgcctggtcagccaggcctttcctgggagccactcgcccaaaaaatcagcttggccaacctggggggctgtgtccacccagcccgcccgtcctgtggggtgcacagctcaccttgttccctcctgccccggtttgaaaaccgagtttgtgggcactttttgccttcatgcacctgtcctttttaacatgtcaccttcaactgtaatcccaacatcctgactccgtcattttataaaaaaggaacatcaggcatgctaccaggcctgtgccgtccna

SEQ ID NO: 648519 - DNA, 1067 bp, Homo sapiens
  misc_feature (1)..(1): n is a, c, g, or t
ngaaaaaaaatgaaaagcgaaagataatatacatcgtctttcccatatacttgtgtgcgtcgctctgtatccaattgtggaggagactgtcaatcgttttaactggattatatatgtctgctttcgacgtagcttggtccccacttccgtatggcgcccctgcagttatccttcctcctgacagctttactgctccaatggtagttctgcaatttacctcttgtccgttgttcctttcgtcagtgctagcgttcccctctgcagtagcccttcgggcttgtactatcagaagtgaatgccccttcctgtcacatgacgtgttattcagtcagaccagccccactaccattgctgtgccctgtcaggccctccgggaggacctgcgtgcctagccaagtcatttcacttccactccatagcgctctttcatatctatgggcctagcttaccaacacactatctctagtgatcgatttgtatggcgcgatgtgacatgaagaaagcacatgccaaggtccaccacacaccacctgtcccataggccttcgatacgggataatcctagttattacctcagaagtttttttcttcgcagagatttttctgagccttttaccactccagcctagccccgttaccccccaattaggagggcactggcccccaacaggcatcaccccgctaaatcccctagaagtcccactcctaaacacatccgtattactcgcatcaggagtatcaatcaccatgagctcacacatagtctaatagaaaacaaccgagaatccaagataattcaagcacgtgcttactacaatatctactagggtctgctatttgtacccttacagtagcaagcctcagagtagcttcgagtctcccttcaccatttccgacggcatcctacggctcaacattttttgtagccacaggcttcgcaatcggacttcacgtcactttaatggctctacgtttcctcactatctgcttcatcacgccaactaatatttcagctttacatccaaacatccactttggcttcgaagcaaattgcctgatactggcat

SEQ ID NO: 648520 - DNA, 758 bp, Homo sapiens
caggctgggtgtaaatcggccgaggccggaggtgcggcgccgaccaagatggagactgccgagctgccttgagccgttgagcagctgaactgaggccgtgccggggcgctccgaggcctgagtactgaccacgcctgtgccggtgaggaccttcatcagggctccgtccacttggcccgcttggctgtcccgtcacactccagtgtcaagccactgtgtcacccaggcagccaagagaggtgtggcgtggccctggtggacgcattgagctgagtgctaggaacaggtgagccgtcccccagtcgtgtgagggccgaacacgggactggagtattggacacgctgccttccgacacagtctccctcagtgactcggactctgacctcacgtcttgcccggtggtgctgatagtggaatgcactgtctcccgattggggctgcctggggatgtgaggattcaggtcctgatgagccgccctcatcccccgtcaggcctcctcccagccagcggtgcagccattccatctgagaggcatgagctccgaccgttctcccagcgcagccgtgacatctttgactgcctggagtggggcgtgcagacggtgctccatcctctgtggcccacaccagcatgagtgacaacggaggcttcaagcggccctagcgccctcaggccggtctccactggaaggctgggcaggccatcggaggcctgctcacaaggtgctccgggccgatacgtggaaacccgacgctg

SEQ ID NO: 648521 - DNA, 345 bp, Homo sapiens
tttacccccaatttaaaacgtttttttttattgcaggttgtttgtttgatatggtttggctgtgtccccacccaaatcttatctagaattgtaatcagaattataatccccatgtgttgggggagggacctggtgggaggtgataggatcatgggggtggttcccccatgctgttctgatagtgagtgagttatcacgagatctgatggttttgtaagtggtggtttcccctgctcttctctcttgcctgccaccatgtaagatgtgcctggttccccttccgccatgattgtaagtttcctgaggcctcccccgccatgtggaactgtgagtcaattacacctc

SEQ ID NO: 648522 - DNA, 479 bp, Homo sapiens
tgtcctatgtgttttccaaaagcccgcggtgttacaccgacggcgttcttcctcccgcgcgcataaagggatgttagcaggtcttttccgatctctcaacaaaagtgcgcccaagtaccagcctggcggggtgacaccaccatgaagtggatcctgcacaaagagaaccggattgtcctaatgggtgaggctcttatcgagtgccggcttgagctagatagtatccggtagatgatctctccacgggggcttgttaacctgggtcgctctctaggcttgtctggattccacacatggacctcggagaccaccacacgtatgtttggttcgatagttctgtctcagacaagaggaggaatttgtgggggggacacgcgtctgatacacagctacagtgtcggggtaagaacagacgtcacactggcgtgcgtttttggccccaaaaacaggataactgctgttgtcggtcccacaaaaca

SEQ ID NO: 648523 - DNA, 417 bp, Homo sapiens
ttcggcacgaggaaaatacaaaaaagttagccaggcgtgatggcacacgcccgtaatcccagctactcgggaggctgaagcaggagaattggttgaacccttgagcagatatcgtgccactacactccagcttgggtgaccaagtgagactaaaaaaaaaaaaatattaaagtgagtctcaaaaaaaaaattaaaaggaaaagataaaatgagcatatcaggattatttaggcctgaaaacaaactgaataatcagaatgatggttacatggttaattaaattacctatgtcatatttattccccaggatattgtgactttgttaaaactgacaaatagaaagtctaagttggggaaagacgggactttttaatatgtaaaggtggaaaacaaaacagctacccatataaaaaaaaa

SEQ ID NO: 648524 - DNA, 710 bp, Homo sapiens
  misc_feature (350)..(350): n is a, c, g, or t
catggggctggggctgctggcgaaggaggtcgggcgctgcagaggagctcatagaccctacagcgcagccaggtcggggaggccgctgattctcccgcttcagggcgttcaactgcaggacgaagcgtccccaacgcgcacacccgactctggagacccgagtgtgtgcgggaggccagccccgccgaagcgccgtccaggatctgccgaagcgccgtccaggatctgccgaagcgccatccaggatctgccgaagcgccgcccgggatctgccgccgcacgcaagagcccaaccatagaggacagcgggggcacctagtacccgtggagatccaaactcctctcacccnagccccaaagcacttctcccaatgctgctgccgtgcctgaatcccgcccacgcgtgagaatcaccccattattacagaagacccctgtcaaatgcacacgcgttaaccacgtgttacccaaggacgactcagtcatcctttaggactcggtgatacattagcacagatgaacctggcactgaggtgggatgaggtggggagatcttttggccgcaggtcatttaggatattgttattactgcaaagaccacagaacagccatggtttagtcacttattccttgccaggagcttcgtctcattgtctcttttaataaacaatattttgagatcaaaaacacacgagagaaatcaaaaaggg

SEQ ID NO: 648525 - DNA, 283 bp, Homo sapiens
ccagcccagactgggcagagaaaggaaatggcacatcactcacagatgacagtctgcagatcgtacagtgttatatcagacgaggctgcttctcgttttatactgattgaactgtgtctccacggtcgtggagcgttgatggtaccttctcggaaggtccacattcaattgtaccaccagagatcctggcctgaacttcatattgtagaggacccacaaaacctcccttttttataggaatctgctacatacacatttctaaaatgtctctctcgcagctctt

SEQ ID NO: 648526 - DNA, 480 bp, Homo sapiens
tggcacaaaccggccttaaaaacaaaatttgtgactttttaaacaaaaagggaggcccttaaaaaggggttggccaatttgtacaaaaaggtcctatttttgtgaaaaggggcataaaaaaaaaagatgttataccccaaaagggaaaaagggatttttaaaaaaacttgggaaaaactgcccaaacatttttgccaagcgggatccccgcctttgtttaaatttttttaacggggaaaatccccccaggcccattaactgttgcccttttgaaggtccaaaatttatattttagaaaaaataaaaaaaaaaatattttcatgttcccaaaaaaatggtggggggaatgggtgaaaaaaaataaattgatagggtttcccaaaacaaaatgttttacgaaagcccccgttcaggtttttgttttaaaacggggaaaaaaaaatttttttatttcaaaaaatgaaaaaaaatttaaagtta

SEQ ID NO: 648527 - DNA, 195 bp, Homo sapiens
gcctcagaaaaatgagaagatgagaatcagcagtggatcagcttcaggctccagtctgtcaactcaatgagaaagaaatggtagtaagcttgttcagggagatcaagatatgacagagcagttagagcagcttgaccgaggataatgaccatcctctttctcagtttaactgaacagaggaaggaccagatgaag

SEQ ID NO: 648528 - DNA, 189 bp, Homo sapiens
ggcagagagaagtgaggtataacagtgcaagagcagattccagcaggaccccagctgctaagggcaaggaccctttgatgtcacaatgtggaggttttgatggagcccaagtctaggagcttccctgtgggcatgaagtaataggctagagcaggttccctggtgtggtgagtatgagtgttggcactt

SEQ ID NO: 648529 - DNA, 221 bp, Homo sapiens
ctactgcagttacaacatgtaataggtaatgctagactgcttcaagtaggtgatcaggttaactcaatatgtaaaacctacaaatgttaaaatattgtacaattagtacctgtatttttatttctatagctacttattctaccattataaacattatcaattagagcagtgattcctacacatagctattatatgcataacagggaataccaaaagtctta

SEQ ID NO: 648530 - DNA, 437 bp, Homo sapiens
  misc_feature (245)..(245): n is a, c, g, or t
  misc_feature (369)..(369): n is a, c, g, or t
  misc_feature (375)..(375): n is a, c, g, or t
  misc_feature (396)..(396): n is a, c, g, or t
  misc_feature (403)..(403): n is a, c, g, or t
  misc_feature (431)..(431): n is a, c, g, or t
ggcaagcacaagaagtggcgttattgaaattaacatttcccccaagttttacaatgtctaggcatgcatatttaagtgtctgcctcaaaagctcatgctaataaggagatggtgcatttaatttcctttttttgttctctgagcaacatgcagcttcctgcacagccctccttgcaggcaactgcactgaggtgacagtcctcctgactgccagcacagatccccagggcctctgagggcctgtnattctgggggcagtctttcactttctattcggccccagctggaagggagcagtttaaccacagcccagcacaggtctcccgccttagcttctcttaagggagtctgggttccctcttgacaatntggganctcaccagtttgagggttcgngagcccnggggcagggagccaggggccaggggggnatttgg

SEQ ID NO: 648531 - DNA, 512 bp, Homo sapiens
gggcgctctagaggacttagctagtggtctcagctgtagaaataacctcccactagaaaaaccaatgggcaataatgacttcttgacgatggggtggtcaaaacgaaatatagccttcctctttatatactcacatcaaggccctgtgactggttaagcaaacaaggtttcccatggtccatggtgtcccttcccttgacagagaatcttgaactcatcaaactagattcgatatagtactagggtggaattaatgccctctctatataggctggttatcagaaatcaagaacactatgctgaagtccttcctaatgatctcccaaagtaaacatattctacaggaaggattcccagtgtcataaaattgcagtagatatgcatcaatcaagtacctctcaggagcattttaaatttttctgagaatagcccttatacttatcagatgcttactgtaggctgggaacttcctcatgtgtaaaggcgagcctccttgacatgttttgtctagt

SEQ ID NO: 648532 - DNA, 132 bp, Homo sapiens
gctctcactggcttcactccttccctgtgtactatgctcagagacagaatagtttgaaaatacgtctttttcctctttagctggatgtcccacagagaaaatggaataaagtgtcatttggactgcgaatat

SEQ ID NO: 648533 - DNA, 178 bp, Homo sapiens
cgagctcttacccctaattgcttcttcgatgacggctttgtttcatatatgaaactctgatctttatttaatacggtcaatatatacgcggtgcaatctttcgtcaagcggtaatgtgaaggatttgttaaccgatcgtgatttacttatctaagtgcgtcatcgaagaaccaattag

SEQ ID NO: 648534 - DNA, 734 bp, Homo sapiens
ttccaacagtagttttatagtatgtgatcttgggtttttgctgatgtgctttgttttccttaggacttttgtgggtatgatatccattgtctaagctcatgacgcatgtgaggagatatgctatcagagtgcctcgtctgttcccgcatgtatgctggagttcctgtccgtcttgcttcttcgtgccagttcatggttcatcttgccttatctgctctggtgggtgtctacctatgtccacttgcctagttgtgatatgatcgttattgtatactctgtctgtgtgtgattgttgatcaatcttgtgttccgttccctggactctccagtatggattctggtctttctacgtgttggtggactctaattctctgtaatattcgtttattgtgcttaattttacttgttatttaaatataatgtatatgtatactataattacaaaacatatatacccttctcgcgaggtttcttgctgtgtcgtgttgaaatatgtctccatcatagtggtcattcatcgaacatataatgtccattccgtcatatctcatatatatggatcatgctctcttgaccttctgagtgggcatggatgtgcttctctggtgtgtgtattatgaatcccttctctgccttgtttcatggcatgtgtaatgcctcttggtccccgtccaagtgtatctattactgatttctgaatcatgtttctagttgcttgtcctgccacagggcta

SEQ ID NO: 648535 - DNA, 205 bp, Homo sapiens
agtgcctctagctggctcatctcaacgggcccgggacactgaacagtgtaggtgtggcatgagcccagctgtgcccaatgctgtgctgagtgggccctcaggcagggcaggtttccaatgggagggcccgggaggacggcctggtgtggggtaggggctcagcccagcggcggctgttagggccggggaggggactcccttgagt

SEQ ID NO: 648536 - DNA, 778 bp, Homo sapiens
agctgggctcctgagtctggtggggacgtggagagtctttatatctagctcagggattgtaaacacaccaatcagcaccctgtgtctagctcaaggtttgtgagtgcaccaatcaacactctgtatctagctgctctggtggggccttggagaacttttatgtctagctcagggattgtaaataccccaaccagcaccctgtgtttagctcaaggtttgtgagtgcaccaatcgacactctgtatctagctgctctgatgaggacgtggaggacctttatgtctagctcaaggattgttaatacatcaatcggcactctgtatctagctcaaggtttgtaaatacaccaatcagcaccctctgtttagctcaaggtttgtgagtgcaccaatcgacactgtgtatctagctgctctggtggggccttggtgaacctttatgtctagctcaggcattgtaaataccccaatcagcaccctgtgtttagctcaaggtttgtgacgtgcaccaatcgacactctgtatctagctgctctggtggggccctggagaacctgctgtgtcacaacactctgcaatctaactaatctgatggggcaccctgcagaaccctttgccatctacctccagggatcgtacccgcaccactcagcgccctgacaaaacaggcactcccctcaccatcaccacgagacgtggcgccaaacgcacaccaaaccagtgccagccacatggcactctcggtcctcaccgggacctgcatcgccctccaacttca

SEQ ID NO: 648537 - DNA, 282 bp, Homo sapiens
cctagcatgcataagcacctagggctagacaacaaagaatgagtgttgccatccattgtcaaaagagtactcaagagtgtggtggccaagttcaatgcctcatagctgattacccagtgggcccaggtatccctgttgattcattgggagctgccagagagggccaaggacttcagtcttatcttggatgatgtagccatcacagagctgagctttagctgagagtacacagctactgtagaggccaaacaagtggtccagcaggagcccagcaggcccagt

SEQ ID NO: 648538 - DNA, 245 bp, Homo sapiens
cacgaggggacaaatgacaatgacacaaacgtacgcctattgcctggagactccgtgacctcaaacaaggagctatgagcatcagttactggtgccattccggtatcacgaaactgagagatgcttctgactgctgtggcctcggctgaaccagataccacaaatctggtgtctgggcagtgttgctcagagctgagtgcctcacgttacctgctgttacctgacgatttctatggcagtgccgg

SEQ ID NO: 648539 - DNA, 209 bp, Homo sapiens
acacagtcctggtccctttcaggagctgccaccacggtgacggtgctgcaggaagagatcttggagggagcgcctgtgcagacgggtgtgtccccagtgccagcaggccatcaccaccaagatctcctaggagatttggcttgatagaattccggggctgggttcctccgtgtggggctagccgggggggtaacagaggctcagaatcg

SEQ ID NO: 648540 - DNA, 93 bp, Homo sapiens
gttttgctccaccaaacacttcagatatggaagctggtgtggaaagaggcaaaacctgatgaattaatggattccaaattgagatacgtattt

SEQ ID NO: 648541 - DNA, 584 bp, Homo sapiens
agttcaagaccagcctggccggcgcgacgaagccctgactctgctggaagtacaaaaattggctgggcgtggtggcacacacctgtggtcccagcagtctcgggaggctggggcaggagaattgtcccgagcctgagaggtggaggttgcagtgagctgagatcacaacactgcactcaaaaagtagttcatcaatttagtctacttaagacaaagaatatccgagtgtcaggcaatctgggatagaacccattgtgtgtctacaggatacaatctgctgtgtgctctagcggaacttccggatcaccttcaccgtatgactctagacaatccctgtccactcttcagttctagattgccccattcatagaatgaaagaattgtcctagatgatccttgagggtcttccaggctgatgacaagggggacctggcccctctgctgtgtggccaacagaggactccacttccccattccgggtggtttgaaccaagaaattgggctggggcttccatttcctgccttgtgggcctttccctaccatgtgaccttggcgcccctctttggccttccaggaattccat

SEQ ID NO: 648542 - DNA, 154 bp, Homo sapiens
  misc_feature (53)..(53): n is a, c, g, or t
gaccggatggcgtcattcaaggggcttaccggaaatcaacaagaaccccaagntataagaaactcaaagatgccatggaagaaaagatcaccatggctgaagtcgtgaacaaaattaaccgtgctaagtgggaagagtacatctcaggattttc

SEQ ID NO: 648543 - DNA, 489 bp, Homo sapiens
gggggggccagttttttccacccctgccagccccataagattccggatggcccagttccctcctcggtggtggaggaggtgtttaaacccccggcccccggtgagaaaggagcccctcaaaaacctgaaaaaggtgcctccaacagttcaagcaggagatggacagcctgcagggccaaatggaggagcacgccctacgggtgcaaaagtttttgtccttgtggaagccgttggagccagccaatgccagccctgtgcccccggggggttacgccggcccacggggggacccacaaaaacacagttaaagcagggtttccaaaaaagggccgggaaagtgactgctgtggattcgcctccgggggccgctgccccaaaaggtttttatcaaggttatttatttgattgggtgggcgatgtttttttaaaacatgaaatttaagttttgttttgcctttaacaaaaagtaaaaaaaaaagcagaatgaga

SEQ ID NO: 648544 - DNA, 257 bp, Homo sapiens
ccacgtgtgtatctgggtgtctcgactctcaggaggtgcatctgagtggtcccgcactctgtgcatagatcatggtagtcccacctcttgggaggtgaatgctggtgatctcgtcatctcaggaggtgcatcctgtgtggtcctgtcccccgtggtatagcatcctgggtaatcctcgtcctcttgggagtagcatcccgggtgttcccgtcctccccggcagtagcatcctgggtggcttcccatcctccttaagc

SEQ ID NO: 648545 - DNA, 320 bp, Homo sapiens
tgatgtaacggtgcggtggaaagaggtactgagatggtaaagaaaagttaacttctggcactatgatcgccacttccgtcaggctggtcctgactctctccctcgcgttctgatcgtttcatatcctgtactatctgatcatatctgaattactccaccgcttagcctcttcctatagttcccacttccttaacaaagccctaataaatatttcctctagtctcgcctattactctcctactcttctctaacatctgcagccacactctccattcactccatgctgacaaggcagcggcaaacacttatctctgctgaca

SEQ ID NO: 648546 - DNA, 129 bp, Homo sapiens
aggagatggggacaggtctggagtctaaacacttgtaatttagtatctcgatgtctttgttaagactgctgaataattattttttttcttttataataaggaatataccccacctttattccttcattt

SEQ ID NO: 648547 - DNA, 354 bp, Homo sapiens
  misc_feature (14)..(14): n is a, c, g, or t
  misc_feature (113)..(113): n is a, c, g, or t
  misc_feature (314)..(314): n is a, c, g, or t
ccctgtcccccccncccccggtggtggaaatactcattgattcctaaggaaacaaaattttcctctgtgttctggtgatggttagtgaaaataatttaaacaagatgtacagnataatcaagatggactcataacaaataatagtcagtgacccactacagagaaataagattagggatgtgacaaacacagttcagcatttaccttctaaacttcaacagtagtaaggtaggtaaattcccattacaatgctttcttaaaaccaacttccatcaatgtgtactccagaaaaaaaaaaaatccatctttgaaanaaaaatattgcaaattaagtaacaaatagatcctgctttt

SEQ ID NO: 648548 - DNA, 865 bp, Homo sapiens
  misc_feature (379)..(379): n is a, c, g, or t
cacaatgttccttggggtcgagaaagagaacatgccggcctagatcaaaaaaaaaaaaatggggtgagcgggaacaacagcacgcgtttccctagactgagctgctgattatctggcagagaagttgaatctagatccactaattactcatactctgaatcttgataaaatcaatgaagcagttgaattaatgaaaactggaaaatgtatccgctgtatcctgttactttaagtacaatgtaatacatgccagacccaaaggatatttcaccaactcaatggcatttgatgtttttttcatgatttagaagaattattcacccaatcccatttctatattctgacttctgattcactccgcagaggacctatatctggnttctgacctaaccatttcatcaaaattgctcttacgtaacctagcgtgaccaaggatcagcctacttcccacagctagattaatactggcttgtatcactcacctctccatcctctctacataataggtcaacgccaatacgttgccattatcatgagttcgtctacctgcagaccttaatgtggaatggccccttttacattgtttcgctcgcctgttatctccaatcttgttcattttctcataattaaacgtctcctcctttcttatccttcatttttcagaagtggttcaaattcctcgtccttcatatctaatttcaagaattaatttattcgtattttcccgtctactatctctcccgccagcaacataagtatacaaatcccgcgtccttgttgtatttttctcttttctaccttttctgtttttctttgccccgctgccttcccccgtgtcgtatacactataggtagcgccaacccc

SEQ ID NO: 648549 - DNA, 188 bp, Homo sapiens
aggctgacttgaggatcccctaaatggctgttacctaaatggctgtcatcaataaatttcgcacactgagcattcaccagctcctttcggaagtgtcatattggagcactattcccggaagcggatgcgcttcagcatgccttggcagagcagcaacagcatacagccatttaggtaacagccattgt

SEQ ID NO: 648550 - DNA, 317 bp, Homo sapiens
tatttttgaagtacgtaagagtatttttttagctagattttttttgttaaagccacactaactactgtatttttacctttttatatgtaaagctcggcggtagctctccatgtataatttatttggatttttttataaaacaaagtgcaccctcttgcttctgtttcacagtagtgatgtatgaacggctttgggcactgcactgcgatccttacagaaactgtacacgggaacgagaagtgtgatttgttgtccacaacccgatctcgaaatgtttatgctgtagttgtgtctgaaatacaccacgtctgtgcaaa

SEQ ID NO: 648551 - DNA, 948 bp, Homo sapiens
tctgctgcgctgcgtgccccgtgtgctgggctcctccgtcgccggctcgcgctgcggcccgctcgcctttccggcagctcctgcagccggcaccccgtgtgtgcacccggccttcgggctgctcagcgtgcgcgcaggttccgagcggggcgggctcctgcggctcgggaccctgcgctgtggtgtggtgcggtcgtgcacaccgaggagacaaagcttggttgatttcctgagtgatgaaattagggaggaacagaaaaattcagaagcataaaacctccctaagatgtctggaggttgggagctggaactgaatgggacagaagcgaaattagtgcggaaagttgccggggaaaaaatcagggtcagtttcaacattaacaaagatcccacaacattgtgatggtgaggaggaaccctcgcaagggcagaaggttgaagaacaggagcctgaagtgatatcaatcccaattcgtgggttgaagttataaagaatgatgatggcaagaaggcccttgtgtggacgtgtcattatccagaggatgaggttggacaagaagacgaggtgagagtgacatcttctctatcagggaagttagctttacagtccactgggcggaagtctgaatggaaggatactaattatacactcaacacaagattccttgggactgggcctttatatgaccacctagtgattttccttgccgacccgaggggtggccaccacttttgcagatgaactggtggagctcagcaagccctggagcaccaggcgtaacttacttttttgaagacctcagaagtttggtacgagccagtagagcagacagatgttgaccctagttatggcgggttgggcccgtgaacactctatttgagcgaactggtgttggaaggataccccatatatggggacacacccattttttatacacaaaacagaag

SEQ ID NO: 648552 - DNA, 571 bp, Homo sapiens
atgagccaccaatcacatgcctatcatatagtaaaagccggacccatgacccctagcaggtgccctctcagcccgtcctaagtgacctccgtgccctagaccatgtgcattattaactttccaggtcgcactaagcgctccgtcgataactaggacctactgacgcgaaacaacactaacctattatacctaatgatggcgcggatgtatacacgagcaaagaaccacaattaccaaggccaccagaaaccacctgtccagaaagaggacttcgatacgggataatcctatttattacctcagaaattgggtttctgtccgcagggattgtgtcgagagcctttttacctatctccaggtcctgagtccccctgacccgcgccaaaagttaggaagggcactaggtctcgccccaagacaagggcatacacccacggactaacatcactcgcgtagacagtccacatcgtccgaatcaccaacatgctgtgatcatttcgcattcgatggacgtatcaatcaccctgagtctcaaccatagtctaatagagaacaatcgaaagcatataat

SEQ ID NO: 648553 - DNA, 421 bp, Homo sapiens
  misc_feature (24)..(24): n is a, c, g, or t
  misc_feature (41)..(41): n is a, c, g, or t
  misc_feature (49)..(49): n is a, c, g, or t
  misc_feature (174)..(174): n is a, c, g, or t
  misc_feature (202)..(202): n is a, c, g, or t
  misc_feature (222)..(222): n is a, c, g, or t
cctccccccccggttcacgcccantcctcccgcctcagccntcccccantaccgggacctacaggcgcccgcccactacgccccggcctaattttttgtatttttaagtagagaccggggtttccacccgttttagcccgggatggtcctcgatcctccctgaccctcgtgatnccgccccgcctcggcctccccaaagtgnctgggattacaggcgtattncatgaacttttacatgaatgagtaaggacattgaaagatgcatgagatgatgcatacatctttgtggttgacttatcattgcatgatgcatgacgtacatgttcagagtaatattcttctgcattatagtgagagaaaaatcttgaattttagtaataaattgcttttaccagttgcacatttatgtaataaaatacag

SEQ ID NO: 648554 - DNA, 762 bp, Homo sapiens
  misc_feature (16)..(16): n is a, c, g, or t
  misc_feature (116)..(116): n is a, c, g, or t
  misc_feature (144)..(144): n is a, c, g, or t
  misc_feature (274)..(275): n is a, c, g, or t
  misc_feature (296)..(296): n is a, c, g, or t
  misc_feature (302)..(302): n is a, c, g, or t
  misc_feature (315)..(315): n is a, c, g, or t
  misc_feature (399)..(399): n is a, c, g, or t
  misc_feature (608)..(608): n is a, c, g, or t
  misc_feature (676)..(676): n is a, c, g, or t
  misc_feature (713)..(713): n is a, c, g, or t
tcgggggttgggtgtngggggggaacgccttccaaactgcggtaggtacttatggtgggtatctggtggttcttagttggcacaaatgccctgcctagcccccttaactgcgtccnttcccaggtggggtgttttgttgttggngttgttagtaggcagggttgccttaccctggggggggcagccccgcttgggtgaaagtccgccgtgtttttgattttgtttgtatgtgtgttttaatgcaacaaccagctcccagtttcccagtgggaanntattccgtagcctcatgtacntgtacnatagggaagagcntaacatgaacatcctccatcatggcctccccaaatcagccccccgcccccttaattaattccttccaccaaaagaacttaaacnaggggcttaagcccaccttatggagagcgcatttcacggcgcgcctgaccccttcgcatttggatttgtgttcagcactttaaaaggttcaactttttgcttctacccagattggtctcaggtctgtcttctcatccatccctttctaaagccaaagcacatttgtagcacataatccaggagaagcagaagtaaatgctatgactggnggtatttcttagcctggttttgtagtttttaggcagtaagtagattatgagcgaacaaatgtgaaggntcatgtggagtcataatacctgtgatctaggtatggncggagtcaagctcagagacaacaaagccttctaggtcattaggcaatgg

SEQ ID NO: 648555 - DNA, 105 bp, Homo sapiens
agccggtaccgcgtggcaatgaacacgatgaaattgtacttagactatagaatttacgggtagtcggtacgatcagccaatagcgatgataaaatccaataaagg

SEQ ID NO: 648556 - DNA, 795 bp, Homo sapiens
tgaaatggggcttggcactcaagtcaaagatgaacatcggaataacaaacatgtcctctccagaaagtcctttctttctccatactgtagtcctatgagaagacatttcgtctctgagaaaaaaggatggaactatgggttctcttcgcaaagccaaaggatagtgtttaacaagccagctggcttatgctggttctcagctgtttaaaaaaaaaaaaatggggggagagaccagatggtcctattccccctgttccattcccctcttcttccttctatctccttccccggaaaaaccaaaaaatgggagacaggccaggatgtatgtgctgcttgagaggggttctttacttcaaaatctttcttcagggggcaagacatgactgactaatggctctcccttacttggtacaggttacataaactggaggtgggctgaatttttaaccccgtttttataaactttccattagggtccctaaacccaggacacttttctcacattggactcggtcactttcgacgttggtctcacttcttggaacgctggttcagctggggggagagggaccgggcttcccgggccagccggggttgttaccttggtcacccacttttctctcgtgggtgccacaactggctcactctgtgtttctcccccacgtgcctcacttcgggccaaggatatcaccggtgggaccagacggggcgctcgaaattttccggccaagtttaccgggtgttgaaagatacacccggcgggcggttgctggggccgtggtgtgggccgtggat

SEQ ID NO: 648557 - DNA, 259 bp, Homo sapiens
aggtgactctacgagctctacgtggtgtacgtgagttaaaccagttggtaccggtagtatcactagttcttctggtgtcttctctgatctagtctaggaaatgctgcaaacatggactatttaggtcctaggtatatcctggtgtggaatctaagtctatctagaatacgtgtctttggttgttacttgacctgttagttatgcttctccagtggcagcagtagtggtaactccttgtggaccaaactatattttaggg

SEQ ID NO: 648558 - DNA, 389 bp, Homo sapiens
catggtggcttacacccataatcccagcactttgtgaggctgaggcaggtggatcacttgaggcgaggagttggagaccagcctggccaacatggcaaaaccctgtctaccccgtctctactaaaaatacaaaaagtagccagacatggtggtacaaacctgtagtcccagctactcaggaggctgaggcacgagaatcgcttgaacctgggaggtggagggctactgcactccagcctgggcaagagtgagactcagtctctaaaaaaataaaaataaaaaagctgaggttccagacctgatcctggaggcccagttcaccctgatttaggagaagccaggaatttcccaggaccctgaaggggccatgatggcaacagatctggaac

SEQ ID NO: 648559 - DNA, 189 bp, Homo sapiens
ggtccagagtagtgaggggctcattcttgatgaggtgtctcaacctgcccaacctttccctgccagctgcctcagggcatggctgtaaggagaaaaggctgctgaagttgcaggctgggcacctggctctccgagagccctgagggtggatggtgctcctgagtagccagctgatgttggagcggccgc

SEQ ID NO: 648560 - DNA, 906 bp, Homo sapiens
gctttgatggcagatgcctatgtatgagacgcttgctgaatttctagagccctgcacgttagtaggattccattttccgatcagctgagtgagctgggaggcacactagagagggaagatttctttgcttgtgctctgtgctttatgtctctgtttggacgatgaggtctcagctctgtcagccacagggtggagtgtacgtggctcaggtcctcatcctacactggcaagcgcgtcgtggctgtcgctggggttcaacggtgattcgtccgtgctcgtcagcctgtccgcgagttagctgggatttactagggtgtcgttgctcatcgcacatccgtgggtgtaagttgtgttggtagtgctttatgctaggacgacgaggggtctttgcaccgagtggttagccagggcgtgtgtttctagaacttgcctgacccttcaggtagatactgactcaccattgcgccctccacaaagtgcatgggtatgacagtgcactgatgtgcgcaccgaccatcccgagacgcatgagcggcgacacttttccgaacgtgcatcttcgtgacagggccgtggatggatggctgacacgagcaattaataggagagctggcacgcgagccccgagtagcaccagtgacgcattgaggcgtcccagagggccaccacaagaagagaatggaaagtgacgagcgtgagttgcctcgattgtgttaccagcgcattaggcaagtatagcttttaaggacatcccttggccaggggtatccccagcgggtgttcttcctcaacgagcctcatcttcccccttctgttgcaccaacgggtcgtcccggtaaccgccccggaactataataggggcccaccactattggccgtcaccattgaatcctcggcccggtatg

SEQ ID NO: 648561 - DNA, 431 bp, Homo sapiens
  misc_feature (15)..(15): n is a, c, g, or t
  misc_feature (82)..(82): n is a, c, g, or t
  misc_feature (152)..(153): n is a, c, g, or t
  misc_feature (156)..(156): n is a, c, g, or t
  misc_feature (172)..(172): n is a, c, g, or t
  misc_feature (179)..(179): n is a, c, g, or t
  misc_feature (186)..(186): n is a, c, g, or t
  misc_feature (194)..(195): n is a, c, g, or t
  misc_feature (218)..(219): n is a, c, g, or t
  misc_feature (228)..(228): n is a, c, g, or t
  misc_feature (248)..(248): n is a, c, g, or t
  misc_feature (260)..(260): n is a, c, g, or t
  misc_feature (290)..(292): n is a, c, g, or t
  misc_feature (295)..(295): n is a, c, g, or t
  misc_feature (320)..(320): n is a, c, g, or t
  misc_feature (334)..(334): n is a, c, g, or t
  misc_feature (338)..(339): n is a, c, g, or t
  misc_feature (355)..(355): n is a, c, g, or t
  misc_feature (358)..(358): n is a, c, g, or t
  misc_feature (362)..(362): n is a, c, g, or t
  misc_feature (404)..(404): n is a, c, g, or t
ccttgttttgctgtngcttccttggggtttttggctctctttttctccccggccttctccctctttccttgttgcctctccngcttctccggccccgggggggccccttttcgctcttcctccggtgtcgtggcttcgtggtgggccctggnnttnttttgcccgtgcggcngtgtcgnttttgcntctttgcnncccttctgtgcttcctgggtttnntgtcttgcnctctttgggcgggtttgcgncgtcttgttgcngctgataccttacatggattgtcttacaannntcngtacagatttatactgattgataantgttcacatatttnaganntagtttgttgactggngcnttcngtttcccttgtttgttttcatcttctagtaatacaatatgcntttctcaaatgccctattccgtttttg

SEQ ID NO: 648562 - DNA, 241 bp, Homo sapiens
tattttgagacgatcttgctcctatcatacaagctggagtacagtagcacaatcgtagctcactgcagcctcaaactactgggctcaatcctcctgcctcagcctcctgagaagttagggactacatacaggtgctcgccactgtgcctggctaattttttttttttttttttttttggaaaaattggagtccccgctatgtgttcacagggacgtgctctcaaactcttgcccccagggt

SEQ ID NO: 648563 - DNA, 932 bp, Homo sapiens
gcttcctaggggttcatcgtgtgagcacaccatatatttacggtagtgaatagacgtacgacacacgagcgtatttcacactccggtacgcatgaatcatcgctagtccccaccgggtcaaagtattgtagctgaatcgccaactccacggaagccatatgagaatgatctgctgcagtgctctgagcccgtaggattcatcgtttcgtttttcaccgtaggtggcctgacgtggcatgtattagcaaactcatcactagacatcgtactaacacgacacgtactacgttgtagcccacttccactatgtcctatcaataggagctgtagtttgccatcataggaggcttcattcactgatttcccctatctcaggctacagcctagaccagaccttacgccaaaatccatttcactatccatattcatcggcgtatatctaactttcttcccacagggaggttgctcggcctatccggaatgccccgacgttactcggacctaccccgatgcatacagcacatgaaacatcctatcatctgtaggctcattcatttctctaacagcagtaatattaataatttcatgatggagaagccttcgcttcgaggcgaaaaagtcctaatagtagaagaaccctcataaactggagtgactatatggtgcgccagctacacaattcgagagcggatacataacatccagacggagaggacggatcgacccgcaaaggtggttaagcaacccatggctcatgattttcagaacacaaaaaggggggggaaagatcgcgcggccagaaaggccagtttgagggccaaggggggaaacaagggggacgccgcggacggaagactggggctcgggatgggcaccgggccgaaataggggctcgggtgaaatacgacgcgatgttggccctcttacaagaa

SEQ ID NO: 648564 - DNA, 1125 bp, Homo sapiens
  misc_feature (1124)..(1124): n is a, c, g, or t
cccatgctgtccgtcggacgcgtgggaatgaaaaagagacctcaatcaagaaatgaaagagagacagcatctcaaacaaagaaaacaagagtcaacaaaggatgatcacatgaccgccagaatgtcctgattcacctaaggatgtcctaaccttaccggcccctctgctggatacccctcattggacctgtagccacctgcaccatggagctggacctgccgttccttacctgggagcaattagtgccaacacacctttgctgtattaacatccctccccagacatccatcctgctactcaccctctgttaatctcctgttacactcagcttcttggcatgtacatattcatttgtgagtagtaatgtgctgcgtgtaaacacagtcacattatggtggtcttcagtaatacaagtattatcggattcgtttctgaagatggagtcttactctgtcgcccaggctggacgttgcaagtgggtacgatcttggctcactgcaacctccgcctccatgggttcaaagtaattctcctgcctcagctttccaagtagctgggattacaggcacccatcaccaacccagctaatcttcgtctttttaatagagagggggtttccatgttggccaggctggtcttgaactccctgacctcaggtgatccgcttgcctcagcttcgcaaaagtgcttgagcattcggcttgagctacacgctgggccgtgtgctgtttaacgtgctgcatgtcccccaatattattttttgagaatggagcccgctcatgtagccagggctgaagtgacagagatgagaactaggtcacatggaggcccaggcaccaagaataaacaaatctctgcccaacctcacaaccagagcaatcaaggcgacccacaccacctgagacaatatgggtcttagtacagcggggcggtcacgagtacaaggggactaatgacactgttatcacaaccttcctccaaaagtatgattagtggctcagatcgagcaccactatattacacggtaataagaaagaattcaccactataatccgcactaatacgcatatagtcgaagagcacagtcgttatatcaaccagcagcagtaaaatagattttcnc

SEQ ID NO: 648565 - DNA, 292 bp, Homo sapiens
gcaaaatcgaacatcctcctcatcaagtcaaacagctgcacgtgcgccagggagtattgatgcatgtaactcttcagaggtttgcagctctccttcacaataccgggcctcagctctgtcctcagaccaaactaggcccccttagtaaaaatatttctgcttcctggtacggtggatcatgtgtgatgggatgggccctaggatcttctccatcatcaccaggtgctctcggtattcgtgggtctggaagagtggggagccccggtagtactcaaagaggatgcagccaatg

SEQ ID NO: 648566 - DNA, 724 bp, Homo sapiens
ctcctgatctcaggtgatccacctgctcatcggccgtcccacagtgttggtgattacaggcctgagtccaccgtgcctggcccctaatcgtgtcgtgaagatagagaatgatatagagagaaaatcaaccgtgagtagaagcagcacctgtgtttcgagttctatctagagctacagggatcttcattagatgacgcttctggatagatagcattaaggatggtgggggttaggataatgccattcagacagacaataggggggctcagctcgttaaatagtaagaaagctgaatgaatagaaatacgacagtaacagaaagggcacatgttgtgtggacggctcactcctgtacacactaatattattcgacaagcgccgaaaactttgggcgacctccgtgtgagcgtacctgtctaataaaagggccaaggtagtgcttgggcaactgaattggcaggagcaagcactggtgagtaagacactctagcgggaatacgaacaccagtaaaatgaccacccgtgcgcggaaagcctactccgtccttgctgcaggcgcccattgaggagaattccgggcgggaaaaaccgggaacacacacaccagggggtcctcacacaagaccggaggcatccgaagtgcccccggggcgttgcccgttggcgggctctctcttgcgtacagggaaggacgcctcgcagactcagctgcgcgcagcccaac

SEQ ID NO: 648567 - DNA, 136 bp, Homo sapiens
cagagcgccgcccgtgccctatcctgtgtctgagttgcagaggcaatgcccgggcaccgaggtagaacatgcaacctaacaaggaagtaccgtccagctccgccggaccgacgggtggcccatcaagaagaaactt

SEQ ID NO: 648568 - DNA, 185 bp, Homo sapiens
  misc_feature (41)..(41): n is a, c, g, or t
  misc_feature (136)..(136): n is a, c, g, or t
gagccggaccaacatcgaacggactgatccctggtgtattngccgtgtggcgtcaggcagataaacagaaacctccaggccctcccgcggggggctgagagcagagccgggcctggggggtgctctgcgggccctnccgtggttctgattctgagcacagggatggatcagtccgttcgcatgtt

SEQ ID NO: 648569 - DNA, 183 bp, Homo sapiens
tagaagtcaagaattgatggtttggcaaacattctcctatgatttcatgaggatctgatagagaatgcctgtgttgtccatggcaatgagtttgcgtacagggagtggtgcgctctctatgtgatgaatctgctgactaggctagggtgtggagtggaacatgtgtggatcgagagccccacc

SEQ ID NO: 648570 - DNA, 905 bp, Homo sapiens
gatgactggcttcgctacggcaacccctgggagaaggcccggcccgagttcacgctacctgtgcacttctacggccatgtggagcacaccagccaggtgccaagtgggtggacacacaggtggtactggccatgccctacgatacgcccgtgcctggctatcgcaacaatgttgtcagtgaagcgcatcaacatggcacacctgtgcatcgcggggtcgcacgccgtcaacggcgtggcgcgcatccactccgagatcctcaagaagaccatcttcaaagacttctatgagctggagcctcataagttccagaataagaccaacggcatcacccctcgggctggctggttctgtgtaaccccgggctggcagaggtcattgctgagcgcatcggggaggacttcatctctgacctggaccagctgcgcaaactgctctcctttgtggatgatgaagctttcattcgggatgtggccaaagtgaagcaggaaaacaagttgaagttgctgcctacctagagagggaatacaaagtccacatcaaccccaatcactcttcgacatccaggtgaaagcggattcacgaattttaacgacagtcctccaacagctcatgtcattcaacctgttccaccgcatcaagaggagccaatagttttgtgctcggactgtgttgattgggggaaggttgcgctggtcccacatggcacgatggtcctcaggatcgtccaggcatcgggtgtgtacatgacctgcggggtggcgcccggcttctcgggaccccggttctggcggaaagcgccggggaccttccgatcctgggcgagctccgccgaactattgccggggctcgcgggggcctgtaaaggggacatcttctcggggcctgccactctcttcttcgac

SEQ ID NO: 648571 - DNA, 380 bp, Homo sapiens
gatacgaatcgagctctgtaccttatcgtttttgataatctggtatcctacggaaagtctagtgtcgcaggatcaacattcccttaaactgacagggatggagttctagaatctggcataaagatgaatacgaatgaatgcctccagtatcgtgtatataatcacggtgttctgggtcactacgggcatttagggtttaacatcaaaaacaaagacgggttatttaaaaatcatgctacgggatttcaagctcttcctctatgaccagttctacacggattctgcaagttgtttaaaagttttacattcacccaaatcaaagccaagttttaggggtgtggagatagcgtgtgctttaaaccacaacaataaacaattaa

SEQ ID NO: 648572 - DNA, 561 bp, Homo sapiens
ggcggagcacagagggccagtgtcaccatcataccagggccagaggcgatggtagcatcatgagaccgaacaccctctccttcctttgggggctttgtgtctaccctaagtgaggcatcgatgcgcaagctggaacccagacacttctgacatgcactccagagaaggaccttgcatcaatagcacttgtcccatgcaataataaatgcaacaggatgacaaggaagacaccaaggagaagacagaataggaatacaaccatgaagaagaaggcgaaacatcaagaagatagagacagacacgtagtgtgcaaaactagaagtgacacaaaagatagaacaggatgtgcatatcactatgaaaatgaacatactataagaagatggcgaatgtagacaacagaatatgggaacccagtgagataggaaaatatctaatatacaatttagacgacgaaaagacaagaaatacatgaaaagacaaattcggataaagtacaacccaattaagagaacaaaacaaggagaacacctacaataaagtaaaaattcaagacaaagt

SEQ ID NO: 648573 - DNA, 458 bp, Homo sapiens
gactgattattcgactcgatgtatcgctcgatttccgctatcaccaccgtatcgactacaccgcgcacctgctcggggtaagcccgctgcatcttgggctccaaaccctcgatctggcgcaggatgtctgtctgattcacacggtcaccacgaaaggcaatgggcaacgaaggatcatgatcgggccaaggatgctgttgatcatgccgatcaccggcttgttgggctggtcgtctccatcatctgggccgaagaactcggtttccagcggaccaaccttagcgcgcttgatggccatggacgcgatgtagtccggattcaggctcccaggcttgaccagctcacgcagcgccccctcataggtagcctgctcaatttcgcgcggcacctcgccatcggggatagggtcgccagaccgatctactgcgcctgtacgcggccattgcagggcttgcacc

SEQ ID NO: 648574 - DNA, 238 bp, Homo sapiens
ctgtaccgtctgagcatcagagacgatggataaactgcggctatttcagatgtgcagctttggagaggggcccagccagagacagctgggtttcacggaaacatcaccttcttcccacacaatcccctttccaactccccatcccactgagagccacttccattgcccagtaaaatcctccacatacactacccttcaatctgtttgtgtgacctgattcttcccagctagctcaaga

SEQ ID NO: 648575 - DNA, 308 bp, Homo sapiens
ctctggatcaagtgtctagctttgatgtctgtcccacagtatcctatcatggaaatgttcgtggatatctgctaggtattagccacgtgtagtcaggacggtcgtacctggaagatccctgccgcattagagtcactacactacgtatgtcccatatggagtatcataaacataggatgttctccacctgctacactcccttgatggatatccctttggtaagatagatcctgggaataactcctggacaggtcataaaggctgtggtcaactgaagcatataaggcacgatgagaggtggacagtcg

SEQ ID NO: 648576 - DNA, 471 bp, Homo sapiens
agctcagtcgccttccttccaaaatctgcaacatcaggtccctattctgagcaatgtgtgaagagacagatccacctgcatcatctaatagttcatctgatcaagttgtcctgtccagagatcagagcttcacacatgatgtccccaagtatgtaacatccatgtagcagaatacagactcatcccagcaaatgaaaacatctcatcatacggatcaaatgaaagtagctaaattataaatctctcttgatagctgagatctgtgcgtaatgtgtatcactatctgagcagttcaatcagactgtctgacagacataaatccactctaggaacctgatatctctagatatactactaagcattcgttacatacaagtcagcattctcttacctgggagcatattctgcatattgaccatgcgtagtggataaagcactgttaaccattctcgatcgagtaatttagctaac

SEQ ID NO: 648577 - DNA, 1962 bp, Homo sapiens
  misc_feature (1104)..(1104): n is a, c, g, or t
gggcgagggccgggtgcggggtcccgccccacgttaaccgcctctaggcagcgctggggtccctacatgcacctcggcgtgtaaggccattcgcgaccgcagcgttgctgacggtgggatcgcgcgcgggggcggcacaggttactcggcagccatcgcgcagtgagcgacgatctgtatgaaacgagtgggccgtggcagagagttgctgcctactccaccgcagagacgcgtagctcggtcctcacgatggatagggaacagcgtgaaggccggagagcacgaggattccgcacctctagatggcagcactctgactagtgagtgttaaggatggtcacggtgcgatcgaaggcatggatgccactcacgaggcaacactgtagaacggtggcacggtcgtgtcaagagacgagggtgcatgaggcacacgactgtgtgatggggacagtgacggcacgaggtgcagtccattgcagacggacaacactgctcgaagccctgtgcggactgcgcactaggtgcgcacaggtgtgtgaatgccctcttggggacatggcccgttacaattcagccacgtaattgggcacgcactgtggggggacaacgcaaggggggtggctcacacaggggaacttgcggcaacagaggatcataccgtggacacatttaggggcaatgggcaacaacggtgcacccatcaccaattggaacctattccaagatacgggtgactttcggccaacggccatatcccaattccggctattatgagattaaccattgggcacttggcgaaccttggaaccaccgatcgggtgccagagctgaccaagggaacactggcagacgaacaaaggggtgagcgtcaattggacgcaagagaccgcgcattgccgtggcagatgccaacattggcgccccacattagggtcatgtacactcggccgacatgtgggcccatacatctacacatgggcgttaaacgtccggcttgtacactgccaaaaacggcggtcgtctccacaatacaacgtgcatttgtacacccacaaaaggcgtaccaccgacaagagccacgcgccatctagagaggcatagcanacggtggaccaacgacaacagcgcgcgcgtttacgccacttggcaggaaggatcgtcaacaggcactggccctactagcgggacacacgccaaggggcgaccatacaaatgcgcgccagatagtacccagttcacgccggtcataaggcgcaaaagggtcgtatgctataaccaaaggcaggaagcgccaatgccagacacacatcggcgagagacacagtgcgatcatggggggtccacacgataaagtgcgcggcgacacgacccacacccggtaagcacattcgcggatacaccgtggcgatagcaccaacgtggacacatgagagacgagcacagtagcgtgagagaacctaacccatggaagcgagttgggcacagctttacccccatagagcaagcctccattcacacacagataagcgaaaccaggacggcatcagcaaaacacagaacggacgaccagtgcccagggacgagcctagttagcaatattcacacaagaggagaaaggaagaggagaatggcagaacgatgcggctgcaagagagcatccccaccagaagacaccagggggagacagcccaacagtagacaaccgccgtgacacaggaagcgacaccccagcacagagcggagtccgacagacggccccgggctacccccacacagcggcagatcagacagcagtagaccacgtcgagcaacgccaagactcacaggagggcggcaagcaggagacagcagcaaacactcaggagcaagacaaagcagaagccactaccaagacagcgagacacagacacacaagacaagacgagcgcatacgacaagtgagagggacagccgagaagcact

SEQ ID NO: 648578 - DNA, 103 bp, Homo sapiens
cgtataacagcagtaacatgctgtagatgagggtctcaagcagcagatagtggcagtcggacacacccaccctccccatacaaggatagaagctgctggaatc

SEQ ID NO: 648579 - DNA, 131 bp, Homo sapiens
tgaaataacagcactccgtgatgtttcaggttgactgaatttgggattttttaagttttgccaaaatgtggtttcaatccagcttgatgccatcgtgaattaaagtactagtccttatgtttgcgtaacca

SEQ ID NO: 648580 - DNA, 2479 bp, Homo sapiens
ctgggtcatcggttccctggaaggagaaaaagctgccaattgaacggggcctcccggtcccaggaatgtcgcgacgcggggacgacgcatctcacgacgtcagcctgaaacacgcgggcctttcatcacccgagactcctccagcccaggagggccccgctctttcgcctgcctcctgggggagagcctctggacgacgcacgcgacagcgttttctccaaaaaaggcagagaagagaagcgtagcagtggccgcaagggcgacgggcggcgaagggtactacgcacgcccgcgtcggccacgcggagagatacgcccgactcgagtcccgcggcgcacgcccctagacgcccgaggtgcgcgggccacgcccctcgcccggccaagagcacgccccttccgtcgcccctcccgggggcgtttaccgttcctccccgccccggaagcgcgttcttacctccttcctcgcgagagttccgtgcaccggcacccagatcgcgcgagacagcggaaggagcaagagtgggaggcgcgcgcggaggccgcgacggacgcaagatggcgacggcgaccatagctctccaggtcaatggccagcaaggaggggggtccgagccggcggcggcggcggcagtggtggcagcgggagacaaatggaaacctccacagggcacagactccatcaagatggagaacgggcagagcacagccgccaagctggggctgcctcccctgacgcccgagcagcaggaggcccttcagaaggccaagaagtacgccatggagcagagcatcaagagtgtgctggtgaagcagaccatcgcgcaccagcagcagcagctcaccaacctgcagatggcagcagtgacaatgggctttggagatcctctctcacctttgcaatcgatggcggctcagcggcagcgggcgctggccatcatgtgccgcgtctacgtgggctctatctactatgagctgggggaggacaccatccgccaggcctttgccccctttggccccatcaagagcatcgacatgtcctgggactccgtcaccatgaagcacaagggctttgccttcgtggagtatgaggtccccgaagctgcacagctggccttggagcagatgaactcggtgatgctggggggcaggaacatcaaggtgggcagacccagcaacatagggcaggcccagcccatcatagaccagttggctgaggaggcacgggccttcaaccgcatctacgtggcctctgtgcaccaggacctctcagacgatgacatcaagagcgtgtttgaggcctttggcaagatcaagtcctgcacactggcccgggaccccacaactggcaagcacaagggctacggcttcattgagtacgagaaggcccagtcgtcccaagatgctgtgtcttccatgaacctctttgacctgggtggccagtacttgcgggtgggcaaggctgtcacaccgcccatgcccctactcacaccagccacgcctggaggcctcccacctgccgctgctgtggcagctgctgcagccactgccaagatcacagctcaggaagcagtggccggagcagcggtgctgggtaccctgggcacacctggactggtgtccccagcactgaccctggcccagcccctgggcactttgccccaggctgtcatggctgcccaggcacctggagtcatcacaggtgtgaccccagcccgtcctcctatcccggtcaccatcccctcggtgggagtggtgaaccccatcctggccagccctccaacgctgggtctcctggagcccaagaaggagaaggaagaagaggagctgtttcccgagtcagagcggccagagatgctgagcgagcaggagcacatgagcatctcgggcagtagcgcccgacacatggtgatgcagaagctgctccgcaagcaggagtctacagtgatggttctgcgcaacatggtggaccccaaggacatcgatgatgacctggaaggggaggtgacagaggagtgtggcaagttcggggccgtgaaccgcgtcatcatctaccaagagaaacaaggcgaggaggaggatgcagaaatcattgtcaagatctttgtggagttttccatagcctctgagactcataaggccatccaggccctcaatggccgctggtttgctggccgcaaggtggtggctgaagtgtacgaccaggagcgttttgataacagtgacctctctgcgtgacagtggtccctctccccggacttgcacttgttccttgtttcctctgggttttatagtgatacagtggtgtccccggggccaggcgcgctctgcccagcccagcctacagtgcggataaaggtgcggatgctgctggccctgaaaaaaaaaaaaatccttggcggcggttacaacgtcgtgcttgggaaacccttgcgtacccaattaattgcttgaagacatcccctttgccaggtgcggg

SEQ ID NO: 648581 - DNA, 2428 bp, Homo sapiens
ctgggtcatcggttccctggaaggagaaaaagctgccaattgaacggggcctcccggtcccaggaatgtcgcgacgcggggacgacgcatctcacgacgtcagcctgaaacacgcgggcctttcatcacccgagactcctccagcccaggagggccccgctctttcgcctgcctcctgggggagagcctctggacgacgcacgcgacagcgttttctccaaaaaaggcagagaagagaagcgtagcagtggccgcaagggcgacgggcggcgaagggtactacgcacgcccgcgtcggccacgcggagagatacgcccgactcgagtcccgcggcgcacgcccctagacgcccgaggtgcgcgggccacgcccctcgcccggccaagagcacgccccttccgtcgcccctcccgggggcgtttaccgttcctccccgccccggaagcgcgttcttacctccttcctcgcgagagttccgtgcaccggcacccagatcgcgcgagacagcggaaggagcaagagtgggaggcgcgcgcggaggccgcgacggacgcaagatggcgacggcgaccatagctctccaggtcaatggccagcaaggaggggggtccgagccggcggcggcggcggcagtggtggcagcgggagacaaatggaaacctccacagggcacagactccatcaagatggagaacgggcagagcacagccgccaagctggggctgcctcccctgacgcccgagcagcaggaggcccttcagaaggccaagaagtacgccatggagcagagcatcaagagtgtgctggtgaagcagaccatcgcgcaccagcagcagcagctcaccaacctgcagatggcggctcagcggcagcgggcgctggccatcatgtgccgcgtctacgtgggctctatctactatgagctgggggaggacaccatccgccaggcctttgccccctttggccccatcaagagcatcgacatgtcctgggactccgtcaccatgaagcacaagggctttgccttcgtggagtatgaggtccccgaagctgcacagctggccttggagcagatgaactcggtgatgctggggggcaggaacatcaaggtgggcagacccagcaacatagggcaggcccagcccatcatagaccagttggctgaggaggcacgggccttcaaccgcatctacgtggcctctgtgcaccaggacctctcagacgatgacatcaagagcgtgtttgaggcctttggcaagatcaagtcctgcacactggcccgggaccccacaactggcaagcacaagggctacggcttcattgagtacgagaaggcccagtcgtcccaagatgctgtgtcttccatgaacctctttgacctgggtggccagtacttgcgggtgggcaaggctgtcacaccgcccatgcccctactcacaccagccacgcctggaggcctcccacctgccgctgctgtggcagctgctgcagccactgccaagatcacagctcaggaagcagtggccggagcagcggtgctgggtaccctgggcacacctggactggtgtccccagcactgaccctggcccagcccctgggcactttgccccaggctgtcatggctgcccaggcacctggagtcatcacaggtgtgaccccagcccgtcctcctatcccggtcaccatcccctcggtgggagtggtgaaccccatcctggccagccctccaacgctgggtctcctggagcccaagaaggagaaggaagaagaggagctgtttcccgagtcagagcggccagagatgctgagcgagcaggagcacatgagcatctcgggcagtagcgcccgacacatggtgatgcagaagctgctccgcaagcaggagtctacagtgatggttctgcgcaacatggtggaccccaaggacatcgatgatgacctggaaggggaggtgacagaggagtgtggcaagttcggggccgtgaaccgcgtcatcatctaccaagagaaacaaggcgaggaggaggatgcagaaatcattgtcaagatctttgtggagttttccatagcctctgagactcataaggccatccaggccctcaatggccgctggtttgctggccgcaaggtggtggctgaagtgtacgaccaggagcgttttgataacagtgacctctctgcgtgacagtggtccctctccccggacttgcacttgttccttgtttcctctgggttttatagtgatacagtggtgtccccggggccaggcgcgctctgcccagcccagcctacagtgcggataaaggtgcggatgctgctggccctgaaaaaaaaaaaaatccttggcggcggttacaacgtcgtgcttgggaaacccttgcgtacccaattaattgcttgaagacatcccctttgccaggtgcggg

SEQ ID NO: 648582 - DNA, 1916 bp, Homo sapiens
agcggggcttgcggcctcagcttccggcctgcggaccccagcttccggcggggcggggcgggggcctgggcgcggcgtgtggcccttgcgggcgagcctggcggggttgcgttcctgtccgctagcaggtcaatggccagcaaggaggggggtccgagccggcggcggcggcggcagtggtggcagcgggagacaaatggaaacctccacagggcacagactccatcaagatggagaacgggcagagcacagccgccaagctggggctgcctcccctgacgcccgagcagcaggaggcccttcagaaggccaagaagtacgccatggagcagagcatcaagagtgtgctggtgaagcagaccatcgcgcaccagcagcagcagctcaccaacctgcagatggcagcagtgacaatgggctttggagatcctctctcacctttgcaatcgatggcggctcagcggcagcgggcgctggccatcatgtgccgcgtctacgtgggctctatctactatgagctgggggaggacaccatccgccaggcctttgccccctttggccccatcaagagcatcgacatgtcctgggactccgtcaccatgaagcacaagggctttgccttcgtggagtatgaggtccccgaagctgcacagctggccttggagcagatgaactcggtgatgctggggggcaggaacatcaaggtgggcagacccagcaacatagggcaggcccagcccatcatagaccagttggctgaggaggcacgggccttcaaccgcatctacgtggcctctgtgcaccaggacctctcagacgatgacatcaagagcgtgtttgaggcctttggcaagatcaagtcctgcacactggcccgggaccccacaactggcaagcacaagggctacggcttcattgagtacgagaaggcccagtcgtcccaagatgctgtgtcttccatgaacctctttgacctgggtggccagtacttgcgggtgggcaaggctgtcacaccgcccatgcccctactcacaccagccacgcctggaggcctcccacctgccgctgctgtggcagctgctgcagccactgccaagatcacagctcaggaagcagtggccggagcagcggtgctgggtaccctgggcacacctggactggtgtccccagcactgaccctggcccagcccctgggcactttgccccaggctgtcatggctgcccaggcacctggagtcatcacaggtgtgaccccagcccgtcctcctatcccggtcaccatcccctcggtgggagtggtgaaccccatcctggccagccctccaacgctgggtctcctggagcccaagaaggagaaggaagaagaggagctgtttcccgagtcagagcggccagagatgctgagcgagcaggagcacatgagcatctcgggcagtagcgcccgacacatggtgatgcagaagctgctccgcaagcaggagtctacagtgatggttctgcgcaacatggtggaccccaaggacatcgatgatgacctggaaggggaggtgacagaggagtgtggcaagttcggggccgtgaaccgcgtcatcatctaccaagagaaacaaggcgaggaggaggatgcagaaatcattgtcaagatctttgtggagttttccatagcctctgagactcataaggccatccaggccctcaatggccgctggtttgctggccgcaaggtggtggctgaagtgtacgaccaggagcgttttgataacagtgacctctctgcgtgacagtggtccctctccccggacttgcacttgttccttgtttcctctgggttttatagtgatacagtggtgtccccggggccaggcgcgctctgcccagcccagcctacagtgcggataaaggtgcggatgctgctg

SEQ ID NO: 648583 - DNA, 2373 bp, Homo sapiens
ctgggtcatcggttccctggaaggagaaaaagctgccaattgaacggggcctcccggtcccaggaatgtcgcgacgcggggacgacgcatctcacgacgtcagcctgaaacacgcgggcctttcatcacccgagactcctccagcccaggagggccccgctctttcgcctgcctcctgggggagagcctctggacgacgcacgcgacagcgttttctccaaaaaaggcagagaagagaagcgtagcagtggccgcaagggcgacgggcggcgaagggtactacgcacgcccgcgtcggccacgcggagagatacgcccgactcgagtcccgcggcgcacgcccctagacgcccgaggtgcgcgggccacgcccctcgcccggccaagagcacgccccttccgtcgcccctcccgggggcgtttaccgttcctccccgccccggaagcgcgttcttacctccttcctcgcgagagttccgtgcaccggcacccagatcgcgcgagacagcggaaggagcaagagtgggaggcgcgcgcggaggccgcgacggacgcaagatggcgacggcgaccatagctctccaggtcaatggccagcaaggaggggggtccgagccggcggcggcggcggcagtggtggcagcgggagacaaatggaaacctccacagggcacagactccatcaagatggagaacgggcagagcacagccgccaagctggggctgcctcccctgacgcccgagcagcaggaggcccttcagaaggccaagaagtacgccatggagcagagcatcaagagtgtgctggtgaagcagaccatcgcgcaccagcagcagcagctcaccaacctgcagatggcagcagtgacaatgggctttggagatcctctctcacctttgcaatcgatggcggctcagcggcagcgggcgctggccatcatgtgccgcgtctacgtgggctctatctactatgagctgggggaggacaccatccgccaggcctttgccccctttggccccatcaagagcatcgacatgtcctgggactccgtcaccatgaagcacaagggctttgccttcgtggagtatgaggtccccgaagctgcacagctggccttggagcagatgaactcggtgatgctggggggcaggaacatcaaggtgggcagacccagcaacatagggcaggcccagcccatcatagaccagttggctgaggaggcacgggccttcaaccgcatctacgtggcctctgtgcaccaggacctctcagacgatgacatcaagagcgtgtttgaggcctttggcaagatcaagtcctgcacactggcccgggaccccacaactggcaagcacaagggctacggcttcattgagtacgagaaggcccagtcgtcccaagatgctgtgtcttccatgaacctctttgacctgggtggccagtacttgcgggtgggcaaggctgtcacaccgcccatgcccctactcacaccagccacgcctggaggcctcccacctgccgctgctgtggcagctgctgcagccactgccaagatcacagctcaggaagcagtggccggagcagcggtgctgggtaccctgggcacacctggactggtgtccccagcactgaccctggcccagcccctgggcactttgccccaggctgtcatggctgcccaggcacctggagtcatcacaggtgtgaccccagcccgtcctcctatcccggtcaccatcccctcggtgggagtggtgaaccccatcctggccagccctccaacgctgggtctcctggagcccaagaaggagaaggaagaagaggagctgtttcccgagtcagagcggccagagatgctgagcgagcaggagcacatgagcatctcgggcagtagcgcccgacacatggtgatgcagaagctgctccgcaagcaggagtctacagtgatggttctgcgcaacatggtggaccccaaggacatcgatgatgacctggaaggggaggtgacagaggagtgtggcaagttcggggccgtgaaccgcgtcatcatctaccaagagaaacaaggcgaggaggaggatgcagaaatcattgtcaagatctttgtggagttttccatagcctctgagactcataaggccatccaggccctcaatggccgctggtttgctggccgcaaggtggtggctgaagtgtacgaccaggagcgttttgataacagtgacctctctgcgtgacagtggtccctctccccggacttgcacttgttccttgtttcctctgggttttatagtgatacagtggtgtccccggggccaggcgcgctctgcccagcccagcctacagtgcggataaaggtgcggatgctgctg

SEQ ID NO: 648584 - DNA, 412 bp, Homo sapiens
  misc_feature (33)..(33): n is a, c, g, or t
aatgataaattgagctctgtacctgtgtgtagnagtactagggatcagttgcatgtggtaagccatttaccatgattgttgtaggttaagaagggcagattattagagaaagttgtgaaacatatgttgcagtgggcagctcatcatagaaggggctacctgcaaggaggcaaggtgctggaggatagtcttatagggtcctgtgtaagggtgttatctgtgaaatgaggtcattgtgcccgcaggttgtttgtgattagctgtctctaacaattgttcatacaataattgttcattattgttctcaacttggggctctccccaacctggggacccttccttattgttgcttacttatcaggtctccacataaaggtgtggaaacttcattcattcatatcttcaacacaaa

SEQ ID NO: 648585 - DNA, 138 bp, Homo sapiens
ttgtccgctcggtacctgtattgtctgacttgaaatacactaagtaatcctgcaatgcatgctggtgtcatgtgacaccagtgcctggaatcacacctctgtccagcaggcacttgtctcagtgtgagtgcagttagt

SEQ ID NO: 648586 - DNA, 2887 bp, Homo sapiens
ctgggtcatcggttccctggaaggagaaaaagctgccaattgaacggggcctcccggtcccaggaatgtcgcgacgcggggacgacgcatctcacgacgtcagcctgaaacacgcgggcctttcatcacccgagactcctccagcccaggagggccccgctctttcgcctgcctcctgggggagagcctctggacgacgcacgcgacagcgttttctccaaaaaaggcagagaagagaagcgtagcagtggccgcaagggcgacgggcggcgaagggtactacgcacgcccgcgtcggccacgcggagagatacgcccgactcgagtcccgcggcgcacgcccctagacgcccgaggtgcgcgggccacgcccctcgcccggccaagagcacgccccttccgtcgcccctcccgggggcgtttaccgttcctccccgccccggaagcgcgttcttacctccttcctcgcgagagttccgtgcaccggcacccagatcgcgcgagacagcggaaggagcaagagtgggaggcgcgcgcggaggccgcgacggacgcaagatggcgacggcgaccatagctctccaggtcaatggccagcaaggaggggggtccgagccggcggcggcggcggcagtggtggcagcgggagacaaatggaaacctccacagggcacagactccatcaagatggagaacgggcagagcacagccgccaagctggggctgcctcccctgacgcccgagcagcaggaggcccttcagaaggccaagaagtacgccatggagcagagcatcaagagtgtgctggtgaagcagaccatcgcgcaccagcagcagcagctcaccaacctgcagatggcagcagtgacaatgggctttggagatcctctctcacctttgcaatcgatggcggctcagcggcagcgggcgctggccatcatgtgccgcgtctacgtgggctctatctactatgagctgggggaggacaccatccgccaggcctttgccccctttggccccatcaagagcatcgacatgtcctgggactccgtcaccatgaagcacaagggctttgccttcgtggagtatgaggtccccgaagctgcacagctggccttggagcagatgaactcggtgatgctggggggcaggaacatcaaggtgggcagacccagcaacatagggcaggcccagcccatcatagaccagttggctgaggaggcacgggccttcaaccgcatctacgtggcctctgtgcaccaggacctctcagacgatgacatcaagagcgtgtttgaggcctttggcaagatcaagtcctgcacactggcccgggaccccacaactggcaagcacaagggctacggcttcattgagtacgagaaggcccagtcgtcccaagatgctgtgtcttccatgaacctctttgacctgggtggccagtacttgcgggtgggcaaggctgtcacaccgcccatgcccctactcacaccagccacgcctggaggcctcccacctgccgctgctgtggcagctgctgcagccactgccaagatcacagctcaggaagcagtggccggagcagcggtgctgggtaccctgggcacacctggactggtgtccccagcactgaccctggcccagcccctgggcactttgccccaggctgtcatggctgcccaggcacctggagtcatcacaggtgtgaccccagcccgtcctcctatcccggtcaccatcccctcggtgggagtggtgaaccccatcctggccagccctccaacgctgggtctcctggagcccaagaaggagaaggaagaagaggagctgtttcccgagtcagagcggccagagatgctgagcgagcaggagcacatgagcatctcgggcagtagcgcccgacacatggtgatgcagaagctgctccgcaagcaggagtctacagtgatggttctgcgcaacatggtggaccccaaggacatcgatgatgacctggaaggggaggtgacagaggagtgtggcaagttcggggccgtgaaccgcgtcatcatctaccaagagaaacaaggcgaggaggaggatgcagaaatcattgtcaagatctttgtggagttttccatagcctctgagactcataaggccatccaggccctcaatggccgctggtttgctggccgcaaggtggtggctgaagtgtacgaccaggagcgttttgataacagtgacctctctgcgtgacagtggtccctctccccggacttgcacttgttccttgtttcctctgggttttatagtgatacagtggtgtccccggggccaggcgcgctctgcccagcccagcctacagtgcggataaaggtgcggatgctgctggccctgaaaaaatcacgataactggcaagaagacgtgcttagtgctcaggaagcgaacaagcgtcgggcgaagtgcggacgaagaccgaaggaaggggggagcccgtgaggcggaggggaatgactggtccgaagtgggcgaggaagtagaattcccgacaggagggggcgaggacgtggagggggggggccaggtagtatccataggagggctccgcggttacaacaaagccagactggccgggggagaggccaagcaaagaatggcacccgacatggagggcgggggaaagccgggggcgacaaggggacggcaaaacaaggggcttcaggcgggccaacagcgggaaataaacagccgcgcgcacgaccgcgggaaaatgccgggacaaaagcacgcggaggggaaacaccatggccacgggcgcaaggccccgcggaaaattacaagcctcaacaatagaggaaagaccacgggacagaactatcaggcacgacaataaagactacagcg

SEQ ID NO: 648587 - DNA, 1199 bp, Homo sapiens
  misc_feature (819)..(819): n is a, c, g, or t
agaggggcgttcccctttactatttgtctctcgggggtatcccggggccagaacacccgggtctttgtgggggcccggagggccatttgtacctgcccgggcctttgggggatatcccccgaggagtggtttgttgccccacctggggggccccccccgatgtacacttggcgccgctggacacggtgtgttgacgcgcgggggcgcccctcggtttttcttcggggggggccgggaactttccacgggacccagaccaccaccgcggggtgccctaaccattcggcccccaattcgagggtggagcttgacacccaggctggaccagcccctaggtttgctaccggcgcccgcccctttgtttttctcgccgtcgggttcgcgctcccacggggcttcacagcttgtgccttgagatatgccccccccgggcccaccgcttatgcgctcgaaattggctggtgtcacccctaaacccaccgggctctccgcgtgttttcccacacacgcgccctgtggagaaacttgagatttggagcccctccccacacggggtggccacccacacacgccacagtccacagcccctctctcttataaggagagaaatagggtgtagacccgaaatcacccgcggagaagaaccctcgagtaggggcgcggagatatcattcactttcccacaggtcttggggaaccctctcacaagaaaggaaggggccacaggtggtgaactccacggtgggcctctatatgggggggttatatgatatggggataaggcacagtgcctcttgccacattgtgagaggctcccgnggagagcgtctccaacactcttatatggcataatgtgtgaatggctaaccctataccggcgagaaggcactgagcccacaggagaagagagttgttttcgcacacattctaactgccacacatgctcttcgctttggcccatggaggcgggagtggctccacgtggagaggagagtgaatccccctggcacagcccattgcacgaagttccaggggtatgaagccgccaagtatacttttgggagagagaccccgagatataccccaaatttgcccttgccacacctttacccccccccctgtgatcctgggattttagtatgccataagagatgcccctgtactgatgcccaaattttataaagtttgtccccgagtga

SEQ ID NO: 648588 - DNA, 898 bp, Homo sapiens
gtgcctgggcagactgtgtcacagagctgctatctcaagtgcaggccctgtggccgtcgaaacatcaagtacccccatagcctccagcaccacgtccattgtgctcccggccatctgcagaggcagcagcattgtggtaccgtcacttctggctcatccgtctttgctcagcctcctgcatgccagttctagctcagctttcaaccaggtcaccaacaacacagcactgcccccatctgccacgccgtgttgggcgcaagtggcagcccagcaccgaaccaagtctgtttgggccagcagactggtagcacagccagcaagcagtgccacaccaacaggtcagcaacctcagggtttagcagcccagctttggtaccacagccccagggtcttctggacaagacaacctttcgtggcaggcctcagtcttgtgggcagtcggagaagcagtgctgcaagtgtcttttgcttcagttcagcctgggttcagttccgtgcctgctttcggtcaagcctgttcctccaattcccacatccaccagggcaagtgtctttggggccgctcaagtaccaggagcttccagtccctctcatggggcgacgcctctcccaacaacaggagacggctggtgggccacggaacggccctgcttggggcgagcaggtcggacaaggacgcccgctggtggacccagtgcaccaaagccagcaccttggtccggcttggcaagccacgtaggcagaaacggccgtgtggccacaccgatcgcggaagtgggccaacacctcagaacacggggccacacacagggtcccggcggacaccggcacaacccatcggggggggcaacacacaacaaaggcagtcgggggtcgacaccctgtggcacacctctcg

SEQ ID NO: 648589 - DNA, 2438 bp, Homo sapiens
ctgggtcatcggttccctggaaggagaaaaagctgccaattgaacggggcctcccggtcccaggaatgtcgcgacgcggggacgacgcatctcacgacgtcagcctgaaacacgcgggcctttcatcacccgagactcctccagcccaggagggccccgctctttcgcctgcctcctgggggagagcctctggacgacgcacgcgacagcgttttctccaaaaaaggcagagaagagaagcgtagcagtggccgcaagggcgacgggcggcgaagggtactacgcacgcccgcgtcggccacgcggagagatacgcccgactcgagtcccgcggcgcacgcccctagacgcccgaggtgcgcgggccacgcccctcgcccggccaagagcacgccccttccgtcgcccctcccgggggcgtttaccgttcctccccgccccggaagcgcgttcttacctccttcctcgcgagagttccgtgcaccggcacccagatcgcgcgagacagcggaaggagcaagagtgggaggcgcgcgcggaggccgcgacggacgcaagatggcgacggcgaccatagctctccaggtcaatggccagcaaggaggggggtccgagccggcggcggcggcggcagtggtggcagcgggagacaaatggaaacctccacagggcacagactccatcaagatggagaacgggcagagcacagccgccaagctggggctgcctcccctgacgcccgagcagcaggaggcccttcagaaggccaagaagtacgccatggagcagagcatcaagagtgtgctggtgaagcagaccatcgcgcaccagcagcagcagctcaccaacctgcagatggcagcagtgacaatgggctttggagatcctctctcacctttgcaatcgatggcggctcagcggcagcgggcgctggccatcatgtgccgcgtctacgtgggctctatctactatgagctgggggaggacaccatccgccaggcctttgccccctttggccccatcaagagcatcgacatgtcctgggactccgtcaccatgaagcacaagggctttgccttcgtggagtatgaggtccccgaagctgcacagctggccttggagcagatgaactcggtgatgctggggggcaggaacatcaaggtgggcagacccagcaacatagggcaggcccagcccatcatagaccagttggctgaggaggcacgggccttcaaccgcatctacgtggcctctgtgcaccaggacctctcagacgatgacatcaagagcgtgtttgaggcctttggcaagatcaagtcctgcacactggcccgggaccccacaactggcaagcacaagggctacggcttcattgagtacgagaaggcccagtcgtcccaagatgctgtgtcttccatgaacctctttgacctgggtggccagtacttgcgggtgggcaaggctgtcacaccgcccatgcccctactcacaccagccacgcctggaggcctcccacctgccgctgctgtggcagctgctgcagccactgccaagatcacagctcaggaagcagtggccggagcagcggtgctgggtaccctgggcacacctggactggtgtccccagcactgaccctggcccagcccctgggcactttgccccaggctgtcatggctgcccaggcacctggagtcatcacaggtgtgaccccagcccgtcctcctatcccggtcaccatcccctcggtgggagtggtgaaccccatcctggccagccctccaacgctgggtctcctggagcccaagaaggagaaggaagaagaggagctgtttcccgagtcagagcggccagagatgctgagcgagcaggagcacatgagcatctcgggcagtagcgcccgacacatggtgatgcagaagctgctccgcaagcaggagtctacagtgatggttctgcgcaacatggtggaccccaaggacatcgatgatgacctggaaggggaggtgacagaggagtgtggcaagttcggggccgtgaaccgcgtcatcatctaccaagagaaacaaggcgaggaggaggatgcagaaatcattgtcaagatctttgtggagttttccatagcctctgagactcataaggccatccaggccctcaatggccgctggtttgctggccgcaaggtggtggctgaagtgtacgaccaggagcgttttgataacagtgacctctctgcgtgacagtggtccctctccccggacttgcacttgttccttgtttcctctgggttttatagtgatacagtggtgtccccggggccaggcgcgctctgcccagcccagcctacagtgcggataaaggtgcggatgctgctgggcaaaaaacaaataaccacagtccaggatacagtcatcacacgacactcaaacacaccaccgcg

SEQ ID NO: 648590 - DNA, 357 bp, Homo sapiens
ctactaattccgttgcccgtcggactgtctgtggcgtgtaccgtgtgtggtgcttagtgtgtagtgtgtggtgtgtgtagtgtgtggtgtgtaccgtgtgtggtgtgtagtgtgtgtggtgtgtagtgtggtgcgtgtgtagtgtggtatgtgtgtagtgtgtgtggcgtgtagtgtgtagtgtggtgtgtgtgtagtgtgtggtgtgtactgtgtagtgtggtgtgtgtgtagtgtgtggtgtgtagtgtgtagtgtcgtatgtgtctagtgtgtggcgtgtagtatgtgtggtgtgtagtgtgtagtgtggtgtgtgtgtggagtgtgtggtgtgtggagtgtgtggagtgtgtg

SEQ ID NO: 648591 - DNA, 2562 bp, Homo sapiens
ctgggtcatcggttccctggaaggagaaaaagctgccaattgaacggggcctcccggtcccaggaatgtcgcgacgcggggacgacgcatctcacgacgtcagcctgaaacacgcgggcctttcatcacccgagactcctccagcccaggagggccccgctctttcgcctgcctcctgggggagagcctctggacgacgcacgcgacagcgttttctccaaaaaaggcagagaagagaagcgtagcagtggccgcaagggcgacgggcggcgaagggtactacgcacgcccgcgtcggccacgcggagagatacgcccgactcgagtcccgcggcgcacgcccctagacgcccgaggtgcgcgggccacgcccctcgcccggccaagagcacgccccttccgtcgcccctcccgggggcgtttaccgttcctccccgccccggaagcgcgttcttacctccttcctcgcgagagttccgtgcaccggcacccagatcgcgcgagacagcggaaggagcaagagtgggaggcgcgcgcggaggccgcgacggacgcaagatggcgacggcgaccatagctctccaggtcaatggccagcaaggaggggggtccgagccggcggcggcggcggcagtggtggcagcgggagacaaatggaaacctccacagggcacagactccatcaagatggagaacgggcagagcacagccgccaagctggggctgcctcccctgacgcccgagcagcaggaggcccttcagaaggccaagaagtacgccatggagcagagcatcaagagtgtgctggtgaagcagaccatcgcgcaccagcagcagcagctcaccaacctgcagatggcagcagtgacaatgggctttggagatcctctctcacctttgcaatcgatggcggctcagcggcagcgggcgctggccatcatgtgccgcgtctacgtgggctctatctactatgagctgggggaggacaccatccgccaggcctttgccccctttggccccatcaagagcatcgacatgtcctgggactccgtcaccatgaagcacaagggctttgccttcgtggagtatgaggtccccgaagctgcacagctggccttggagcagatgaactcggtgatgctggggggcaggaacatcaaggtgggcagacccagcaacatagggcaggcccagcccatcatagaccagttggctgaggaggcacgggccttcaaccgcatctacgtggcctctgtgcaccaggacctctcagacgatgacatcaagagcgtgtttgaggcctttggcaagatcaagtcctgcacactggcccgggaccccacaactggcaagcacaagggctacggcttcattgagtacgagaaggcccagtcgtcccaagatgctgtgtcttccatgaacctctttgacctgggtggccagtacttgcgggtgggcaaggctgtcacaccgcccatgcccctactcacaccagccacgcctggaggcctcccacctgccgctgctgtggcagctgctgcagccactgccaagatcacagctcaggaagcagtggccggagcagcggtgctgggtaccctgggcacacctggactggtgtccccagcactgaccctggcccagcccctgggcactttgccccaggctgtcatggctgcccaggcacctggagtcatcacaggtgtgaccccagcccgtcctcctatcccggtcaccatcccctcggtgggagtggtgaaccccatcctggccagccctccaacgctgggtctcctggagcccaagaaggagaaggaagaagaggagctgtttcccgagtcagagcggccagagatgctgagcgagcaggagcacatgagcatctcgggcagtagcgcccgacacatggtgatgcagaagctgctccgcaagcaggagtctacagtgatggttctgcgcaacatggtggaccccaaggacatcgatgatgacctggaaggggaggtgacagaggagtgtggcaagttcggggccgtgaaccgcgtcatcatctaccaagagaaacaaggcgaggaggaggatgcagaaatcattgtcaagatctttgtggagttttccatagcctctgagactcataaggccatccaggccctcaatggccgctggtttgctggccgcaaggtggtggctgaagtgtacgaccaggagcgttttgataacagtgacctctctgcgtgacagtggtccctctccccggacttgcacttgttccttgtttcctctgggttttatagtgatacagtggtgtccccggggccaggcgcgctctgcccagcccagcctacagtgcggataaaggtgcggatgctgctggccctgtacttaaaatcacccctccagaagaagtggatgaaacagtgctgaagattagggtgggtcgtgcagaaggaagggtttgaaaggggaccaggtaacatgggtgttgcaccagttttctttataacagggaggaaagcgggggcaaaagtaggaggttaaatatcgaagcggacagcgaagaaa

SEQ ID NO: 648592 - DNA, 2237 bp, Homo sapiens
taggtctcaaggcccttccatcatctcccgacccccacaggcgttacccgtttcctgcccgtggctgtctttgccctgccatccctcaagaccatagtggagctgctcctccttcctgtgcccccttaggtgtgggtcttactgagtgcagagggctaacctcttggcgtcctcctgcgagacagctctggatggttctgtgccaggaagggaggcctgcgcatccagacccctgcccaccatgctgcttaaaagtgtcttcaggagagaactgggacctgggctgggccagagcctgtggaaggcactggagctggggctgagttgtgggctggccaagcaggtcaatggccagcaaggaggggggtccgagccggcggcggcggcggcagtggtggcagcgggagacaaatggaaacctccacagggcacagactccatcaagatggagaacgggcagagcacagccgccaagctggggctgcctcccctgacgcccgagcagcaggaggcccttcagaaggccaagaagtacgccatggagcagagcatcaagagtgtgctggtgaagcagaccatcgcgcaccagcagcagcagctcaccaacctgcagatggcagcagtgacaatgggctttggagatcctctctcacctttgcaatcgatggcggctcagcggcagcgggcgctggccatcatgtgccgcgtctacgtgggctctatctactatgagctgggggaggacaccatccgccaggcctttgccccctttggccccatcaagagcatcgacatgtcctgggactccgtcaccatgaagcacaagggctttgccttcgtggagtatgaggtccccgaagctgcacagctggccttggagcagatgaactcggtgatgctggggggcaggaacatcaaggtgggcagacccagcaacatagggcaggcccagcccatcatagaccagttggctgaggaggcacgggccttcaaccgcatctacgtggcctctgtgcaccaggacctctcagacgatgacatcaagagcgtgtttgaggcctttggcaagatcaagtcctgcacactggcccgggaccccacaactggcaagcacaagggctacggcttcattgagtacgagaaggcccagtcgtcccaagatgctgtgtcttccatgaacctctttgacctgggtggccagtacttgcgggtgggcaaggctgtcacaccgcccatgcccctactcacaccagccacgcctggaggcctcccacctgccgctgctgtggcagctgctgcagccactgccaagatcacagctcaggaagcagtggccggagcagcggtgctgggtaccctgggcacacctggactggtgtccccagcactgaccctggcccagcccctgggcactttgccccaggctgtcatggctgcccaggcacctggagtcatcacaggtgtgaccccagcccgtcctcctatcccggtcaccatcccctcggtgggagtggtgaaccccatcctggccagccctccaacgctgggtctcctggagcccaagaaggagaaggaagaagaggagctgtttcccgagtcagagcggccagagatgctgagcgagcaggagcacatgagcatctcgggcagtagcgcccgacacatggtgatgcagaagctgctccgcaagcaggagtctacagtgatggttctgcgcaacatggtggaccccaaggacatcgatgatgacctggaaggggaggtgacagaggagtgtggcaagttcggggccgtgaaccgcgtcatcatctaccaagagaaacaaggcgaggaggaggatgcagaaatcattgtcaagatctttgtggagttttccatagcctctgagactcataaggccatccaggccctcaatggccgctggtttgctggccgcaaggtggtggctgaagtgtacgaccaggagcgttttgataacagtgacctctctgcgtgacagtggtccctctccccggacttgcacttgttccttgtttcctctgggttttatagtgatacagtggtgtccccggggccaggcgcgctctgcccagcccagcctacagtgcggataaaggtgcggatgctgctggccctgaaaaaaaaaaaaatccttggcggcggttacaacgtcgtgcttgggaaacccttgcgtacccaattaattgcttgaagacatcccctttgccaggtgcggg

SEQ ID NO: 648593 - DNA, 297 bp, Homo sapiens
aattgggtctgggtggttgaggctagcagtgagcatgatcctgtgactacgctcagcccaggggacagagtgagtctagtatctaccgaaaaaaagaaagaaaggccccttcaattctaactcatgacaaataaatactattaactacggctcctgtgtagagttgcctgtgaatatacagaactcccccaggtacaggggaaccactgtatggtctaggaaggcgtcacgcgtgcagaaatttcaagtcttccttattgccaactcagatttcaagcccagctttgaaaatgataa

SEQ ID NO: 648594 - DNA, 368 bp, Homo sapiens
ttttttgagatggagtgtcgctctgtcacccaggctgcagtgcgtggtgctatcttggctcactgcaacctccacctctggggttcaagcaattctcctgcttcagcctcacaagtacctgggattacaagcctgaaccaccacgcgtgctaatttttttgtatttttagtagagacggggtttcaccatgttggtcaggctggtctcgaactcctggcctcaggtgatccacctgcctgggcctcccaaagtgctaggattacaggcatgagccactgcgcccggctctacattttttgctgagtggtaacatattgtagtgggtaaaagaaattgagacaaagaagcgttcttgtcagtttgaagt

SEQ ID NO: 648595 - DNA, 2022 bp, Homo sapiens
agcggggcttgcggcctcagcttccggcctgcggaccccagcttccggcggggcggggcgggggcctgggcgcggcgtgtggcccttgcgggcgagcctggcggggttgcgttcctgtccgctagcaggtcaatggccagcaaggaggggggtccgagccggcggcggcggcggcagtggtggcagcgggagacaaatggaaacctccacagggcacagactccatcaagatggagaacgggcagagcacagccgccaagctggggctgcctcccctgacgcccgagcagcaggaggcccttcagaaggccaagaagtacgccatggagcagagcatcaagagtgtgctggtgaagcagaccatcgcgcaccagcagcagcagctcaccaacctgcagatggcagcagtgacaatgggctttggagatcctctctcacctttgcaatcgatggcggctcagcggcagcgggcgctggccatcatgtgccgcgtctacgtgggctctatctactatgagctgggggaggacaccatccgccaggcctttgccccctttggccccatcaagagcatcgacatgtcctgggactccgtcaccatgaagcacaagggctttgccttcgtggagtatgaggtccccgaagctgcacagctggccttggagcagatgaactcggtgatgctggggggcaggaacatcaaggtgggcagacccagcaacatagggcaggcccagcccatcatagaccagttggctgaggaggcacgggccttcaaccgcatctacgtggcctctgtgcaccaggacctctcagacgatgacatcaagagcgtgtttgaggcctttggcaagatcaagtcctgcacactggcccgggaccccacaactggcaagcacaagggctacggcttcattgagtacgagaaggcccagtcgtcccaagatgctgtgtcttccatgaacctctttgacctgggtggccagtacttgcgggtgggcaaggctgtcacaccgcccatgcccctactcacaccagccacgcctggaggcctcccacctgccgctgctgtggcagctgctgcagccactgccaagatcacagctcaggaagcagtggccggagcagcggtgctgggtaccctgggcacacctggactggtgtccccagcactgaccctggcccagcccctgggcactttgccccaggctgtcatggctgcccaggcacctggagtcatcacaggtgtgaccccagcccgtcctcctatcccggtcaccatcccctcggtgggagtggtgaaccccatcctggccagccctccaacgctgggtctcctggagcccaagaaggagaaggaagaagaggagctgtttcccgagtcagagcggccagagatgctgagcgagcaggagcacatgagcatctcgggcagtagcgcccgacacatggtgatgcagaagctgctccgcaagcaggagtctacagtgatggttctgcgcaacatggtggaccccaaggacatcgatgatgacctggaaggggaggtgacagaggagtgtggcaagttcggggccgtgaaccgcgtcatcatctaccaagagaaacaaggcgaggaggaggatgcagaaatcattgtcaagatctttgtggagttttccatagcctctgagactcataaggccatccaggccctcaatggccgctggtttgctggccgcaaggtggtggctgaagtgtacgaccaggagcgttttgataacagtgacctctctgcgtgacagtggtccctctccccggacttgcacttgttccttgtttcctctgggttttatagtgatacagtggtgtccccggggccaggcgcgctctgcccagcccagcctacagtgcggataaaggtgcggatgctgctggccctgaaaaaaaaaaaaatccttggcggcggttacaacgtcgtgcttgggaaacccttgcgtacccaattaattgcttgaagacatcccctttgccaggtgcggg

SEQ ID NO: 648596 - DNA, 786 bp, Homo sapiens
atgaccccaatacgcaaaattaaccccctaataaaattaattaactcactcattcatcgatactccccaaccgccatccaagcgatctccgcatgatgaaacttcggttcactccttggcgcctgtctgatcctccaaatcaccagaggactattcctagaccatgacactattcaccagacgcctcaaccgccttttccatcaatcgcccacatcactcgagacgtaaagtatatggctgaagtcatccgcgtagccttcatcgccaatggcgcctcagagtattctttatctgcctcttcctacacatcgggcgaggcctatattcacggatcatatctctactcagaatacctgaaagccatcggctattatcctctctgccttgcaagtatagcaaacatgccgttcatatggctatgtcctcccgtgaggccaaatatcgattctgaggggccacatggtaattgacacaatttactatccgccatcccatacaattgtggacagacctagttcccttgaatctgaggaggctactcagaagacagtcaccacgctcatacgattcttgtacctttcaccttcgtcttgcccttcattgattgcagtcctagcagaactccatccctcctatactgtgcatcgaaacgggatcgaactaatccccctaggaatcaccttcccattccgataaaaatcaccttccaaccttagtacagcaatcaaagaagcccttcgggttattctcttccttctctctttaatgacataaccactattctc

SEQ ID NO: 648597 - DNA, 132 bp, Homo sapiens
  misc_feature (43)..(43): n is a, c, g, or t
actgtctgattctagaggatcccaatgcagcggaatcgtgaanctggagttgcttacctgcccacaggtctgaccacagtgaaggggacggctgggcagagcactgaaggatggggagcaggcaggggcacc

SEQ ID NO: 648598 - DNA, 2392 bp, Homo sapiens
ctgggtcatcggttccctggaaggagaaaaagctgccaattgaacggggcctcccggtcccaggaatgtcgcgacgcggggacgacgcatctcacgacgtcagcctgaaacacgcgggcctttcatcacccgagactcctccagcccaggagggccccgctctttcgcctgcctcctgggggagagcctctggacgacgcacgcgacagcgttttctccaaaaaaggcagagaagagaagcgtagcagtggccgcaagggcgacgggcggcgaagggtactacgcacgcccgcgtcggccacgcggagagatacgcccgactcgagtcccgcggcgcacgcccctagacgcccgaggtgcgcgggccacgcccctcgcccggccaagagcacgccccttccgtcgcccctcccgggggcgtttaccgttcctccccgccccggaagcgcgttcttacctccttcctcgcgagagttccgtgcaccggcacccagatcgcgcgagacagcggaaggagcaagagtgggaggcgcgcgcggaggccgcgacggacgcaagatggcgacggcgaccatagctctcggcacagactccatcaagatggagaacgggcagagcacagccgccaagctggggctgcctcccctgacgcccgagcagcaggaggcccttcagaaggccaagaagtacgccatggagcagagcatcaagagtgtgctggtgaagcagaccatcgcgcaccagcagcagcagctcaccaacctgcagatggcagcagtgacaatgggctttggagatcctctctcacctttgcaatcgatggcggctcagcggcagcgggcgctggccatcatgtgccgcgtctacgtgggctctatctactatgagctgggggaggacaccatccgccaggcctttgccccctttggccccatcaagagcatcgacatgtcctgggactccgtcaccatgaagcacaagggctttgccttcgtggagtatgaggtccccgaagctgcacagctggccttggagcagatgaactcggtgatgctggggggcaggaacatcaaggtgggcagacccagcaacatagggcaggcccagcccatcatagaccagttggctgaggaggcacgggccttcaaccgcatctacgtggcctctgtgcaccaggacctctcagacgatgacatcaagagcgtgtttgaggcctttggcaagatcaagtcctgcacactggcccgggaccccacaactggcaagcacaagggctacggcttcattgagtacgagaaggcccagtcgtcccaagatgctgtgtcttccatgaacctctttgacctgggtggccagtacttgcgggtgggcaaggctgtcacaccgcccatgcccctactcacaccagccacgcctggaggcctcccacctgccgctgctgtggcagctgctgcagccactgccaagatcacagctcaggaagcagtggccggagcagcggtgctgggtaccctgggcacacctggactggtgtccccagcactgaccctggcccagcccctgggcactttgccccaggctgtcatggctgcccaggcacctggagtcatcacaggtgtgaccccagcccgtcctcctatcccggtcaccatcccctcggtgggagtggtgaaccccatcctggccagccctccaacgctgggtctcctggagcccaagaaggagaaggaagaagaggagctgtttcccgagtcagagcggccagagatgctgagcgagcaggagcacatgagcatctcgggcagtagcgcccgacacatggtgatgcagaagctgctccgcaagcaggagtctacagtgatggttctgcgcaacatggtggaccccaaggacatcgatgatgacctggaaggggaggtgacagaggagtgtggcaagttcggggccgtgaaccgcgtcatcatctaccaagagaaacaaggcgaggaggaggatgcagaaatcattgtcaagatctttgtggagttttccatagcctctgagactcataaggccatccaggccctcaatggccgctggtttgctggccgcaaggtggtggctgaagtgtacgaccaggagcgttttgataacagtgacctctctgcgtgacagtggtccctctccccggacttgcacttgttccttgtttcctctgggttttatagtgatacagtggtgtccccggggccaggcgcgctctgcccagcccagcctacagtgcggataaaggtgcggatgctgctggccctgaaaaaaaaaaaaatccttggcggcggttacaacgtcgtgcttgggaaacccttgcgtacccaattaattgcttgaagacatcccctttgccaggtgcggg

SEQ ID NO: 648599 - DNA, 126 bp, Homo sapiens
attctcctcattgcctgagtgactgtgatcagtcgactacggattgagctctgagtatcagattgacgacgaacatatgtgccatggccattaagtgttacacaaccatactagtatccttcttcc

SEQ ID NO: 648600 - DNA, 252 bp, Homo sapiens
agtgtcgtctctctcctaaaaatacaaaaattagaccgggcattgtagcgggtgcctgtaatctcagattgctccggaggctgaggcaggagaatcgcttgaacccaggaggcagagagtggcagtgaggcacgattgcgccatcgtactccagcctgggcgacagagcaagactccgtctcaaaaagaataggagacacagtgagacgaccatgagacgccagagagaaaacagccatcttgagcctgtgt

SEQ ID NO: 648601 - DNA, 158 bp, Homo sapiens
gctgtgaggcgtatggtgaatagtgcatggctaggaatagtcctgtggtgatattggaggatcaaacaacccccataggaatcacactcccattccgataaaatcaccttccacccttactacacaatccaagacgcccacggattactacgtacaca

SEQ ID NO: 648602 - DNA, 162 bp, Homo sapiens
  misc_feature (38)..(38): n is a, c, g, or t
  misc_feature (66)..(66): n is a, c, g, or t
  misc_feature (137)..(137): n is a, c, g, or t
ctccaatcagactagcatacaggatgaacaaccaagtnattcattccaaggacaggcagcccagtntggtgtttggaatgacgacagtatgttagggcctagtcaaaattttaaagctgagtcaattcaagataatncgcatatggcagagggcacaggttt

SEQ ID NO: 648603 - DNA, 100 bp, Homo sapiens
acccaggcgatacttggtttggtatatattggtgattctgtgtctacatgttatttggaagtatatctgagggaaaaatacatgaaaattttctttatgt

SEQ ID NO: 648604 - DNA, 127 bp, Homo sapiens
acgggagctcactggtcgttggcttccgtgttcccattgcccatgtgtcagtcgtggacctgacctgtcgtttagaaaagcctgcctcttatgatgacctcgggaaggttgtgatgcaggtctcgga

SEQ ID NO: 648605 - DNA, 270 bp, Homo sapiens
tgacctagagtgatcccggctatcacattatcagagcacttggattggacttactcttaaacctctggagttcaagacttttcaaagggctacatacacatctctacatgttaaagggcactgactcctacttcctctgtattagagcaactgtttgaaactcaggctgcctgtaggggcgtgattctccagtcccccagacctcagctttggaagatctttacaaatgcatgggaaatcagcgcagaacacttgacacgggagaattgc

SEQ ID NO: 648606 - DNA, 292 bp, Homo sapiens
gcaaaaagagactgatcatgcaggcatgatcctcatcctccgtcaggacccctgtccaggatggagggtgcaatcctaggtcagctttgttcctcagcacccgtagcatgaggttgtgggatggtggggttggtttccctggtattatgttcaaaggccttgtttcggctacagggggttttccagtgagcaggggtaggaagggtgtgccaggatgtttctctgcacccgtatcttatgtcagacattccatgatccctccaggtcaataataacagtatttccttcgatc

SEQ ID NO: 648607 - DNA, 177 bp, Homo sapiens
ccccttttttttttgaaaaaccaaaattttccggggggggggggcccccccctttgttccccgcttttcggggggttggggggggggattccttttttttcggggggggggggttgcggtggccccggtttttccccccgccttgccccctgggtgcccccgttagcttttttccca

SEQ ID NO: 648608 - DNA, 795 bp, Homo sapiens
gcaatgctgcaacgactctcttaatcctccaccgctacacaatgacgacctaaacgacccaagcaaatccttttttatctcacggggccgcagactctaatgatacaagtgattcagcaactacgaccttatatcttactcatgagagagatggtacgatgcatccatgtcagttggactactttctccaatcctcaagatttcattgactgacctgcgcgttctatattgggcctgcctactaaagaagatgccgcgttgaacccacatatggtgtaagctttaactcgatgaccaaccgtgaagactcacttggccactgagaggggatgtgcccaccgcggggaactgagagaagggttgccctctgtatgcgttaccaaaatgcatgaaatcggacgatgaaacggactacgacacagcagaatggggaactgctgcaaacaaccctgaacagcgaggcagcatagtaactgaattatcgaacaagggtgtaaaattttatggggctccaccaacacaagaagaccgggacttaccgacctccctatatagatcgtgcatgggaaatatccaatgccggggggaaaaggaaatacaggctaagacccgggctattaaatagacaaggggggcgccctggtactaggacatagtgcacatgcgatttaaaaaagcgcgggggcttacggggtttcccttagacagggggactccaaactacaatcactatgaaacccgaggggaactacgtcccaaagcaatttactgaggctgggtgcttttaggaccaca

SEQ ID NO: 648609 - DNA, 2281 bp, Homo sapiens
tgttatagttaggagtgatgtggattggatgttcgtagtgttgttgtcgtatgtgtgtttattggttatcggtgggattggatgtaggtgttgagttagtggttgaatggttgatgatggttggagtgtgatcgggtggtgagtgcatggtcggggtgtgagggtgtgtgacagttgtggtgtgctatgtggtgtggggtctgacattatgatcgtgtggtgaaaatacctacttagttgtggggacacattgaagttatcgtgggatggatcttcactatgtggtgtgtcgactaatgaaaggtgggtgtgtgtgtgttttgattcggccatcggtattagatgatagttcgttggatgttaattgtgtgtggacatgacagtgtgggggtgatactaatgtttgttatgatttagtggtgagtgatggctagcttatgtttgcttcagaagtggagggaggatttgggtgtgtgttcagtggtgtggtggtgtcttttgtaagtcagtaggtggatgatttgtagtaggaggggttgttgacgtgtaattgagtaggagtagaatgttggttggttggtatgagttgaggtgagagtgaagtctatgttggtgggagagtgagtgtgggagtggcttgaggtagtgtgtagtaataatacacttagtagagtgtgctggaggtgtaggtatggttgttgtgtggttgttgtcaacaaaccacgctggatctcgacactcgatagagtgtttgtgcttgagttggtagtgagtaatgaggctactgcggctcagtgagtgcttttgcgtagtgagacctatggtaggtctatgcgagtgttgtgagtgtttcgtcctaacttaaagtagtgttgtgttttgtggccggtcttggtctttcacactcaaatggtgagactcggaatcctggttgaggagcacggactgtgttagtctagttgccatgtgatgtgttagaggttgtgtgttgcggccgcaccatcacaactagaagggggggtggtggttagtgtggtgtaggtcagactaacttgagggtaacttctaagcaggaatgaagcgatgggtgtgtgttgttgtatgtgggggtagtgatcgagaacaagttgagtgctttctatgtggagtaggagagtagattttctatttatgtgtgtgatattgacgagtgtgagaggttagtacgatagtctctgtttagtagtggtggtgtggtttttgataggagtgggtgttgtgagtcatctaatagaggaggagaagagaggtgtggggggcgctacaacccatcagcttgctccgtgactcagaagaggcgttggtttgtgagtgggtgttgttatgtgaggcgagataaaattatcttccgcgtcgtggtgagattagcaacaacgtctgtggtgggtgttatatgtatatcatcactcagacgctaggtaggtggtggtggtggatgagtgagatatgctaccccgtccgtagggaggtgatgcacactacatcgctcggcggaggtattagaaacacatctcgtctgctttgattatttagagatcgtagtctctgggtttgcgatcactgctctttgtgtgtgcgcacaacacactatggtgtggtggtgtctccacacaacacacagaggaggtgtgtgttgtgtggacgcgctacacacacagagggggagatgatactcgacttcttgtggtctcactctgtgtggacgcctcccctctgtgtgagagagagatagtgtgcgcacctactcaagtgagagctccactctcccgctctcgtgcccaccttcggagtgagctctctctgttggtggtgacaactcacacaacaatgagagtagagagatatatcttcgctcactcacactcacaccacattcttctgtctcgggaccaatagaagagagtgtggtgggtaacactcaaaatcacacactcactcaccaccctagatcgcacacacactcaccactcgctctccacacctcacgcgatcatacacacgaggtgtgttttcttgtggcgccccggagtgtgtgttgtgagagagtgtgtgtggagacgagttgtgtgtgtgtgtgttgatagagacaccactttgtagagtgtaaaagtgtgtgtgaaactaaaacccacacaaataaatataataatatataaataaataaaattaaataaaaagatataaaataaaacgtcgaaggctagtcatattcgagggtcgagaaagagtattagtaccataa

SEQ ID NO: 648610 - DNA, 192 bp, Homo sapiens
acaggatttccgagctcacagtcagcctgacgagccattctggtgggctgacaccactcaactgtttctcagggaacaccctcagtcctctataatcagaataggtttacgtgtctggacacgttgcactcagtttatcctcatgggcgtcatcgccatcttctgtgggattccttcggttggcatggctgt

SEQ ID NO: 648611 - DNA, 379 bp, Homo sapiens
  misc_feature (41)..(41): n is a, c, g, or t
  misc_feature (128)..(128): n is a, c, g, or t
  misc_feature (374)..(374): n is a, c, g, or t
attttttaaaatgttttttgttagagacagggtctcactanctttccccaagctgttctcaaactcgtggcctccaaatgatcctctcaccttggcctcccaaagtgttgggattacagtggtatganccaccacatccagctacaggaagattttgtaacagatggcagtgtcttaggcaggaggcaccttcacctgtttgctccaaggaacccctatccagtggcagcctgctcctctccaactcttgtcttctatcctcctccctcctcttctgccccatttttcttcccttgaacccagccttgtcttttttctatttttttgagacagagtttcactgtgttgcccaggctggagtgagaccctatctntataa

SEQ ID NO: 648612 - DNA, 234 bp, Homo sapiens
taggctgttctgtcgggtcttcgctcacttattctttgcaactttctcccttatgtcccaatttatcacaaattcccttccaaataaaaagccatggccaggtgtggtggctcacacctacaatcccaacacttagggaggctgaggtcagaaaatgtcttgaggccaggagttccagacaagcctggtgcacaacagtgtgaacccatctctaccaaaaaaaatacacgggcc

SEQ ID NO: 648613 - DNA, 329 bp, Homo sapiens
tattacagcgccctgccctgacaatatgcactgtacattccacaagcattgccttcttattttacttcttttagctgtttaactttgtaagatgcaaaagagggttggaatccaggttttaaatggatggtgtgtggccctttcacactctcaagagactctcatgtgacaagcgaaggccgcgcctgcctttcccatctgtctatctatctggctggcagggaaggacaagaacttgcatgttggtgaaggaagaacgtggggtggaagaagtggggtgggacgacagtgaaatctagagtaaaaccaagctggcccaaggtgtcctg

SEQ ID NO: 648614 - DNA, 1104 bp, Homo sapiens
ggggctggacgcggcggacgtgggtgagtggcgcggccgtaagatgatgcgtggacgcggggtgcccggcgcgtggtgggggtccccgtgcgccgtgctccccacggcacccaagaagtgcctggccagggtaccctcctgcggagcccggtgggtggcggggcgcggatgccggcggccgcgatggtgcccggtgaccctccagctggcctggagcgtgcgtccgtccccgtcggccgctgtcccttggtgggcgcggcttgagctaccgccagtgggccacttcctcaatcgacgctgtgcgctgtccagtgtggttcaccgtacctgctgctcctaccttgcatctcgtgtgcgcgcctacagctcccgcggcgcggggctgctgctgctgcatggtgccaggtggaccgtacgggcatgttgcacaccgctcgtgggctacggaggcctgaccgcgcctgccagctgcttgtgcccgcatacggcccggcgcaaaggcctggcgaccttgtgtcggcgaccggtcattgcggtccctgctgtccattccccttcatcttcaggccccgtgcctgggcttgtgggagcgagcacggcccgagttgggcttgccctccttcttagcttactgggccgttcatctgtgatcttccaagtcatggctgggcctccagcacagatcctcccacttcaggcctcattccgcggagactcgtaaccaaaggaccaatggagcaaggtggagcttcaccgggactcaacggtattgcggtacacccggatggtgggccaagaatcaaccggcgtacgggcgccgccttgattcctggtgcacgctgagaaggggtcaggatcgaaggagctggaagcccaaccacgaagagcattcaaggccgctactgtagacaaaggattgagggcggcactaggagaagttccgccggtggttccccggaagacctgtatccgtagtcatagaaagtaggtggctacagagccggcggtccgcacctgggtatatacccccttgtgggaaccccaggggaaagtggcgccagagacacgaatatgcggaggacgccacggggcgacacacacccg

SEQ ID NO: 648615 - DNA, 234 bp, Homo sapiens
atcgaggattcggaatgtgtggtgtatgtatgttaactttctttatattaataaaacctctaattgacttgtcaaataaaattttcattaggcttatcaattaattctttaattgggcttaccagttaaccatttaattgggctttcaactaaaccaatccaaacatagatttagttaggcttatcaattacccaacctaatacttttgtgtacgaccataacaccacacaatt

SEQ ID NO: 648616 - DNA, 346 bp, Homo sapiens
ctccgtgtgttgggctgggaaacagacctggtcataaccggtgagttcacacaaatccttctcaagctctcggaaaagctgctgatatccttgagcttgatccagaggcacaagggggtggatgttggcaaatcctttccatgtgataggtgcgagttcagaggaacgtgtcaggtgtcagtggtgcaggagtcccagtggaatcatgctgtgaacaagggaaatgtctttattttccagttttcttcatgtaccggacaagggtggtttcagagtggtagctgttgaacactgtgatgggagaggagggcagaggtatgccagggtctggtgtcaagagaagggt

SEQ ID NO: 648617 - DNA, 1084 bp, Homo sapiens
ggttcctcatatgccccagtctgggaagatgtctaaatgtcgacatcccaatgggataagggagctcggggttggacagaacagtgaccttgggaggaaggggctaatccgcccacgtcagggaaagatgtgagcaaagcgggtcaatgggtcgggagggtgaaaagggaaccccttcccccatttacttctccacctcccgtcctccccatcattggttttttttgtgtgtcaactgtgccgtttttattttattccttttattttcccccttttcacagagaaataaaggtctagaagctaaaacaaaaaaaaaaaaaaaaaaaaaaaaaaaaaaaacaacaaaaacacacaaaaacacaaaaaaacaacaacacacacaccacaacacaacaaaaacaaaacaccaaacaaaaacacacacacaaaaacacaacacaacaaacaagagagagaagaagagagagagagagagagggaggcgaggagggcgaagtgggggagcagtagagagaggcggcgcacgcaaacgaatcggccacaagaatacacttaagcatgagcgacagacggagcgggcgcgagacaccacgaggccgcgcgcaccacactactcgtaagacgggggaggagacgcgcggacaaagaagacggaggaatcaagcaaggaagcgcgggaggaggcggctgagaggaagaacggaagcaagggaggcgggggcgagaagcgacgacactgcagagggacgccgatggggcggggaacaggatactcaaagaatgaagggattacgacacaaggtcgacggaaggcaagagagacaggagtgaaggtagacgtgggaaggagtaggagagggggaggcgcgttgctcattaagcaagaagaaggagggggattgccagaggtgagcgccgctgacccgcaggcagagcgaggagcgagaacagagcaactgagcataaagggcacccgcatcagagaagatcacaacaatgtgctcgagggacgcccaggcacggcagaccagtccagcaggacaaagccaataaaacgaacaacgcgcacacccaccatcactaa

SEQ ID NO: 648618 - DNA, 554 bp, Homo sapiens
  misc_feature (24)..(24): n is a, c, g, or t
  misc_feature (31)..(31): n is a, c, g, or t
  misc_feature (44)..(45): n is a, c, g, or t
  misc_feature (53)..(54): n is a, c, g, or t
aggctgtcggtcgaattctgggantttgttngcgcaacctccgnntggttgcnntggctgccgctgttcaggcggcgggaacgggcggggggagcgggcggagctggccaccatgtccccatcgtgcctcccttggccggcgcgcagtcggcgcgggcgcgccgcgcgcactgccctgagcgcttgctgaggcgagggagacgtcgggcctgcacctggagggagcctgcggctggccccgaggagggggcgttgccatggcgacagctctcccgtgctgacggtggggctggggggccggggggccctgggaaggagggcctggtctcctggccccccgcctccccttactctcccctggacttggatgggccgagttgggggcaacaccccggcattggggctttccagctctcacagaaccttcagcatccccagctgccggtcttggcatcttcgaagtaaggagagttttagatgcttctggatgttcaatgctagcacctttacaagactggagcagctcgattttcttcgtatttacttttcaagaa

SEQ ID NO: 648619 - DNA, 125 bp, Homo sapiens
ggcacatagtattttctgtataggtcccatgatacttatgaagtccggtaggcatggcagcattgagggatggcagacatggtgcagtgtctcatggaggtttacgctcataggtggagaagaac

SEQ ID NO: 648620 - DNA, 115 bp, Homo sapiens
gggagtggagagagaaaggacggggaaagagagaacatgaagggaggactggtcgaagggccagtggagcaggtgtctgggagggacaggccatgaacttgcaagggggctgagg

SEQ ID NO: 648621 - DNA, 104 bp, Homo sapiens
agatcggcgactatgcgttgctcagtctggaggctcggcgtgtgcagtatggcgttcggcgtgtgcagtttggatgttcggcgtgtgcaacgccgatcttcacg

SEQ ID NO: 648622 - DNA, 133 bp, Homo sapiens
ggtcatcaacctatagttccccacattagttattagcagactcattgtggacgagtgaatttcacaagacagctacaatagtcgagaagaaatcgagggcagaggcccacatgtttacttcgttgtgacgcat

SEQ ID NO: 648623 - DNA, 468 bp, Homo sapiens
ttaatgtagctaggggtttgttatttttgtttttatttccaaaaatacaactctagctttgttgatttttatattgttttttattttaaagttattttatttatattctaatctttattatttacttcattatgctaactttgggcttagttagttcttctttttctaactgtttatttgtaaagttaggttgttcaattgagatctttcttattttttaatgtaggtgtttatcactataacatttccctcttagcactttttttgctgcatcctgtaagttttgttgagttgtatgttcatttttgtttgtctcaagatacttttaaaattcccttttgatttctccttttacccaatggtttgtcaagagtgtgtgggttagttctgcatttttggaaatgtttctgtcttctttgttatcgattcctaattttattccattgtggtctgagaagatactttgct

SEQ ID NO: 648624 - DNA, 1326 bp, Homo sapiens
gcatactgcgcacagcacacgcacccggggggcaaaattacacggtttttattaagacgccgcggccgtctcccagacgacccagggtgaaacacccacagcccggctgtgggacacaagcttgtggaaaatcccagcgggggcaaagatctccccggtggacaacccccagcaaggttgtttcccccacgagtagggaggtctcacctgtgtggcacaactttgaagcggccccatgggagtaataaacctccacaaagtgtgtgcttgcagccctggtggggacacaaagagagttatccggggggaaaaaaagggagggacacccacgaggattgtaccctgaactccccgtgaaagtggacacagagggcccccggttttgggcgcccaagggagaagcaccacgttggaaaacacctaaatggggctcccccagggagaaaccttgaaagaaacgtcaacacaaaaaccttggaaagaatttgaggaaaccccacgaagggggaaacaaaaagggggtccaatatcccacaaggaattttcacctctgggacatgtcctcgataggccctcgtgccacaaacaatggagaaaacgccaacactctgtgtttgaaaaagatttgagggaaaacttttctcaaaaggggcccacagagttttaacccgaaatgagaggaccccacaccacgagaagaattttctgggacaacaacagtgggtataatgagaaaatttatttacaaatctggggctctgaaatataagaaaattcacgagcctcttctgtaagaaaggagaagaaaatctgtgagaacacattccaccacagagaaagaagtcttggaggagaaagtttggcacaccccactgtcacttcacccacacgctcgtgaaccacgagttgccacggaaggcataagccacggagaggaatatgctctgggggatatttcctctggtgtggtggagagctccttcccttctcgggtggtggctttcctccacgggcccacccacttgaaagagaggttgagttaaagccacaccccaagggtaagaatgtaagcacattttgtgccaccaccacatttataaaacactttgaaaggagcctaaaatttcgtagcacaaatttctcgtggcacagttttataaaaagttaaagctgctaataagtaaagttatctgggcacattttcacaataacttgaataatggaaacaataatgccccggggaaggaaataacattgcactttataaaccctgtattgtaagatgggaaaagccaagttttaaataaaactatttaaaattggcca

SEQ ID NO: 648625 - DNA, 172 bp, Homo sapiens
  misc_feature (53)..(53): n is a, c, g, or t
  misc_feature (98)..(98): n is a, c, g, or t
  misc_feature (131)..(131): n is a, c, g, or t
  misc_feature (157)..(157): n is a, c, g, or t
taattgtgggtataagatggtttcaagttgactggcttcatttttggaaaganttcaggggccagggctcaacccaaacactcctggactggtgtganttaatgctaagaaggctggtactgggccccaantctatcctggctccctggagggtaangaacctgttgacttg

SEQ ID NO: 648626 - DNA, 275 bp, Homo sapiens
acagaaaaccttatgacataaccaagaggagtatgcgagattctacaagagcctcactaattggctgggaagaacacttggcagtcaagcacttttctgtagaaggtcagttggaattcagggcattgctattattcctcgcgggctccctttgacctttttgggaacaagaaggaaaagaacaacattaaactctatgttcgccgggtgttcatcatggacagctgtgatgagttgataccagagtatctcaattttatccgtggtgtattccg

SEQ ID NO: 648627 - DNA, 401 bp, Homo sapiens
tccacaatttttttttgttcccaaactgtaatgtacaaggatatgtggtagataagtgcttgtgagactttgaagctaaacttaatttctttttgttgtttactactttttcccaagagggaacaaaaaacgttgggcttttgtgcgggaaattaatttgttttattaagggaaatttagaacttgttttaagaaaagcccaattttaacaaccttcttcctaaacgggggcaaactttaacaatgttttgggaaacttaaacttttttgggccctcttcccaaaaaattttccttttgggaaagcccccaaacccaaaactttttctttcataacggggggctttaccacacaacatttaacctgtgtcaaggaaatcttggcaaacaggagaacttgtg

SEQ ID NO: 648628 - DNA, 358 bp, Homo sapiens
ggtcgactactactactaaattcgcggccgcgtcgacgggtctcactttgtcacccagggtggagtgcagtggcacaaacacggctcactgcagcctctaccgcctgggctcaagtgatcttcctgccccagacccccaagagctgggacgacaggtgcactccaccacgccgggctaatttttgtatttttttgtagagatggggtctcgccatgttgcccaggctggtcttgacctcctgggctcaagtgatcctccagcctcagcctcccaaagtgctggaattacaggcgtgagccaccgtgctgggtccaaaatgctgcctgttttgaaaaggttcaccaatagtgggtcgac

SEQ ID NO: 648629 - DNA, 434 bp, Homo sapiens
  misc_feature (73)..(73): n is a, c, g, or t
  misc_feature (203)..(203): n is a, c, g, or t
  misc_feature (381)..(381): n is a, c, g, or t
  misc_feature (397)..(397): n is a, c, g, or t
  misc_feature (416)..(416): n is a, c, g, or t
tgaaagcagcacgatcggttcggtcgttccgcgctgccttgaggttgaagtgttcccccgatgacaggcgtgnaccctgagccgaagcttgcaagggctccggccgtgacgcgggactgatactcctttgaggcacactttgaagtatgtgtcacactcgtcgcgggtgcaatttgcggtcttccggggttccgggcgccgcngcagaagttcccgttctgcagcttccccgttcacgttctgcatggacaggatctccaactcgaactgacccgaggccccacacaccttggctcgcaggcacagagcaggcgagcaggagcttaggggcgccggaccggccgcgcgtccgtggggaacgcaatgctgcgcgcgccgcgngcactcgggacgccgncgctctgttcgcgctggtntgcgccggtgctgccgtc

SEQ ID NO: 648630 - DNA, 583 bp, Homo sapiens
tatagtaaaacgattggtacttcgtatcctgactgtcagaatactacgacagcactattcttgtcagaccgacagaagcaacaaaaggtattcttgtacggccggtgggtatcgacgacatgcttgagtacacatcataaactctgcacattcattctcaaaaacccagcttagaatagtgacagtggtacaggaaagacagaactagaaaagaaaaacagaaagggcaaatacaaggaaaatggctccgtatccagcagtgagacaccaccaacaccagcaccacctgatgaaattaatcctcctccacatacaatgaaagaagaggaggatgataactggggagaagatacaactgaggaagctcaaaggcgtcgaatggataaaatcagtgaccatgcaaaagttctgacactcagtgatgatttggaaagaacaattaaggagagggtccatatcctctttgattttgttacgaaaaagaaagaagagggtgtactagattcatctgacacagaaatcgttgctgaagcagaaagactggatgataaaaccatgggcccttctggtcctaactgaagtt

SEQ ID NO: 648631 - DNA, 182 bp, Homo sapiens
  misc_feature (32)..(32): n is a, c, g, or t
  misc_feature (53)..(53): n is a, c, g, or t
ttaagggaaaatgaaacctaaagcatctagtncttctcataatctaacaaagnaaaagtctctcaggtttaaatctttacatcactacagatggcaaaaaactacagcatctcagttacaagtttcaagtcttaaaaaaaaacgaacaaaaaaaactttcctccaggaaagcccatgagatc

SEQ ID NO: 648632 - DNA, 314 bp, Homo sapiens
ggatatgacagggggtggcatgttactacttctccctggtgagtgtgggccgtcccgtccatgaggcgtggaccggtccctggacttctacgagcggtcgagcatgaccttctggctgctggtgcgggacactccgggggagaatgtggaacccaggcacactgccatcggcagactagtgctgaacgtggtgcccgccgacctgcggcccccgtggttcctgccctgcaccttctcagatggctacgtctgcattcaagctcagtaccacggggctgtccccacggggcacatactgccatctcccctcgtcc

SEQ ID NO: 648633 - DNA, 529 bp, Homo sapiens
tcccctttttgggtttttttttttcctttgaatgggttgaaaacccctttggggggggggtgggggtttggggaaaaggccctgtgggggatggccaagggggctatgagttgtggtgggcagaaattaaagtttttgtggtgggttgggggaacccctctttaggcgtttgatgtggtgctcccgtggtgtgagaagcgccgaccaaataacgcgtgtgtttttttaaaaaaaaaaaaaaaataaaaaaaaaaacaaaaaaaaaaaaacaccaaacaacgacaacacatgaaccaccaacaaagaaacaaaacaaaaagaggggggggggggggccgaaaaaaaataaatatccaccagggagggggagagcaaccattggggaggaggcccagaagcagtcgggtgatgagaagagacggggcgggctcacctaaagggaggaggataaataaacaaagaagagcgacgaggacggggccgtacactaaagaggagggcggggggcgacagaagcacggacagacat

SEQ ID NO: 648634 - DNA, 137 bp, Homo sapiens
cctggctgagttcctgcgggatgcccggtcggttaagctcctgaacatggggagccctgtgtgtaggatgtcacagacacactcaaacgcttctttcgtgagctcgatgaccctgtgacctctggatggaacccacg

SEQ ID NO: 648635 - DNA, 286 bp, Homo sapiens
cgccggtccagccacccccccaggtctgaggttctgtcatgccctctgtgattagagcacatgccatcattagcttcggcttagctgtgcttacagcacgaggatctggcccagaagaggattccagccctggtggcgatagctcaaagtgtgtgcggacctggctgtccgggaagaacgtccatcattgtgatgtgcgatctctgcatatcggtacagcatcatgggtggccgcgtatgttcccaatgagctcgcgaatgtgtttgaaggacttcgacccatttc

SEQ ID NO: 648636 - DNA, 374 bp, Homo sapiens
acacggtttgtggtgggaggacctagaatttatggtcgtggatgtctgagctagtaagatggtgttgggaagttgggtggtctagtaaccttttttgtacgaacacttagagacgacagtcacttcctgcaggctgtaatctcaagccttgacgaacccaaaccaacattgactgaaggcacctataactcaagttatagccacagaaagggctttgcttgtatccacctcaattccaaataccttggttgcacaaggagaccacaaggactatttgaagacaccatccattccctgaaaatcctttaggttgattttggggtctttcataggttgtaggtcacctagcctaagctgactgcctcccaccacag

SEQ ID NO: 648637 - DNA, 327 bp, Homo sapiens
  misc_feature (6)..(6): n is a, c, g, or t
  misc_feature (24)..(24): n is a, c, g, or t
  misc_feature (239)..(239): n is a, c, g, or t
cgggcncgaagtgctgcgcggttntatcgaccgctctggccgcgtgctgcaactgatcgaaggcttcgtgccggatgccgcctggctcgatgacgtcgagaccttgacctatctgcattcctgcatctcgaccaaacggcaccgggtgcgcctccctgagattccgatgcacctcgacgcgttgctggttgatgagccgctggctggaggacttgagccccgattgggcgcgcagcacntgcgcaccttgagcgtggtcggatttccgacagcgacatttcccggcgtgctggatgagctgaatcaactcgcgtttccgtatcgctg

SEQ ID NO: 648638 - DNA, 218 bp, Homo sapiens
ggccccttcttgcttccctatctatcgtctgatttctgcagtctcctcgcacacctttgtcatagcagtagagcacaaaggatatgtctctgttcccggtgaccacattcaggacaaacgtctatgttgttataataactttcttaggattgtcaggctacatgaggtcatcatacaccatccagttccacctcactttaacaggaagacttaacttt

SEQ ID NO: 648639 - DNA, 511 bp, Homo sapiens
  misc_feature (461)..(461): n is a, c, g, or t
ctacaaacagttacagtgaactctatagattctgctggtatacagctacatccaggagagaatgctgacagtcctgcagatattaggatcaaggaagaagaacctgatcctgaagagtggcagctcagtggtgattctaccttgaataccaatgacctaacacacttaagagtacaggtggtagatgaagaaggggaccaacaacatccaggaaggaaaaagacttcggagggtagcttgcacctgtcccaactgtaaagaaggtggtggaagaggtaccaatcttgggaaaaagaagcaacacatttgtcatataccaggatgtggtaaagtctatgggaagacctcacatctgagagctcatctgcgttggcattctggagaacggccctttggttggtaactggatgtactgtggtaaaagatttactcgaagtgatgaattacagaggcacagaagnacacatacagggtgagaagaaatttgtttgtccagaatgttcaaacgctt

SEQ ID NO: 648640 - DNA, 676 bp, Homo sapiens
ggccaacaattagaaataagagcaagagccaccgcgcccggctctgctcttatttctaatgtgtggccacactttcagagcaagagccgggcgcggtggctcacgcctgtaatcccagcactttgggaggccgaggcgggcggatcacgaggtcaggagatcgagaccatcctggctaacacggtgaaaccccgtctctactaaaaaaatacaaaaaattagccgggcgtggtggtgggcgcctgtagtcccagctactcgggaggctgaggcaggagaatggcatgaacccaagaggcggagcttgcagtgagccgggatagcgccactgcagtccagcttgggcgaaagagtgagactccgtctcaaaaaaaaaaaaaaaaaaaaaaaaaaaaggagaaaaaaaaagggcgggggcggggggagccacacgccttggtaagcccacaggcacctttgggagaggcgccgaaggcgggggggagaccccagagggcgccagggaagattccagagaaccaagccggggggggaaaaccgggggggagaacccccggtgcgtgtatagtagaaaagattcgaaaagaattattaggccggggcgggtaagtggggggaggcccattggtgaggccccagagtactttgggaacgggcatggagcggagcaagacgg

SEQ ID NO: 648641 - DNA, 211 bp, Homo sapiens
ctcgatagatgtatagggacagtgggaatatcgtccatccatacatgcgcgtaaactaattagatagacgaggaatatggctaccttaagagagtcatagttactcccgccgtatacccgcgctacattgaatttcttcactattgacattcagagcacttgggcagaaatacacatacgcgtcaacacccgccgcgagactatcgagatg

SEQ ID NO: 648642 - DNA, 430 bp, Homo sapiens
  misc_feature (15)..(15): n is a, c, g, or t
  misc_feature (56)..(56): n is a, c, g, or t
  misc_feature (129)..(129): n is a, c, g, or t
  misc_feature (196)..(196): n is a, c, g, or t
  misc_feature (221)..(221): n is a, c, g, or t
  misc_feature (295)..(295): n is a, c, g, or t
  misc_feature (376)..(376): n is a, c, g, or t
  misc_feature (427)..(427): n is a, c, g, or t
gaatgtggtccaagngccctgaactcccttaaatctgtcgttcgctgggctgaaanaggtgcctaaaggactgccagccaagctcagagtgctcgatctcagctgcaacagactgaacaggcgcccgancctgacgagctgcccgaggtggataacctgacactggacgggaatcccttcctggtccctggaactncctcccccacgagggctcaatgaantccggcgtggtcccagcctgtgcacgttcgacctgtcggtgggggtgtcggaaccctggtgctcctccaagggnccgggtttgcctaagatccaagacagaataatgaatgactcaaactccttggcttcaggggagcccgtcaggacgttgagncttttcgaccaattcaaccctttgccccacctttattaaaatcttaaacgngcg

SEQ ID NO: 648643 - DNA, 1411 bp, Homo sapiens
  misc_feature (320)..(320): n is a, c, g, or t
taggaaatggagtcgggctcggtcgcccagggcgggagtgcaggggcgccatctcagctcacggcaagctcggcctcccgggtttcacgccattggccatttctctccgcggccctcgagcctctcccaagtatagcgtggggcatacggggcgcccgccaccagcgcccaggtataattttcgcgtggtatttttttatagtatagagaacgggggtttcaccagtgtgtgggccgagggcgtggtgttctcgaaacctcgctgtgagaccctcagagtgtgtacatcgcgcgcacacacgatgaggtgccctcccaanagaggtggggtggggaatttcacgagtgggtgtgagagtctcagcgtggcgcccggcgggccccgaggggacacaatatttatagtgagagaacacaaagagagaaccagagcggcgagtggcgcgtgaactctctctcgcgagtgtgtatcacgagcgcgtggagagaacagagagcggcgaaagaggggtgtgtgtgggggtgtggtcacaaagcgcgaggctctcgaggggggcgagagcgtggggtgcgcgtggcggggcgagtggccagtgtgtgcgcgagaccgcgagagagagcgccggtgtgggcactctgcggggtgctcatcacccgagagagtgggcctctacaggaggggacaagaggggcccagaaacaccctgtggcgcactgtggcgcagagcgtcacacagacgactcaccacctgtgggtgtgtgtgtgtgggtggggacaccccgagtgggggcggggcgagtgaaagagaaggcccctgtgggaaagcggggggctctttgtggcgcactccccccttggggtgtaagctcaccacctggggggggggcgtcctattaacacccaggggggggaggggcggcgcacctccatatatttgggggcacttgtgggtgcccccgtgggccccccttgtgtggcccccccaaacttttattccccaaggaggggcgctgaggtgcgctcgtggtgcccaatatgtggtaccctttgtgggccccttttaagagggggcacgcggagaagtgtcccccccccccagagggggcgtggtggtgccccccacatacaggtggtgagcacataacgggggggggccccatcgtggtgcgcccaaaacaggctccttggggcgcacaaagggggccgtcccccggggggggggcccccattaggaatcgggccctaagtaagggacacccccccggggagcatattccacctgaggcggttgtggcgccaacaaagtgccccccaagggggggcagcagcccgggagactgaaaagcattccacacgcccataaaaaagaagggggcgcccactccccttgggtgggggccgcaaaaaagg

SEQ ID NO: 648644 - DNA, 169 bp, Homo sapiens
ggaagaccgtttcatgggctgtaggagaaaatagcatggcgtgcgatctgtgccctagttggtgaagctgttttgcacagaaacctgggttagcaattatgagattactttgtgtgtgctccagacttgagcaagccagcatattgtgggtaattagagccaggtgtgt

SEQ ID NO: 648645 - DNA, 166 bp, Homo sapiens
  misc_feature (47)..(47): n is a, c, g, or t
  misc_feature (125)..(125): n is a, c, g, or t
ccatgctgagtgaaaccagcacaagctgctgcggaggcgctggagtngcagaccctgttggggccgctcgagctggtgggcagcctcttggagcccagtagccatgtggccagtctaccatgggncccaggagttggggaaacacaataaaggtggcatacgaagg

SEQ ID NO: 648646 - DNA, 295 bp, Homo sapiens
gtatgaataggatacagtccgctctggcacagtactctgcgtccagaaagagtaccgatgctatcataaggctctgtagtgagcatgatcactgagcatgcacgagttgcgagctatcagtgatattgccagtcagttggcaaggatctatctcagacgcatgaggactccccaacagccatacagctgacatacctgacctacagtcagaagagtataggtgcctagcactagcttggattgaatagctctaagcataactatagcacattgtagagtactctgtgacctgctg

SEQ ID NO: 648647 - DNA, 211 bp, Homo sapiens
tccttgcctcactcctgagtagctgggactataggcacgcaccaccacgtctgactgatttttggtatttttttggtaaagatgggggtttcggctgtgttggcacaggctgggtctgtgaactcctggggctcaatgcaatccaccttgcctgtggcctccacaaagtgctggggattacagggctgtgagccactggcacccaagcccc

SEQ ID NO: 648648 - DNA, 248 bp, Homo sapiens
caacccatcgatccgaaatgagccatctctgataggagatggggagtgcgtgctggtggagtgtcccggtctgcggacatcacttaaacaaagggccactcagcaacttcgcccagtcttgcctggaccatccacgtatgctctcagagtgagatggcaacgaaagcaccatgatcaatggtatccatttgtacaggccgttgccatcacaggtccagctctgcccgatggacgaagcccgagcccgg

SEQ ID NO: 648649 - DNA, 178 bp, Homo sapiens
aaaaaaaaaaaggacattattaaatttatccctaggatcctagattgtttttatttctaaacacaatggctgcccttggtccaaaagggggaagaacgaaccttttattagggctaggaaaaaggcaaacttcggggtatccgggaccggctagcgggtaccacttgctacgggagga

SEQ ID NO: 648650 - DNA, 200 bp, Homo sapiens
atgcacctgaatgcctgcagagtctgactctcagagtgatccccctaatgcttggcgggctttaggaatctcccacactctccctttccactcttttccctatgagtccccaaagtccactgtgtcattcttacgcttttgcatccttatagcttagctcccacttatgagtgagcaaaacgtggaaccaacccaaatgg

SEQ ID NO: 648651 - DNA, 239 bp, Homo sapiens
ctgccaatgaagtaactgacgaggtgcagtctgtaagagttgatacaggttgggaacagctcgtacactaaccattctctgcatctactggttagtgaggtgagcctggcgctctactatgcgctgagctacagctacatacaatggctttgtggccacgattctaccgatcatttctgtaactgctttactggcttcatctggggaggagacacatacgaaatcaaatcctttgctgc

SEQ ID NO: 648652 - DNA, 458 bp, Homo sapiens
agtaaaagaacagaaaagcgaaacttttctttcatttctgaaaaatgtgctcgttctatggatggatcataccttgctagctacgtggttaatgtccgtgggatgaaacctacagattaatgtgagaaagtgaaatttacttccccaggggaatctcggggtggagcttaggttctccagcctagtgtcagaatatatcggtagcagctggagaaagcatgtactttgacatcagattgccttcgttgggtggcacctctgccctcccgtggcagccgactccttaatgtgagttctgtgagttgggtgcagaaagtctctcttgctttttgtttttttaatttgctacatctgtgaaagtacttggaaaaattgcatctcagcttggagaagctgagaactgtaggttgctaacagaagtggaaattgtgattgcccccggcccgaattggttaccg

SEQ ID NO: 648653 - DNA, 508 bp, Homo sapiens
cttcctttgtctgatataatgagtgtcgctctgtcgcccatctggagtgcagttgcaacaatctcagctcactacaacctctgcctcccgggtccaagtgatcctcctgcctcagcctcctaagtagctgggactgcgggtgtataccaccacactggctaattttacgtatttatttatttatttatttttagggagtctcactctgttgcccaggctggagtgcagtggcaccatctcggctcactgcaacctccgcctccctggttcaagcaattctcctgccttagcctcctgagtggctgggattacaggcgcccgccaccacgccccactgattttattttgtatttttagtagagagactggtttcgccatgttggccaggctggtctcgaattcctgacctcaggtgatccacctacctcggcctcccaaagtgctgggattacaagcatgtgccaccgtgcctggctaattgggtatttacagtagacaaagggaaaca

SEQ ID NO: 648654 - DNA, 520 bp, Homo sapiens
tacaaatttctacactggctttgaattatgtctagtgtcctttcatttcaacctgaaggactcctttacatttctttcaggacaggtctattaatgaactcccttagcttttatttatctggaaatgtcttactttctctctcactttgaaggacagtttgccagtcatagaattcttggttgacagttttgttcctttagtactttgaatatattggcccactgccttctggcctccaaagtttctgatgagaaatcagctgattattgaagattccttgtatgtgatgagttgcttctctcctgctttcaaaattctctcttgggttttaggcagtttgataataatgtgtcttggcgtgattctctttgagttcatcctacttggagtttactaaacttcttagatgtttgtgtccatgtttttcatcaaattggggatgttttcaaccattatttcttcaaatattctctgccaaaatgcacatgctggtctgattgatggtgtgtagaaattgaa

SEQ ID NO: 648655 - DNA, 106 bp, Homo sapiens
gggtcatacggcgttgttctggattccgtcgtaacttaagggaattttcacaatgtccggagcccttgatgttctgcaaatgaagggggggggatgtccttaaggt

SEQ ID NO: 648656 - DNA, 248 bp, Homo sapiens
acacgagacagaggttcattggcacatagtgagccatactatgaccagtgaagtgagtaggggctaaggggctaggtttggtcccatggctacattaaatgcttggaatgactccagggactgctctaataagtggctccagacacggtatagagttaggtgagtaacgtgtaggagtgtggggacaaggaaaaagggaggaggggtccctagaggctgggtgccccttacctagactccaattcgtc

SEQ ID NO: 648657 - DNA, 837 bp, Homo sapiens
  misc_feature (673)..(673): n is a, c, g, or t
  misc_feature (685)..(685): n is a, c, g, or t
  misc_feature (799)..(799): n is a, c, g, or t
gctgcggttgcgtagcgctgtagggagcctgtgctgtgccgcgcagttaggcagcagcagccgcggagcaagtagccgccgtgggagggagccatgaagcattacgaggtggagattctggacgcaaagacaagggagaagctgtgtttcttggacaaggtggagccccacgccaccattgcggagatcaagaacctcttcactaagacccatccgcagtggtaccccgcccgccagtccctccgcctggaccccaagggcaagtccctgaaggatgaggatgttctgcagaagctgcccgtgggcaccacggccacactgtacttccgggacctgggggcccagatcagctgggtgacggtcttcctaacagagtacgcggggcccctttttcatctacctgctcttctacttccggagtgcccttcatctatggccacaaatatgactttacgtccagtcggcatacagtggtgcacctcgcctgcatctgtcactcattccactacatcaagcgcctgctggagacgctcttcgtgcaccgtttctcccatggcactatgcctttgcgcaacatcttcaagaactggacctactactggggcttcgccgcgtggatgggctattacatcaatcaccctctctaagtccccctacctacggagctcagcanggtgaaactggngctcggcatctttgtgatctgcagctcggcaacttctccatccacatggcctgcgggactggggccgtgggtccaagaagcggaagatccataacccacaagaacccttcaggnggtctcctggtgtgcctgcccaaaactacaaggggggc

SEQ ID NO: 648658 - DNA, 976 bp, Homo sapiens
  misc_feature (436)..(436): n is a, c, g, or t
  misc_feature (551)..(551): n is a, c, g, or t
  misc_feature (827)..(827): n is a, c, g, or t
  misc_feature (892)..(892): n is a, c, g, or t
gctgcggttgcgtagcgctgtagggagcctgtgctgtgccgcgcagttaggcagcagcagccgcggagcaagtagccgccgtgggagggagccatgaagcattacgaggtggagattctggacgcaaagacaagggagaagctgtgtttcttggacaaggtggagccccacgccaccattgcggagatcaagaacctcttcactaagacccatccgcagtggtaccccgcccgccagtccctccgcctggaccccaagggcaagtccctgaaggatgaggatgttctgcagaagctgcccgtgggcaccacggccacactgtacttccgggacctgggggcccagatcattttggtgagggttttccttacagagaacagcggggcccctgtacatctaccgtgttaggtactttgcaagtgcccctagatctatngccatcaatattgacttagcggtccaagagtgctatactacgggttcgcaatcggactagacctggcgctgtcgatccagtaccgatagagtcgactcggtgggagacgcaattntaagctactcggtcagtcaggggatctatgccgtttgagcacacctcctcataaagcagcacgctgactagttggagctactgcgcgcgaagtgggatctataaatataatgtttcgctgtttcaactttgtgcctgtgccgaaggggaggtgggataggtgatgcttgccgcactagatatattgtggcgcaggacttgttcggcaccgcggtactgagaatgggcctatacgggaatagaggctccgatgtagacttctagagaaaatagtagncgtcgtaaagtcctgtcacaggtaataaatctactacactgctagctagttacagacataagccntacacgctacacggtacagtagagagacactatagtgctatggcacggatcacagagggataactctgttaggaagtgacggag

SEQ ID NO: 648659 - DNA, 297 bp, Homo sapiens
aaaaataaaaataaataaaaaataaaaaaataaaagagccccctttttcccaaacccataaaataacttccataaaagtaatataactgttttgtaagtaaaagccagccctggtttttttaatttaggggctattccttttatttaaaacaatgaaaatttactgtcattgtttattagtctgtaaaaattaaaaaatgaaatcattaatggccttccaaaaaagtatgtccctgtttttatgttcatttttaaaaacaaaacctgtattaaaaaaagtgaacatttgcttggtta

SEQ ID NO: 648660 - DNA, 247 bp, Homo sapiens
gctgcggttgcgtagcgctgtagggagcctgtgctgtgccgcgcagttaggcagcagcagccgcggagcaagtagccgccgtgggagggagccatgaagcattacgaggtggagattctggacgcaaagacaagggagaagctgtgtttcttggacaaggtggagccccacgccaccattctgtagatcgacgacctacttcactgagaccaagccgccagggtgactcgagagcaagcccgtccgc

SEQ ID NO: 648661 - DNA, 156 bp, Homo sapiens
gtacatattccatgacaatgcctgatgtcatgaaatcatgtgggtcaaaaaaaaaatctatttaaagtatgggcagaccttttggattttaacataattgactgaaaaatgcactggtacagtttcaggctccacattgcaactaacctctagaca

SEQ ID NO: 648662 - DNA, 657 bp, Homo sapiens
cgacctagcagtatacccgcttgcgtcttagcagcagatagtttaacatagcctttgcatacaattataaaaatatcatttcaacagtgacactttttgtgctgttaagctttaagggttggaatgtttaggtgcacatcagctccttaaagaacaaagcaagtgatctaggatatgtctccctaggcagagggaattaacatttacaattaacattgaaaaatcatgtattcagaacttctgcagggaggattcttcagttatacctttatcccaaaaaattacttcactggtcctaaatgttatcattttgacagagtccctggtaagtactttcttcccttggcagcctcaatcttcccacatcatggaagtacaggtttgcacatataacacaacaatgatgatagaacactatgatataggtaaaattagctttctaaatttcggttctaaagtctccttgtcgataccagtagataagtatgcaggcagtaatactactcaaagagatgcagacagcaaagaatatattcaacggttttggaggtagtagagggaaaacaaaagcacttatcagcgtcactagaatcactacggatgtcaagctgccaacaattaaattgatgattcgatccttggcggacgtctccccaa

SEQ ID NO: 648663 - DNA, 788 bp, Homo sapiens
gtactgccctcgtgattcatccagaatgatgactccgagtgctcatcttcgttccctcgagtcatgtctgccatgttgctattggtggagggcacctgtcgccaagaccagagtaatctataccagtttctactcacgaggtaggtacgccgatgaacagaatcattgtctatgatgccagcgatgacagaggattgacagatacttacgcatggcatgcgcggagcatgtgttgctcgccagaggatggcgatgggagacaagattctatcttggcctacatcatcagagacattgtgagacccaaatcaaaaacactactagaaagatagtatcgactcgcacgagtagtgtctcttgtgtagcgtggccaagtcttccagacaaacagtggcaggccgatcacgcatattagcgagcttgtaggatagtatcccaaatcatcgactcgaggtctctgtagcttggtcatacacctggggttttctcattcctgaatggcggctgaattctggccgaagatgcactgtgaggcaaggtaggaatggcagcaccggagcattcctgatactggtgcgtgcctcgatcatctggcaccatccaacgcaagtccgagtacgcgtacgtgttggcaagctacttcggtgtaaataagcgttcagctggacaacaattccctctatcgggacacagcagttctttgaatgttgtgccacaacatgcgatgtctggaaatgatacaattacctgcacgaccacatggaaattggactaaattaccagaatgc

SEQ ID NO: 648664 - DNA, 201 bp, Homo sapiens
tttagagtcagagtctctgtcgcccaggctggagtgcagtggtataatcacagcccactgcagccctgaacttgtgatcctctgcttcagccctcagttatgtcttggcacatagctaggacaacagctgtgtgccaccatgcccagctaatgttttttgtttgggacagtctcgctctgtcaaccgggctgaagtgcagt

SEQ ID NO: 648665 - DNA, 241 bp, Homo sapiens
aaaaaaaaaaaaaaaaaagaatagataaatgtaccaatggaacagaataaaaatgctggaaacagacacgtgcatagtcagacagttgtctagctacatctgtctgtaacagatgagggaaaatagatgctttaaatatatgattctgccacaatgagttatctatgtgggggaaaattggatccataactcacatcagatagaaaaaatcaattgtgagggtattaataacctaaatgta

SEQ ID NO: 648666 - DNA, 1419 bp, Homo sapiens
gccgctatagtcctgaattcaaggatcccttgccttgaccaggaatattatcgcaagccagtggaggagctaactgaggaggacgaaatatgttcgggagctcaagaagactcagctcatcaaagctgctcccagccagggcaaaaccaagttctgtgtttgcaagcaccccagtccatccagtcaagattcaaaccaaccatgcatgcatgcatcaggcaggcaaaaccaacagtcactggcccagcatccctcccatgcattccagcactcttggcacagcttgtgcaaacacaggcacagccagttctgcagcaagtcacccatgccagctctctgcacgcaggcaacaggcgaacacatacgacacgcaaaacccgtacaacgcatacttcccatcgacagcactacgacaacaactggtagcagccataatgcattagcggactggataccacgatcacatcaacgggcaggcctgtattcataaccagagtcaccttgtacaccccgtaacacgaacgagcgatcgaccggacttcacctaagacccactagacactgctgggattgcattcaccttgcagatggcccggggcacttaacacaacaagacacaccacgctggaaccaacttgtatcggcccggcagaaacagacttggtcgacaacacacgctggctggaccaggcctatactcacccaatacacaccccacgggcgccccagatgaatacgaaccgcagggcacacggcaatgcacctctcgccacacaaggcactgggccagacagaagacgaaaacctggcatcgcgccccttggcgcaccgaccaaacccgcatcgaactagggactcacgcaagatcctcccaagacgacgcagaaggacccgcaggggccacctccccttggcacgagccaacaggaaacatcccaggtgctcgcacagcctaccctatgggccaccccggcttcgacacacagcctacacccgctgggatggagcgcgcttccaccacggcggaactgggcacacgcttccccgtcttttggttaaccgcccgggttcgccacccacagcagcccccgcccgctcacaggccacacggcctgtggttccgccgctcccaccctaaatctccacgcccaaaatccaggagtcagcaaagctcgttactcatagagagcgctatccggacagcgcatacgagagccaacagcatcggaccgctcctcatctcctgtgcaccctgactatcagatccaccccatatggagctaaaccggataagggcaaagcaaaacgacgattcagaactatagtcgagccgaaacattagtcgatctatcgagaggcagctacacttaccacgcggcactgtcgcaccatcgcaatatcgaacacaccataaagggg

SEQ ID NO: 648667 - DNA, 379 bp, Homo sapiens
tttccccacgttggtcaggctggtctcgaactcctgacttcaggtgatccacctgcctgggcctcccaaagtgctgggattacaggagtgagcccccatgcccggcgccagatttgttttttgaagttcccatcaggtaattttggaactcccaacttgactgccagtggccctgaatttagaaattggaaatgtttgatgatcaagggttgccgatttaaaccttattgaattcattcagttttgcagtttttattggcaagtacctttgctttccattttacattagccagagggcaagatgaacttactttattatacttccaagccagccagtgatattcaaaaactagcccccttttcattcatatcccaaata

SEQ ID NO: 648668 - DNA, 143 bp, Homo sapiens
ccgtccttcaggtggctcggatcggcgtggcaactgggcgcatctcactctccttcctcacttccacattaatttcctttagttcttccacactggcaagattgctgttcaccatcctgtccttgtcgtaagcattatagggt

SEQ ID NO: 648669 - DNA, 106 bp, Homo sapiens
ctttcttctttggaggctcacgttctccgagcatatttttcggacaggcataacttaagtgtccactttccccacattcataacacttagatttatcaaagtagtt

SEQ ID NO: 648670 - DNA, 746 bp, Homo sapiens
agcgggggcggctctcgtaggcagctccagtcccggacgcaaccccggagccgtctcaggtccctggcggggaacggtgggttagacggggacgggaagggacacgcggccttcgaccgccccccgtagtaattgacccagcgacgtcattttcaggaagagcctgatcaatgagtacagaatagtgtaaatgaggaatttgaacgagttctcatctttggagtggggatcttctcgaggatgcaaagagtgattcatcccaatgccatgtggtatccctctaggaatttgaatgaaaatggagatgtttacactattttgtcgacgctgtattgggcatacccctcctaaagagggcacagctctacttcagccgtgtgaacccacattacgtgttcccacgatgtactgaaaagtggcctacagcgatgacgtcttccctaatctgatgggtcattatgaccagagtattgccgcggtggaaatggagcagtttgtcttcctctcgcaaaatctggaatgttcaccaatacattgtaaactttcctctgctcatcgcatttgtaccaatcctgcagtagaacaaattcagtgtggttccaatcttgtcgtaaactttgtgagaaagtatattctgattgcgacaacattagttgacacttttgggatccgatggcctgaggagcttgacttgtgatcagattacaatactgtgactgagactgtccgtgtaccttttgatccac

SEQ ID NO: 648671 - DNA, 846 bp, Homo sapiens
caatcaatactcatcattaataatcataatggctatagcaataaaactaggaatagccccctttgcacttctgagtcccagaggttacccaaggcacccctcgtgacatccgggcgtgcttcttctcacatgacaaaaactagcccccatcgtcaatcgatataccaaatctctcgcctcactaaacgtaagccttctccgtcactctctcaatcgttatccatcatagcaggcagttgaggtggattaaagccaaagccagctacgcaagaatcttagcatactcctcaagttacccagataggatgaataatagcagttctacacgtacagacctaacataacgcattgctgtgaatttgaactaattgcatattgatccataactactacgcggattcctactactgcaacttaaactccagaaccacaaccctactactatctcgcacctgaaacaagcgtaacatgacgtaacacccttgaattccatccatcctcctctccctaggaggccgtgcccccgctaaccggctttttgcccaaatgggccattatcgaagaagttcacaaaaaaccaatagcctcatcatccgcaccgatcatagccacgcatcaacctccttaacgtctacttctgacctacgcctaatcgtatgcgcactcaatcacactgactcccgatatctaacaaagtagaaagtaaaagtgacaggttggaacataacaaaaccgatagcgattcatggccgaaattcatgaccctttatcacggctatcctaactatttcccctttttatctaataatcttaggagaaagagaaaagaaaagaaagaaaagagag

SEQ ID NO: 648672 - DNA, 173 bp, Homo sapiens
tggtttaacctgtgttagcaggatggtcgcgatcttctgacctcatgatcctgcccacctcggcctcccaaagtgctgggattacaggtatgagccaccacaccctggccttttttttttttttttttgaaaagggatttacatttttgtgccccaggctgatgtgcaagggt

SEQ ID NO: 648673 - DNA, 312 bp, Homo sapiens
ttgcatcgtgtaagccatttaccaagcatagttgtaggataagcaagggcagatttattagagaaattgtgaaaatatgttgcagtgggcagctcagcagagcaaggggctacctgcaaagaggcaagggctggaggacagttttatagggtcctgctgaagggtgctcacgtgtggaatgaggtcattgtgcccgcaggttgtatgtgattagctgtctctaacaattgttcatacaataattgtacattattgttctcaacttggggctctccccaacctggggacccttccttattgttgctaaccaca

SEQ ID NO: 648674 - DNA, 650 bp, Homo sapiens
gagagctggtgcctacgtgcgcggccaaggctgggcggctccttcgacctgcggcgcttcctgacgcagccgcaggtggtggctgcgcgccgtgtgcttgtgtcttcgccttgatctgtgttctcctgcatctatgtgtgagtggctacagcaatgcccacgagtctaagcagatgtacttgcgtgttcaaccgcaacgaggatgcctgccgctatgtgcagtgccatcggggtgctggccttcctgtgcctcggctttcttcttggttggtcgacgcgtatttcccccagatcagcaacgccactgacctgcaagtacctggtcattggtgacctgctcttctcagtggttgtgcttggcctccctgtgcctaccagctgctacaatggctggctgtggacgaacttcatccagaattacgtttgaccccactccgggaccccaagacttgctactgcctcctacccagtgtgcatcttgtggacaactaccaacagccagcctatcaccgcagaactgcggagaccacctgagggctaccagcctggcccctgtgtacttgagcggctggttagctgtgggaatgggggacagagagggcctcccctctgcctggatttcccatgagcctcctggaaactgcagaccg

SEQ ID NO: 648675 - DNA, 772 bp, Homo sapiens
ggcaacgcggagccgggaagtcgtcgctactctggtggaactccgagttggttctggagtgcggtgtgacgcggaggtccctcaagaggatccagcgaggggcgccaacaagaggcgaagaggtggcaccagtggctgtgctgtgcagtgaatgacgtgatgctggtgatgcaggagcgcagtgagcggagctgtccctgaccctgcctgtgctgtactttctgggacgcggacaggtggcagcgggggaatcggcccctgcaggcgaagctgcccggatggctgagggtggttatgccaaagttccgagctgcttgagccgacattcccatcaggctatacgaacggaagaacgggaacacgtttttcgcttatatatacaaaagaaagagcatacgcagcacagagtctcagcaggcgcactcacgggaaggccacaaagaccatcaaccggtaagcacatttcaggaaagacggggtcagcgcagtcacctaaagaccctaagaatcctgtgtgtgaaacacagcatgattgccctgacggaatagccactttagggtgcgcgtgtaggcaacacacggagggtggctcacagcactaggaccaggagggagaccagaggtgcatgttcatcgcagcgacattgggcacgcgtaacttaagcaggccataggtgtaactccacgtagggatgcattaggagatagatcacatacgataacataccatcagccaccaccgtacaagttaagggagaagtcgacttagcag

SEQ ID NO: 648676 - DNA, 1055 bp, Homo sapiens
  misc_feature (631)..(631): n is a, c, g, or t
gctatcatatagtatagaaccttagcccatgacccctaacagggagccctctcagccctcctaactgacctcgcggccgtagccatgtgatttgccactttccactccataacgctcctcatactaggcctactaaccatatcacactaaccgagtagtaccaatggagtggcgcgatgtaagcacgagaaagcacataccaaggccaccacacggccatcctgtcgcaacacagaggcgcgttcgatacgggagtaatcctagtttattacctcagaagtttagatttcctgtcgcaggatttgttctcgagccttattacgcgagctccaggcctagcccctagccgcccaattaggagggcacgtggcccccaacgaggcatcacccccgctgtagatccacctagaagtcccactcctaaacacatccgtatgactcggactcaggagtatcaatcacctgagctcagcatagtctagtagacacaggcaatcgaaaccaaatagattgcaagcactgcttattacaactttgacgggtctctattttaccctcctacaagcctcagagtacttcgagtctcccttcgaccatttccgacggcctctacggctcaccattgtggtanagccccacggccttccacggactttccccgtccttattggctcaacttttcctcactatctggttcatccgcactaaatttcactttaactccaacatcacttggttcgaagcgcggtgatacggcttgagaatggggggaactgaggtccccctgtggcggcacaaaacaaaaaaaaccgcgttctggggaaaaagtatacttttatgctccggcggataggtcgtcaggaacgatattcaaagcaacactcacgaggcagtgtggggcgcacacaaaccacctaccgcagaagcgcgcgaacaacacacgtggacagcgagacaaaccaccgacgcagcaacccacagagtaacgacagaacacggcaccagccgacgcacatgacgcaaacgcacccagtacaccacacgcacaaacacac

SEQ ID NO: 648677 - DNA, 131 bp, Homo sapiens
tgatgttgaggcgatctagagatccgggagtgacgaagaacgtctggtcaccctgtatagagggataggactacaaacttctgactgtagaagcagaagctgcgggtaagaagatccatgagaatgagaag

SEQ ID NO: 648678 - DNA, 794 bp, Homo sapiens
  misc_feature (210)..(210): n is a, c, g, or t
  misc_feature (213)..(213): n is a, c, g, or t
  misc_feature (285)..(285): n is a, c, g, or t
  misc_feature (319)..(319): n is a, c, g, or t
  misc_feature (345)..(345): n is a, c, g, or t
caagcggcatttgggtttttttaaccctcttgggcagtatacccaacaaacaggcatttccccctcgccttccaagaatgcactcgggaacaagaattgcaccctccatttaaccagtaagccctttgttagaaaaagggcagggtccagaggggagtgttcctttttctaatcacagctcggatcaatcccttcttaacaagaagcttncanggctcccctcaataaggctcaaggtgttaccttaccttgcttgtcaggggcttttcaagcttgcttcctacntgctatctccactcctctccaaaccaccatatcntgaggcttctagaaagcaaactctgncggcatggggttaatgggtctgtgtacccaagacactgtacctgggtgctgtcatctgcctgactgaccttcctgtgtcctggtccgatggtgtctttgatcctatagctaagatcaagacactgaaaatctctagactcaagtctgtgcttttgctgggataaagtttgtgttgagtacatctaggctgggtgtggtagctcacgcctgtaatctcagcactttgggaggccaaggcaggtggatcatctgaggtcaggagttcgagaccagcctggacaacatggtgaaaccctgtctctgctaaaaatacaaaaattagccaggtgtggtggcaggcgcctgtaatcccagctactcaggaggctgaggcaggagaatcccttgagcctgggaggcagaggttgcagtgagccaagatcgtgccattgcactccagcctggggtat

SEQ ID NO: 648679 - DNA, 129 bp, Homo sapiens
cacgaggatgatgatgtttttaatccaaattatgtggaggttgaacggatctggggctttgcacgttacacagattaccggagagagcctgtgcctcactagctggtgaagtggtgttcacttccttat

SEQ ID NO: 648680 - DNA, 1160 bp, Homo sapiens
ggtgaacacacacgctccctggaagctggaagactgtgcagaagacgcccattctggactgtctgtgccgcgatgccacgatatcctcctcgtaagccatgtgctgcggtcactcaggcctcatgaagaagccaaggtgaagacaagtggttatgtggacgagagggctgtgagcatcctggcaggtgccccaggatgccacgccatgagaagggccggctatctgcctggggtgcatttcccccgacagatgcataccggaattgtcgacacggacctcgggctagtataaggtagtgcaaagatctctagagtttagtccattacgtgtctcacatcgtatcctggtgtacccaggactctgacaggaaacatacacctgagacctccaaatccaacatctggcgatacacatcatggaaaatacatgtctggagtccccatacctccagccgctggcaacaagcagcttcagatccatggggtaatccggttcatacgaacagtcgatgtacgctaacgaaggtgacccttatagccaggatgctaaagctggtctagcgaaagaaggctaggagttctgtagacagggagttggggcatggggaacagggctggctgcaattgcagtgtcactgctgatgaccttctgaaacagaacgttggaaaggcaacaagaagacaaagcaattacggtaggcaacagaagctcgggagcgacggctcgaagcactccgaaagaaggcccataaggagaacacgacagcacacccacgggcatccaagagccatgggcgaagacaccccgcggcactaaaatagcgcttgcacggcacagaaagcacactacatccgggggcaccaagaccgggacaagtgggacagggaccagcgtcggaccggcaagggcacacgaacgcccgggcgagaatattccgggccaccacgcaggggcacggcaacgaaacccagacccagcaggaagaaaccagcgcacgcagagaacagaacacgacgccacaaggcagatataccgcaatatcacagggacaggtacgacacacccacaaccagcggcacagccaagcaacaagagggaaccacgggcaacaaacccaagcgaaggcaccaaacacaacacaaagaaaaggtgagccaca

SEQ ID NO: 648681 - DNA, 458 bp, Homo sapiens
acccaggctgagcatggtagcttacactgcaatcccagcactttgggaggcgaaggcaggtggattgttgagtccagaagttcgagaccagcctgggcaacacgggaaaaccccgtctccacaaaaaaatacaaaaaatcagccgggcatggtggtgcctggctgcagtcccaactactcgggaagctgaggtgagaggatcacctgagcacgggaagttgaggctgcaatgagcagtgacctaatcactgcactccagcctgagtcactgtctcacaaaaaaaaaaaaaaaaaaggagagaccaaagattgttccctaaaaggaaaggcttcctagggactatataaggccctgggtttgggccttcctcatctgggggaatggtctctttccagttaccaagacttcaagggcctagtttaggaatggttggccagggatcaggagagaaattaaa

SEQ ID NO: 648682 - DNA, 461 bp, Homo sapiens
cctgcgtacacccctatacgcgatgatgtgccccatcaacaccccctttctgcgacactccccatggccacccgtgcagatgaccaggagcacacgcgtctccatatggctctcgtccaggctaacctgccagctgtgcaccggctggtcaacctcttccaccaggggggcccggccctcgacatctaccccaactacggcagacaccgctccacctcgctgcgatcaccacattaccgcctgtggtccggctcctggtgacacctggtcccagccccatgcgctggcacccgcgcagtgccagactggccgctgcacgctggcgtggcgcagccaccggcagccgcgacgctgcctgcgagccctgctggacagcgcagctccgggcacgttggacctggaggcccggcacattatcgggacgctcacccgccctgcacgtggcagtcaacaccgagtgc

SEQ ID NO: 648683 - DNA, 266 bp, Homo sapiens
aaacctgaatatctcacagtcagaaaaattttctcctatgttcgttccaaaaggtttacaagtttaactttcatatttaggcttatgatccattttgaggcaactcttctgacactgttgtaagaggttaagcgctcattcttttcactatggcatatataactatttcacgaaccgttaattaacaaagatcattccgttccccacttggccatctcgcttgaacaatcaactagaccacacgctagctgtgggctctattctgt

SEQ ID NO: 648684 - DNA, 264 bp, Homo sapiens
ccgcgcccagataccgcgcgatgcagcgctttcacctggcgcctgcaggtcctccggccgcccatcgttgaccaccacgtcatcggccagtgccagccgctgtgtgcggctggcctgggcggcgatcatccggtcggccagcgcggcgtcgatgccgtcgcgctgcatcagccgggcgtgctgcactgcttccggtgcatccaccagcagcacccggtccagccaaggataggcgtcacgcccaccgacctcggtcagcagcgg

SEQ ID NO: 648685 - DNA, 538 bp, Homo sapiens
  misc_feature (43)..(43): n is a, c, g, or t
  misc_feature (81)..(81): n is a, c, g, or t
  misc_feature (98)..(98): n is a, c, g, or t
  misc_feature (117)..(117): n is a, c, g, or t
  misc_feature (124)..(124): n is a, c, g, or t
  misc_feature (315)..(316): n is a, c, g, or t
  misc_feature (341)..(341): n is a, c, g, or t
  misc_feature (364)..(364): n is a, c, g, or t
  misc_feature (405)..(405): n is a, c, g, or t
  misc_feature (407)..(407): n is a, c, g, or t
  misc_feature (413)..(413): n is a, c, g, or t
  misc_feature (430)..(430): n is a, c, g, or t
  misc_feature (482)..(482): n is a, c, g, or t
  misc_feature (527)..(527): n is a, c, g, or t
aattcgcggccgcgtcgactacggctgcgaaagacgacagaangggaggggcgtggcttttgttggtgagctgattgtgtncctgtgggtgggacgtnggttggtgattggcaggantctggtnatccgctaacaaggtccaaaatgcagtcttcgttgaaaaccctttaccgggcaagacccatcaaccttgaaggtggagccccagtgacacccatcgaaaaatgtgaaaggccaagattccaggataaaggaaaggcattccccccgacccagccagagggctcatctttgcaggcaagcagctggaaagannggccgtactcttctgactacacatncagaaaggagttcgaccctgcantggtcctgcgtctgaaaagtggtatgcagatcttcgtgaanancctgancgggcaaagaccatcancctggaaatggagcccagtgacaccatcgaaaatgtgaaggccaagatccangattaaagaaaggcatcctcccgaccagcaggctcatcttttcangcacgctgttg

SEQ ID NO: 648686 - DNA, 1248 bp, Homo sapiens
  misc_feature (524)..(524): n is a, c, g, or t
gctgaggcaggaggctctcttgagaataggagttcaagaccagcctgggcaacatagcaagatcctgtctctccaaaaaaaaaaaaaaaaaaaaaaaaaaattttctttttgggatcccaaaggcccctttttttactctttgatttcaccttcttccagagatgtacgttaaaaaattaattttcagaatataattatatttgttttaacaacccaggctgtgatcgggttccacagacaaaggtgggaccaaaacaaaaatttctctcattattattcccctgtgccctcacacattgcattaggcctccccaccacttattcagtattctcccagcacccaagaagtgtggtctacccttttgtgtgtcgaacaaacctcaatataaactcctccccatttgtgcacaccattctatttatctcaccaccaaagagtcctccatatagtctctacaccgttgtgaaaggtattctccctttcgtgcgttgtgttgtgctaccacttgtgcatctgtcggcncttttagaaaccacagtctgtttttcgatctggattctctctctagccaaattctatttagagacatctctattataccgagagaagataatagtgtctctacactgttggcgccctataagaaaagctttctctctctaatatgtggcatctccaccaccttgtggtcaccatcctcccccttatttttcttctccaccatataagattctccctcgcgtgtgtggcaaaacccacactctttttctacagcacgacagacaaacaaactttctagcagctgtcccacgggggggggcgtacaccttctgtttgcccgggtgtataaacacgttctggtgttgacagccaagggtggggcggcgctgtgtggtgtatctactcacccacgatttatatttttatgatgtgttgcaccccccggcggtgtgggtatacctcattgaaacggcccctgttagtgtctaccccccccaaaatatgagtctttagcccctttggtcagtgggggctccgcattgtgtgtctccccgttttttgtttccgccccaaccctctctgccaagccgctcgttgactgttgtttgtggccgccgccaaagtgtttagtgtgtgttacattcccgctttttgggtgtggtctccccgagtgtgttttcattatgtttggcgaccttcgccgccatgtttgtgtgttgaagcgacacaccgcttggcggacaac

SEQ ID NO: 648687 - DNA, 208 bp, Homo sapiens
aaggagcagagctaagctgggcctcacggatgagttggtttgatgagaggacaaaagaaagggggcattgggaggaaagcatcactgaaggcccagaggaagtcataggctcagtgaggaggaacgcaagcctctcatgggagcagaaatatgaacagatttatttacttactttattattattgaatggagtctactctgcacccag

SEQ ID NO: 648688 - DNA, 224 bp, Homo sapiens
  misc_feature (32)..(32): n is a, c, g, or t
  misc_feature (120)..(120): n is a, c, g, or t
  misc_feature (136)..(137): n is a, c, g, or t
aggatcttatgcaccattccgactaaagaggncatcacttgtctcttagctgtctagctttttcaactattcgagagtctttcattatcatcatctggaatagtcacctgaatgatgttnaggtcttcaacacctnnatgcagtagcattaacacttgggtgatgaatttatttattcagggagggctcttatgaggaggtgctctcctttaatacgccggtct

SEQ ID NO: 648689 - DNA, 649 bp, Homo sapiens
gagagagagagagagagagagagagagagagagagagagagagagagacttactatgaggactaactatagtgctggaagcggttcgtgatttacagctcttggttactcccagacatgttgctggcagagattgtggtttttaaggggttgttagatggagtaaatactcttttccacgcgtgtgatcttaactaaaaaggggttacagaatttcagcagttatctgaggtctatattaaattgctcatcctatccaatccctgtcttttgagtgcacatggtaagtacattgtctttaacgttgatgctgcttttcttactacatgtggctgtacctttgggctactgtacactgtttgcagtgctgtccccggcataggaccatgattgcagaagccatttcacgagtacctgaaggctcaacggtagaagcttcaccacaaaagcgaaatgtgcacactacagggagaaaactggttgtactggatgtttgaaaagttgagcgatgttatggtgtgttactttatcctatgtatcattaactacatggcacatagttatgccaaacgaatccagtaacggctgaactcagaggagacaactgtacgttgaggctatagactggattgtagtcgtgggttctgcct

SEQ ID NO: 648690 - DNA, 885 bp, Homo sapiens
  misc_feature (404)..(404): n is a, c, g, or t
  misc_feature (658)..(658): n is a, c, g, or t
tatcgatccatacatctgcggcggtgagggagaagtatcggctcagatcgcttgtgagcccgcctggtgcctccatgagtcacacacgagggatgtactatcctatgtccgagtgcacataagtgcatcctaggattgtcctctcatccggactttgtctatactagagtcgcgccaacactcactcgtaagacgatagatctcagtagtgacgttgaattccagtcccgcttgagcgttacatcgccgctaaagtggccggccgtccacgtcagtgaacgtaaaaagtgcgtgcgcgttcatgttaccgttacaacagtacgcggtcgcacggtcccataataatcttatcgcgaatacaatcttactactaacatcacgagaacctgagaagatcgatacgngatgagtatgataccgttcgctagcttacgttaactaacataattaattgctagacctagggcacttttgctataacgagacataatagagtagcgcgtacgcccgagagctagggggcgcgccacccatatatacggatctaacgtgggaggaggagggcacgaacaagggggtcgggcacttggatccaaatacttattaggctaaactaccctgactcgatatcgcactagtaaaccgacagagtgggacnccgaggaacactaagagggtttggcagactaggacacattcgtaagacaaggatgggtctacaccgtacccaacagatcacagtacccaaaggactcccacatgccacatacaaacaagcggaaatttccatgtgtgaccccttatctagacacttggtgcataactataagacccactttggcgataccaagtgtgggcagtgccacctaggatccaggacaattg

SEQ ID NO: 648691 - DNA, 199 bp, Homo sapiens
atttccacaacggaacaattctagacctgtaggcctgtcacccaatcgaaatctgtcagaagcgaagtcggcttaatacattgccattgccaaagaacagcatgggtacaacatggaacaggctcttgggatgcgcttctggcataaacataatatcgacaagtcattggctactgtgaccaactttacccctttccca

SEQ ID NO: 648692 - DNA, 122 bp, Homo sapiens
ttcgactctaaggatccgagaacgctctaagcctgtccacgagctcaattagggaagcctgtgactgactacagactttgcgaacgctacgccatggtttatggatactaatgctgcctata

SEQ ID NO: 648693 - DNA, 101 bp, Homo sapiens
actcaactgggagaacagtaaatgtgtgttactgtggacttctaatacatgatactttctgcactaaaaaaacaaaaccaacaacaacccaaaacaaacac

SEQ ID NO: 648694 - DNA, 614 bp, Homo sapiens
  misc_feature (141)..(141): n is a, c, g, or t
agtaagacccctttttttggtgaccctaatggggtttccaagagaagggttcacattattacaattcccagaagagttgttgtttggggtccaagataagaagaaagaaaaacccccagcctttttccattttgacaggcnaccagtggtttaagtttttaaagggtttcccaaatgctgaaggcaaggggggggggcaaaagcccttatgtttcgggatattttaaactttgttaaagagcagcctttgaaaatccccaatttggtttgggtttttgccctttttttcccttttcaggggaatttttgggggccaaacgaaagcatttccaagctttagagttttttgaattccggggccttcctgaggggagccctgagggtttttttaagcagttttcccaagggtcccgttggtctttctgggttttttgttaatggggggcaaaagcaatttcccccccccgggcattccattttttatgttggggaaagtttttcccttttttttttgagggggggggggtgggggggtcagcatgattatattttaatgtaaaaaatgggacatttggaaataaaatgaaaaaaaatgtttaattaaagggccctta

SEQ ID NO: 648695 - DNA, 1295 bp, Homo sapiens
gactgcgcggatgcacagaggtcgcgggagagcgttctgggtccgagggttcactgtagggtcttgagtccaccatctgaccggaagctgcgattcagtgtcggcctgcgtgtctggtcgaggtcgacctacttggagtcgcatgtacatccgaggtgtgatattgaaggtaggtggagcttgaattgatttagagcccgagaagctagccgatgagcgcggacgtctgggcgcgtgcctatgttccttgacggagcagccaagaacgaataggtgtctgggtgaaggatcaaggtgagcgcgtagagagggaggatggtagggggcgaaaaccagttaggaattaagttctaaggcgccatcgttccgaagggagcgtagcttgcctgaaaatgttggccagggccagccccctggccttgcgtattacgacaaccacagcttgtgcaacatcgcttggctagcatctatctaggggtcggatcttgggcctgctggtcattcgtttccttggcgtgcgctcgccctgattgggctcgataaaactccggttgacagaaggcgcaccgactggttatgatcaggcggacggcgctttcctgaggcgtcaaggcacccgttggggtatgggacaacaaacggcgggaggccgcgtcatcaccgccattcgggtcgggacctttcaagggcctttctccaagagggccaacggtgaataggccgggaaggccgaaatcgcttggcgcccgtgggtccttgcgaacacggggcgcggagttcttcggcaaatataagcccctggacggccttctgtcccttgaagaagaggtttgtacaaggggggccctttttggatgggcaatgggcgcgagtcatcacattagggaccaaccacacagggaagaacccctaggaaaaaggggacatttaaggtggtcacggcttccaagagaaccttgtagcttagtgtctgtggcagagaattccggaaggcgcccctgaacactcttgtggtgcttccgacgagaggaaagagccaagttaagtcgggcaccacggtacattcgtttatggtccaaactatccgttgacgttacaggcacgaacagagagacaagtcacgttccagtgtgtccacatatccttgggcaccccactttaacgctccccccaaagcattatacccggcggggttgagaatgaagacccaattcgcagatgacctacctaccaacatacgagtagatttggaacacaccttggtgcgttcacacacaaacgggttgcaaacgtgg

SEQ ID NO: 648696 - DNA, 401 bp, Homo sapiens
  misc_feature (281)..(282): n is a, c, g, or t
  misc_feature (344)..(344): n is a, c, g, or t
tagcattgatgcacctattctttttttaaaaaggaagggtctccgaaaaccttaaaaaaaaaaaaaccccccctgatcctgggaaaaaaaaaggtttttaaatttggggggaacctttttgaaaaatttttgccccccttttttgttccaaaaaaaccaccctctttttttttgtgtagaaaaaaaaaaaaaaaaatttttctcccacaacctttttttgtaaaaaaaaacaaaaaaaaggggggggggggggggggggtgttttttttaaataaaaaaannccccccaccccctttttttttctttgtgggagagggagatcatttcttccccccccaccctnttttttttgcgccccccccccccccactgttttttttccccccccccttcttttttt

SEQ ID NO: 648697 - DNA, 298 bp, Homo sapiens
  misc_feature (69)..(69): n is a, c, g, or t
  misc_feature (234)..(234): n is a, c, g, or t
  misc_feature (267)..(267): n is a, c, g, or t
gctagtacgcgaattgggagaaaaagttcaagtgggaagcatgtcgtctttatcgctcaggtatctgtnctactgttgcagcacgtttctgtttgtgaattttgctaaaattgcttgtatttagactgcattggtagttggagtcatgaaaacaatctttttatgaatccaattgggtagaaagataaagtacaggcagagcgccgtgcttaggcctgtaatcccagcacgggnaggtggaggcgggtggatcactgtagagaccancctgggcaacatggtaagaccctgtctacaa

SEQ ID NO: 648698 - DNA, 153 bp, Homo sapiens
ttagaagctaccgcaacggctatgctttctgaagactgtttcatagagcttccaagatggtagataaaccttttaaactcaggatttggactatgtgctcaactcagaaggactgtcattagcaatagcagaaggtacccactgcagtgccac

SEQ ID NO: 648699 - DNA, 173 bp, Homo sapiens
agtaaaactcggaattagtcaggcgtggatggcgagcgcctattatcccagctactcgggaggctgaagcaggagaatcatttgaacctgggaggtggaggttacaagatgagccgagaccgtatcacttcattccagcctaggcaagagtgtgaaactgtcaaaaaaaaaaa

SEQ ID NO: 648700 - DNA, 419 bp, Homo sapiens
  misc_feature (11)..(11): n is a, c, g, or t
  misc_feature (155)..(155): n is a, c, g, or t
  misc_feature (177)..(177): n is a, c, g, or t
  misc_feature (273)..(273): n is a, c, g, or t
  misc_feature (277)..(277): n is a, c, g, or t
  misc_feature (292)..(292): n is a, c, g, or t
tcaggaggacnggtcagggaggagttagggcaggaggactggtcagggaggagttagggctggaggacgggtcagggaggagttagggcaggaggacgggtcagggaggagttagggctggaggactggtcagggaggagttagggcaggaggantggtcagggaggagttagggcnggaggactggtcagggaggagttagggcaggaggacgggtcagggaggagttagggcaggaggaccggtcagggaggagttagggcaggaggaccngtcngggaggagttagggnaggaggaccagttaggaggcagtgacttaggacttcagcagtggcactagaaaggggctggatatgaacgacattgcaaagtaaaactagagagacggccgggcacagtggcccactcccgtaccag

SEQ ID NO: 648701 - DNA, 462 bp, Homo sapiens
  misc_feature (11)..(11): n is a, c, g, or t
  misc_feature (155)..(155): n is a, c, g, or t
  misc_feature (177)..(177): n is a, c, g, or t
  misc_feature (273)..(273): n is a, c, g, or t
  misc_feature (277)..(277): n is a, c, g, or t
  misc_feature (292)..(292): n is a, c, g, or t
  misc_feature (409)..(409): n is a, c, g, or t
tcaggaggacnggtcagggaggagttagggcaggaggactggtcagggaggagttagggctggaggacgggtcagggaggagttagggcaggaggacgggtcagggaggagttagggctggaggactggtcagggaggagttagggcaggaggantggtcagggaggagttagggcnggaggactggtcagggaggagttagggcaggaggacgggtcagggaggagttagggcaggaggaccggtcagggaggagttagggcaggaggaccngtcngggaggagttagggnaggaggactggtcagggaggagttagggctggaggaccggtcagggaggagacttagggcaggaggatcggtcagggaggagttagggcaggaggactggtcagggaggagacttanggcaggaggacgggtcagggaggagttagggcagggggaccggtcagggagaa

SEQ ID NO: 648702 - DNA, 355 bp, Homo sapiens
  misc_feature (11)..(11): n is a, c, g, or t
  misc_feature (155)..(155): n is a, c, g, or t
  misc_feature (177)..(177): n is a, c, g, or t
  misc_feature (273)..(273): n is a, c, g, or t
  misc_feature (277)..(277): n is a, c, g, or t
  misc_feature (292)..(292): n is a, c, g, or t
tcaggaggacnggtcagggaggagttagggcaggaggactggtcagggaggagttagggctggaggacgggtcagggaggagttagggcaggaggacgggtcagggaggagttagggctggaggactggtcagggaggagttagggcaggaggantggtcagggaggagttagggcnggaggactggtcagggaggagttagggcaggaggacgggtcagggaggagttagggcaggaggaccggtcagggaggagttagggcaggaggaccngtcngggaggagttagggnaggaggactggtcagggaggagggggatcctcatagatgtcgaaccttgcaaggacatgcaaa

SEQ ID NO: 648703 - DNA, 490 bp, Homo sapiens
cgtggtggtctcgattcgggcctcatgatctggcccgcctgggcctcccaaagggctggggattacgaagcatgagccaccgtgtccagccgggttgggtttttttggagatgggagtctggctctgtcaccgaggctggagtgcaagggtgtaatctcagctcacggcaacctcggcctcccaggtcaagccattctccggcctcagcctcctaagtagctgggacggtaggcatgcgcaaccacgcccagctaattttggtattttaagtagagaacgcatttccaccaggtgggctaggtgggtctcgaactccgtgacctcaagtgatccacccgcctcggcctcccaaagtggctgggattacgggtgtgagccacggtaccgggccaagacatggttatcagagggagatgacagctccatacatttcactgcccctgaagaccttccagggggaccagatgtggaggggaagacagtgatatg

SEQ ID NO: 648704 - DNA, 892 bp, Homo sapiens
  misc_feature (6)..(6): n is a, c, g, or t
  misc_feature (17)..(17): n is a, c, g, or t
  misc_feature (155)..(155): n is a, c, g, or t
  misc_feature (189)..(189): n is a, c, g, or t
  misc_feature (222)..(222): n is a, c, g, or t
  misc_feature (231)..(231): n is a, c, g, or t
  misc_feature (233)..(233): n is a, c, g, or t
  misc_feature (236)..(236): n is a, c, g, or t
  misc_feature (256)..(256): n is a, c, g, or t
  misc_feature (260)..(261): n is a, c, g, or t
  misc_feature (292)..(293): n is a, c, g, or t
  misc_feature (312)..(313): n is a, c, g, or t
  misc_feature (315)..(316): n is a, c, g, or t
  misc_feature (320)..(320): n is a, c, g, or t
  misc_feature (325)..(325): n is a, c, g, or t
  misc_feature (353)..(353): n is a, c, g, or t
  misc_feature (356)..(356): n is a, c, g, or t
  misc_feature (377)..(377): n is a, c, g, or t
  misc_feature (387)..(387): n is a, c, g, or t
  misc_feature (399)..(401): n is a, c, g, or t
  misc_feature (411)..(411): n is a, c, g, or t
  misc_feature (428)..(428): n is a, c, g, or t
  misc_feature (453)..(453): n is a, c, g, or t
  misc_feature (466)..(467): n is a, c, g, or t
  misc_feature (482)..(482): n is a, c, g, or t
  misc_feature (488)..(488): n is a, c, g, or t
  misc_feature (492)..(492): n is a, c, g, or t
  misc_feature (501)..(501): n is a, c, g, or t
  misc_feature (518)..(518): n is a, c, g, or t
  misc_feature (541)..(541): n is a, c, g, or t
  misc_feature (559)..(559): n is a, c, g, or t
  misc_feature (583)..(583): n is a, c, g, or t
  misc_feature (795)..(795): n is a, c, g, or t
  misc_feature (880)..(880): n is a, c, g, or t
aatggnggacgcgtgangaggaggcgcgggcggcggagggaggccggagcgggcagcgcggcggcgccatgtccgtgaacatggacgagctcaagcaccaggtcatgatcaaccagttcgtgctgacggcgggctgcgcggccgaccaggcgaanaactgctgcaggcggcccactggcagttcgaganagccctcagcgcctttttccaggagaacaaaanaccctaaancnaanataaaaaccagatgatgtgnaaanncgcaaatacccctgctaaaccccccaacttnnctgaagctctcaccatgtnntnnagtntcaangatgtccgagagcttccaaagcggtggnagnggaagacgatggccgcgaaanaacgtaaaanacgcaaaaattnnnccatgcagcnaccagaagctctgcggncctccagctggaacaaggaggcctngaacccggggggnncaaagaaaaaaaagnaaaagnagcncctgtggantaaaaaaaaaacttatnaggcttcagaatggaaaaaattngaacaaaaaaaggataanttagaaataagggaacacactgcnatggaggcagagagataagggaggcccctcccccctcccggaggccaggaccccgtggggcgggggagaggacgtctctgcgggcccccttcaccccttttctgtctgcaccccttgttccccggagccctggaggggagagcgcggactctagccaggcagggacacgtctggtgccagaacacgcagctgcccacacgcaaggtcatggncccagcggccccggcacatggagtggttcagagcggcctgggtgcctggcggacagaacttcagagacacgcagcttccttcganacgcactgctca

SEQ ID NO: 648705 - DNA, 231 bp, Homo sapiens
atctagagatccccagcgccgagcattacaactataataaagtacaattgaacctgaccatggtttttacttagatactggctagggcattgtagtggtgcaaaaaaattaacatagttcttttcaaaatgaaactgtcctcgagtgttctacgagacctaagagggtttcaaggagatcaaatcctaaaccagtttggcgtttaatggtttttggattggagtccgatac

SEQ ID NO: 648706 - DNA, 316 bp, Homo sapiens
tgctatgtgctgcgggacacagcatgtatgactggcctgccctcgagaagcgtgtggtctatgcagtcctgagcgtggttgctcacaagaatgatgccctgtcgccctatttctcagagggtggtcctgacctgcatcacagtgagctgagttgtacgtcaatacagaaaagggtttctcaaccttggcactattgacatttggggcctgataataaccctttattgcacggggctggctgtgctttgtttagtagcatccctggcctctacctatttgttaccagcagcaccctctatgttgtaagaatcaaaaa

SEQ ID NO: 648707 - DNA, 1044 bp, Homo sapiens
taaaagggcaaaaattgacttttttgaaggaaaggggaatgaggacaactgtaaactcacagtgacccctgtggaaaaaaaaaacaacaaaggtggtgggttttgtctcggaggcctcgtgcgtgctcaagtggatttccaggagcaaggccattttgtcgcgctatccaaatttctcttaggcattatattttggaatagagtttatagccatcattgttttctaagagacttggagaccaccagacaaacgtgtttagaaactcaaactctttcaattacctcaaagaaggacccattctcagtaaaactcaaggtgaattgacagcagttttgggaactcgtgcgtgggggctcctctcccgtgtttgcacccacttgggataacttataattcgtgacaaaaactctttgagcttgaaacaggcctttgccaagaggggcgtcgagagagtgcggcaagaggaagcaggggcggattagcgacaaagacagcagggtaaattataccaattttcccccttttaaaaggttaaattattcggccaaactcgataattctcgtgaatgtgctccctatttaaagcacatgagtctgaaaacttaaaccagaaaaggccaagagttaattcctgattgtgtacaataggctttactcacaaagcaggggggttagccatattgaacctgtgtcccaacattcaaaaccaacagaattaaagggaccgtgcccaatccaccacaagggcgttaaacagcgcacccgcggttcaagaactttcccgacggcgcgcgttctcgctgaaacaaaggacacggggcacgccccagagaagtgcaagagcaatgtacaagaggcatttgccatttgctacacggtgtttggacccacaaagaaagtttacaccacttcccaatcggcttcccacggcgtgaattctcccgggacatgagcaaattggatatcgaaaaccccaaaagggccacccctttggaagtgggatataacatcaccgcttcttccgaaaagcagtatatgcatca

SEQ ID NO: 648708 - DNA, 913 bp, Homo sapiens
ggaatcaatatagtaataagatatttaaaattgttaaatcccaagttaccaccctccaagatggttttggatatggctggagcaaagtaggagaaatgaacagatgacctcattatctcttagaaacctatgattccatgaacatgatacaggttttatgcatgatctgccctgtttacctcaaaatgtctgaagtcagtgagtcagaaaaaaccaaaattgctatagaaatgccagtttggaagacatcttgttttagttagaaggattttgtggaaatatgacttaagcctttgtgtttcaaaagatgaggtgtatttccctgggaaaagactcaagaaaacccaaggaaatggcaagatttattttctattaaatactttggaaaaagacagaagtctcaatccattagtcacaaccaaatgcccagtgatgaagttcctcctcttatgactcttctggaaagattcatggctgttttaatctgacccttcctttccactctgtgactccacctccagtctgagttgtctgtttactcatgacagctcttaatagccaaccagcctgttttaagtgtctctagcttatactgctccgatccaattcttacacccctgaagccaaaagaatcctttccaggaagagctgcttaccgacctaatattcaactcaagttgtccccattgtgttctagattaagattgtgagaattgagactcccaggggatgcacgtccaattttggagtcctcaaacgcaaaaccgtgctgcactaaggctctagtgaccaattcacgaccggtcacaggggcgcaccgctggcagaggcctccagtaacccaagggaagatggtcccgggaagacttcgtcccaaaaaactgacgagatatccaaaatacgggccaagcaa

SEQ ID NO: 648709 - DNA, 276 bp, Homo sapiens
gacgtgtgatcaccaacagagagaggcaacctggatcagtttacgtggttcacgtgaaagatgccaatggaagcagctttgccactcgactttccaacatttttgttattggcaagggcgacaaaccatggatttctcttccccgaggaaagggtatccgcctcaccattgctgaagagagagacaaaagactggcggccaaacagagcagtgggtgaaatgggtccctgggtgacatgtcagatctttgtacgtgattaaaaatattgtggcagg

SEQ ID NO: 648710 - DNA, 883 bp, Homo sapiens
gggctcgagctcggggcggtgggggggtggccggaggggggggtgccctcgctcctcctcgccgcgggcgggggcgtgatccgagcgaggggccggggcccccggtgaaactgctggcgggctgggtgtgccattggagcatggaggtcccggatgttggcatggcgcgggtggatgtgcgacggcatgcgagaagccgctggttgcaagccgtatcccactgataacaggggaatccattgaattatggcgggccccggggtgtgggcccaggccgtagggccgaagggaccaagcggaagtagtggagagaagacggagcaagagtgggattaattgttcgggggacacatcgagaagtgggaaaaatttatttgcaaattgtaccattacgaggggcatgggttgtttggtgtgtccgaggagagataatgcgctgggactccaagggtgtaaccaacttggattctgtcgttgtacaaaacaacagaaggattgggggaaagaagatgtcggagggttggaccataagtggaatccccaagctttaccttattccaactttcccctacgaagggggtctcgcttccctgggttatataagaccccctggtggatataacgagctctcagcaaacactttcgcttactctacacgtggcggagctctggggtaaggcacaacacaaggaggttcacagtgagagcatacggtgagcactggcacatacacgagggaaatccgacgtgtatctccaggaagcaacttgggtcctaacacgatttttcccatctactactccgcgtgtgggtaacggtacccctaaagaggatctgccgtgggaattaatggcgcgaccagaggacgttcgtggaggaattg

SEQ ID NO: 648711 - DNA, 304 bp, Homo sapiens
attgttttaaaagggagtttcgcttttttcccccgggtggggggcaatggggggtttttggttccttgcaagttccccctcccgggtttccccctttttttttcctcaccctcccgagaaggggggataaaggggcctccccccccgcccgggtaattttttttttttttaataaaaagggggtttcccttttttagcccggagggttttttttttttgacatttttttttcccccccccccccccccaaagggttgggttttcaggggtgagcccccgggtcgggcccccgttttttgttcca

SEQ ID NO: 648712 - DNA, 408 bp, Homo sapiens
  misc_feature (117)..(117): n is a, c, g, or t
  misc_feature (335)..(335): n is a, c, g, or t
  misc_feature (356)..(356): n is a, c, g, or t
  misc_feature (398)..(398): n is a, c, g, or t
ttttttactttttgtagagatagggtttctccatgttgcccaggctggtcttgaattcctgggctcaagcagtcctcccacctcagcctcccaaagtgctgggattactggcgtgantgccatgcccaacaagttcaactttttaagactctgtatataagtgagatcatggggtatttgtctttctgtgcctggtttattttatttaatacaatgtcctctaggttcatccatgttgtcacatttgacagaatttcttttttaaagctgaatagtattccattatgttgtatataccacatttatatcccatccatcaatggacacttaggatngattccatatcttggctattntgaataatggtgtacctaacatgagaagtacagaatacctcnttgacatact

SEQ ID NO: 648713 - DNA, 210 bp, Homo sapiens
  misc_feature (105)..(105): n is a, c, g, or t
gacagagtgagatcctgtctcaaaaaaaaaaaaaaactttgcttcttgaaagacttctgggtcttacccttcttaccctttctgatttgaaggagaggtatctgntgtgacaattttcttgaagcattgctatccatttgtctgtttatttaattccatttctagggctacactgggaatagatgtgacatctgggaggtttccccgggg

SEQ ID NO: 648714 - DNA, 1073 bp, Homo sapiens
  misc_feature (77)..(77): n is a, c, g, or t
  misc_feature (146)..(146): n is a, c, g, or t
  misc_feature (148)..(148): n is a, c, g, or t
  misc_feature (177)..(177): n is a, c, g, or t
  misc_feature (197)..(197): n is a, c, g, or t
  misc_feature (201)..(201): n is a, c, g, or t
  misc_feature (203)..(205): n is a, c, g, or t
  misc_feature (208)..(211): n is a, c, g, or t
  misc_feature (217)..(217): n is a, c, g, or t
  misc_feature (234)..(234): n is a, c, g, or t
  misc_feature (239)..(239): n is a, c, g, or t
  misc_feature (243)..(243): n is a, c, g, or t
  misc_feature (246)..(246): n is a, c, g, or t
  misc_feature (289)..(289): n is a, c, g, or t
  misc_feature (297)..(297): n is a, c, g, or t
  misc_feature (314)..(314): n is a, c, g, or t
  misc_feature (316)..(316): n is a, c, g, or t
  misc_feature (337)..(337): n is a, c, g, or t
  misc_feature (348)..(348): n is a, c, g, or t
  misc_feature (438)..(438): n is a, c, g, or t
  misc_feature (549)..(549): n is a, c, g, or t
  misc_feature (551)..(551): n is a, c, g, or t
  misc_feature (793)..(793): n is a, c, g, or t
  misc_feature (899)..(899): n is a, c, g, or t
  misc_feature (907)..(907): n is a, c, g, or t
  misc_feature (998)..(998): n is a, c, g, or t
  misc_feature (1031)..(1031): n is a, c, g, or t
tatataatatagtaatatagtttgttataatataatagctaggctggttacggtccggtatattcccgggtatagcngccgccgccgccgccgccgccgccgcctccgccgcggaggaagacagcgccgcccgcgcaccgccagcnanccccgccgcagagttccaccgccacaggnctcgggccagcggcaggagnggangnnnggnnnnggggtnggggggggctcaggggngtttnaggntgngttatggggttggggcgatgtagtgagctggagtaattgaganaggaggtnggagcagctttggaacnanatctgggatgcacgaaaagantgtggggattnaacactgacttagattacagctgggctggtacctagtggtggtattaatttagatgaggacctctggtaggacccttccgtgggcacttngtaaagatctatgctatgcactgggggatcgattcaaggctgtctgtgttagcgcctcccaggatgggaagtttataatctgggaaagctataccaccaaaaaggtccatncnatctcgctgtgctcctcctgggtaatgaactgtgtctacgcgctctcagggaactttgtggcttgtggggggttggataacatttgttccatctacagctttaagacccgtgaggtcaacgtcagggtcagccgggagctgcctggccacactgggtacctgtcgtgttgccgcttcctggatgacaaccaaatcatcaccagctctggggataccacctgtgccctgtgggacattgaganaggccagcagacagtgggttttgctggacacagtggggatgtgatgtccctgtccctggcccccgatggccgcacgtttgtgtcaggcgcctgtgatgcctctatnaagctgtnggacgtgcgggattccatgtgccgacagaccttcatcggccatgaatccgacatcaatgcagtggctttcttccccaacggctacgctttnaccaccggctctgacgacgccacgtgccgcttnttcgacctgcgggccgatcaggagctctcatgtactccatga

SEQ ID NO: 648715 - DNA, 923 bp, Homo sapiens
gaagaagcattcggccgagactcgcggccagttaccgtgcgttcaacatggtctggagacggaatccgaggcagcagctgctaatgagtagggctgggcattagcaagaccttaccgaaacgctctggcagcgaccgctcggtgatctgacacaaaagtggcacatgggaggtctgttgcaggagtcggttgactggatctaggcacgcaggcgagtcgaagtcgacgcttcgatcatccgaatataaggaccgggcccttgacctggcagggttgcgcccacgaaagttaaccaccagggaactccatagggccgcaattaaaacgcgggcgagaattccaacagtgtgagagacttctaaagggccgtccaatgaagggttaataaccttggttgccaattgttcgttaaatttgaatttgtggaacggcggagaatggaagtggttgagctttttgaaaagaaatttggggccaagaattaactttatctttgcaacagagatctttactatgtagtgaagaaggggaaaacattgctgtgaacaaaaaggtgatttgaaaggctgtggggagaacacaaaagagaggtttggtccgtacaatgtttaaaccttgggaggggctaattccaaatgagaaacagagcattgggtgacattgtacgtggagaaaagcggggattggaaaattggcatagtgggacgttggcgcatataacattttggggaaaaagaagcttggtgaattcaaggacacatactgtggagaagcggggaaaaaaatgtgggccagttgcacaaaaaaaagatggcaccccaaaatggggtcgaagacttacattgggagagaccaatttactcttggaattgatgcagggtaaaggcattccaaagaaataggggagtgccacggtaacagtg

SEQ ID NO: 648716 - DNA, 567 bp, Homo sapiens
  misc_feature (16)..(16): n is a, c, g, or t
  misc_feature (18)..(18): n is a, c, g, or t
  misc_feature (28)..(28): n is a, c, g, or t
  misc_feature (73)..(73): n is a, c, g, or t
  misc_feature (83)..(83): n is a, c, g, or t
  misc_feature (98)..(98): n is a, c, g, or t
  misc_feature (100)..(100): n is a, c, g, or t
  misc_feature (117)..(117): n is a, c, g, or t
  misc_feature (123)..(123): n is a, c, g, or t
  misc_feature (143)..(143): n is a, c, g, or t
  misc_feature (156)..(156): n is a, c, g, or t
  misc_feature (170)..(170): n is a, c, g, or t
  misc_feature (179)..(179): n is a, c, g, or t
  misc_feature (231)..(231): n is a, c, g, or t
  misc_feature (247)..(247): n is a, c, g, or t
  misc_feature (268)..(268): n is a, c, g, or t
  misc_feature (319)..(319): n is a, c, g, or t
  misc_feature (323)..(323): n is a, c, g, or t
  misc_feature (352)..(352): n is a, c, g, or t
  misc_feature (559)..(559): n is a, c, g, or t
gggttggtttgtgtananaggcgtgacnagcccgttgtccggagtgcacccgccgcccgttccgtcccccccnggagcccccnccgccgtcgccgtcnantcgccaaggaagtgcanaaaaangcacagcgcatcaagacccngtcggtgtggaanatgtatcactcccncatgcagcncggtggcctgcggctgcaccggaaacagcagctgtcgctggtcatgcgcacncccgggagccctaccncccggccaaggtggaggcccncgagcccgaggtgtcgttgccggccgccctcccccctgacccccgcctgcncccnccccgaaaagccgagtccacggccgaaanaacgacccccgacggtgaacccccgtttccggagccaatggacacgcaggaggcgccgacaaccgaggagacctccgcctgctgtgccccgcgccccgccaaaatcaaccgcaaacgacgcagcacagcctgagcgacggcggggaagctggactggtcccgaacaaaaaaccccgtctggaacaaaaagaaaaagaggagagagcntatccgca

SEQ ID NO: 648717 - DNA, 767 bp, Homo sapiens
tagaccatgtaccctaccagcggcctctcagccctccctaatgacctccggcctagccatgtgatttcacttccactccataacgtctcctccatactaggcctactaaccaacacactaaccatatcccaatgatggcgcgactgtaacacgagaaagacacataccaaggcaccacacaccacctgtccaaagaggccttcgatacgggataatcctatttatgacctcagaagtttggttgcttcgcaggattattctgagccttttaccagctccagcgctagccccataccccccaaatgaggagggacactggccccaacaggcatcaccccgctaatactcccctagaagtccacaaatcgcgtaaacagcatcgcggattactcgcatcaggagtatcaatcaacctgagctcacgatagtctaatagaaaacagaccgaaacaaataattacaagcacgcttatcacaactttcacgtgggtctctattttaccctcctacgagcctcagagtacttcgaggtctcccttcaccatgtccgacggaatctacggctcaacataataagtagccacaggactaccaaggaactatcacgtcattataggtcaactttcctcactatctgcttcatcgcgccaggtacctatttcaacttaaataccaaaacatcacttttggctttcgaagccgcggctgatactggcatagcagatgtggctgactaattctgatgctccctctattgatgaggtctt

SEQ ID NO: 648718 - DNA, 843 bp, Homo sapiens
aagttctcagttaatgttatgttgcttaacctggcaagtctaaaagcctttctttaaccttgtaggaattagacttgccaggttaagcaacagccaagtttctcagtaatgtattgcctttgattatatctttatagacttatcatatttgccagcatctcaaaactcccagatcttccttgcatttatagtccttcaatcttttcatgttctgcagccaggcacagggtcaaaagcaaggcaacctcgcattcgactgtattcaactagtcccatgggctgcagcacggggcatctcttttcttccatcactcgccaatgtttgctaagcatcaccatgcatccagcacacccagcagggttagggcaattcttgcaatcaccttcaacagtgctcgcacaatcctgccagccctggtccctcaaggcaccagttaacagtttgcactcgtacacacactttcattttcaacaaaggtttattattcttttcacatttcaacatgcaacatcggggtttgcaagtgcaaccatgcattttgtttgaccatgtatcgtgcaattcacagatgcaacatgccattggtcagaatcgtagtgatggtcttctagtcgataccttcaattgtttacattattccccagtcttctgtcatgtcatctgcatagacacaacgaacaaaaacaaaactcctgctttgttcttattggaagggtttcccaggactggtgtctgctcctgagctctgtattacgtcctgtgatcctttggttgtcattgtaataaaaaaaatagcaaaaagacaacacaaaaaagggggggacaaaaaccccaaggccaca

SEQ ID NO: 648719 - DNA, 219 bp, Homo sapiens
acggcgtccccactagtgctagagccgtcgacctcgcggtgagcttcgaaatgttcagccctagagtgctggtaaaggtaactaacagtgttagggttgactatagttatattctttaacttattgaatagattgggtctctgtagtatgagccaagcatacaacctaacaactgatgcttagctcccattgggttaatacttcaggccaagcaagcta

SEQ ID NO: 648720 - DNA, 1118 bp, Homo sapiens
gggcctgctcccgccggtgggctccttgctcgtgccgtgggccgctggccatgggagaggcctgaggtgtggctggctggggtgcgccgcatggcgcacaatggtgccctggggcgaggcggccaccagcccggcggaggagacagtggtgtggagccccgaggtggaggtgtgcctcttccacgccatgctgggccacaagcccgtcggtgtgaaccgacacttccacatgatctgtattcgggacaacgttcacgccacgaacactcgcggcgcgcacggtcccatccaacggctcactctcgcgcgaaccatctgacgcaccaatgtaccgacactgcacggccgcctgcactgagtcttgaccattcttccattcccgaatccacgagaggaactccgtcccttccagcaacgagactcatctcaggaaggtccgcacgacaggcaccacgctcgaccgcactcccacgacggaccacgcacacacgacgcgaccctcgcacgcgccccacccgccacccccccacctctgctccccctgcaacacccttcaccacatctatcacacacactcacgccaccacaccccctcaccacccactccacccccaccaccaccacacaacacacccacacacacccaccacaccccacacacacgaccccaccaacacccgcaacaccgccaccccgaaccccaacgcaccacccccccgcacccacacaaccacacacacacccacaccccagacgacacacacaccgccacgacgcagacacacccaccgacaggcaacgacccgcaacaaaccggcccacgaaccacgcaccaacaacgcaaacgcccacccccgagcgccaccacagcccacccaccccccaccaccacacacaacccccgcgaccccaacagactccgtccacccccgcgccggcaaccacccccccgacgccacccacacacccaccaccccaccccccacacccaaccaacccacccccgcaccccacccccacacccccccaccaccacacccccccaccaaccgaacccccacacccccacacccaccacaccttcccacacacagactcccaccaccacacccccaatg

SEQ ID NO: 648721 - DNA, 356 bp, Homo sapiens
  misc_feature (137)..(137): n is a, c, g, or t
  misc_feature (225)..(225): n is a, c, g, or t
  misc_feature (231)..(231): n is a, c, g, or t
  misc_feature (253)..(253): n is a, c, g, or t
  misc_feature (256)..(256): n is a, c, g, or t
  misc_feature (261)..(261): n is a, c, g, or t
  misc_feature (348)..(348): n is a, c, g, or t
acttcctggctgcgctctacggccccgccgagccctaccgctcccacctgcgcaggatctgcgagggcctgggccggatgctggacgagggcagcctctgaaccccggcgccgcccaagcgcgcccctcgcgccttntggggctctcctgctgggcgcgggtggggttcgtgggtttttttccacctcttttctcccgaatcggactccggccaaactcccctangacagnatggggttggaaccgtggttcntcnccttntgtgacgacggactgctgaggcatctggtagcagctggtttcaagacaccaatggtcaccttctcctccttggcccccgtgcccaantgggccgc

SEQ ID NO: 648722 - DNA, 111 bp, Homo sapiens
agctgcagattgtcaagaggattcttacaagtcatgactatcaatgattagtgtggttctcagattgccagacaaggaatatgctttcatagtacgtcagattatgtgcct

SEQ ID NO: 648723 - DNA, 578 bp, Homo sapiens
tgatttctgcaacctccagatttctttcttgacccttcaaagtggaacagtccagtgccaaaaattttagagtttgagaaggtcacagaaatcctctagttggggcctccacagtcttcattttacagaggaactcagggctaatggagttaatgcaactagatcagggttttgggtctgggttctttctaccgtcagcacctgtgtggtcaattctggacactttcccagagaagtctttgagtagagaatccctactcaaattcactgtatattttaagcattcctctcctttcccttggcctcccctggtgccttttcttcccctgaattctcctctgggcatcttcttttcccttttgggtgtaagccatgggaaaagggattaggggaggacagcttctgggtaaaacacagggcccttttttcacataaaaagaacattggctttcctgggacaaaaaggcctttaaaggaggggatggaaagcatgggaaaacgggtctgaattaattataccccatccccatgaaacaaaaacttaggggaaagggggggggggccaaccactgtttaaa

SEQ ID NO: 648724 - DNA, 203 bp, Homo sapiens
cattggatgttggagaaaatggatttgaaggagttcgacttggcctgccctgttgggctactagattacctggacaagccactgccagatgaccttctgaccacgcttggactcactacttgtactctcttttgctccctcctagatccagtgatgactaattacatgcagtccccccccaggacggctgtagacccaagttt

SEQ ID NO: 648725 - DNA, 839 bp, Homo sapiens
  misc_feature (216)..(216): n is a, c, g, or t
ggctgcgcccggaggggaagcagagcggacgggcgcgctgggaggcgcgcagagcttccgggctgcaggcgctcgtgcgcctggggaaatggggctgtgggccgaggcgggcccgggcgtgggcccttttaatccgctcggggtgggggcccccaattccgttttggggaaaaactttttttaattccaggacgggaaggtttctttcggcccaanattttccggggttcggggacaaaagagcacagcgcggcagaaaagggccaggggagaagagagacaactggggaagatactgccagccaggtagcagaaaggggcccccaccaagaggagttagctcgcctggatgacaccaggaaggggagcaggcacccccgggggagagcaatggggaagcgggggtatcgcggcgacttggtgggggcccacgaggcatgtggggcggaccccccgggaaaacacagcgggggagacggtctcggggaggcccctgtgggtgtattggtctccagagaacaccgcgccaagaggggggggagggacttcaaccacatcttatgttggaaagacgggcccccacccatttcctctagggggggatggaaacacaacttcgtggtgggcgccaactacgtgtggagaatcccacccccctatgttgatggggtgggccactctcgctttgtggggcaccccccaccgtgtggtgtgagatcatatatcaaacaagacccccccccccagcggatgggattgaatggagacgctctcaatcatcatgagaataagatattatttcttcatccatattattcaccaacaacaacacgtgtggg

SEQ ID NO: 648726 - DNA, 423 bp, Homo sapiens
ggtgtctctcacagcgggagaacttgaatttgcttggagacctaacgatatgcagtgagcttaagcccttccaggagcttaccaatcagtcgtcccttattcatccccaagcaaacgtatggtggtgttgtggtggaccattactgaatactctgccaagttacttggcgtgggacttgagctctaatccaattggctatctccctttcaccctggtatttcatccagaaaacatacataaaaacagaacatcataaaacaatggatgtccctcgtgactctcatgtttatatagatgccattggaatcccacgaggagtgccagatagatttaaggcccaaaatcaaatagctgcaagtttgaatccatgttgttctggtggtcaactctaaataaaaatgtagattgaaccggatagcttg

SEQ ID NO: 648727 - DNA, 914 bp, Homo sapiens
ggagcatgtttgagaccttcaacaccccagccatgtacgttgctatccaggctgtgctatccctgtacgcctctggccgtaccactggcatcgtgatggcactccggtgacggggtcacccacaactgtgcccatctacgaggggtatgccctcccccatgccatcctgcgtctgacctgtcttggccgggactgattgatacctcatgaagatcctcaccgagcgcggtacagtttcaccaccaaggccgaagcgggaaaatcgttgcgtgaacattaaggagaagctgtgctacgtcgccctggacttcgaagcaagagatggccacggttgcttccaagctccctcccctggagaagagctacgagctgctgagggccaggtcatcaccatggcaaatgagcggtccgttgcctgaggcattctcccagccttccttcctgggcatggagtcctgtggcatccacgaaatacttcaactccatcatgagttgtgacgtggacttccgacaaagacctgtacgccaccacagtgctgtcgtggggcaccaccatgtgaccctgatttggccgaagggatgcaacaggacgattcactggcctctggcacccacgaagcatggagatcaaggatcattggtcctcctgaagcagaaagtaaccccagggggatcgggcgctccaatccttggcccgttgtccactttcagcaatggtgtcacgacagccagtttgagatccggccctccacttgaccgggaatgtttcaggggggaatgactatttcgtcaccctttttggaactctattggcaaacaaagagtgggggacatggcggggcggctacggcgacacgacagcaggaggactgggcaccccacaatggaggagtggtactaagtaggaacacctg

SEQ ID NO: 648728 - DNA, 202 bp, Homo sapiens
gcaccgatagcctgataggagtaaacgaagtggaccctcacaccaactgcgtcatgcgagtgataggagctgagatctgctcatgtcttgctcttgtctcttgctcagggtcgtgccaccagctcagcaggtgtctgtagtcaccgctgtgtcttcatttcatgcagctgagggtctgccgtacatcttcttgaagaacact

SEQ ID NO: 648729 - DNA, 709 bp, Homo sapiens
  misc_feature (1)..(1): n is a, c, g, or t
  misc_feature (483)..(483): n is a, c, g, or t
ntattagtttggagagccaggttataaaggtctctttaagcgaaagccaaaagggggaattcctttggggcagatcttcaggttcccaaggcttaatcccgggttgtgacccgagccctaccaagaaatttgtctcgttaaggccaggtttttttcaaattgggattacgctccataaataattgaattttaattgggagagaggtccaaaagcgggcaatcccgctttattgtgaggagcaaggcggggggtttttccgaaactagtggatttagatcaatggggcccactcaacgagaatttgtatctttgcaaacaaaaaaaccaatgtcaacttcgatatttgtcttgaaacattgtttaagaattaaaaaggcaaggaaaatcttttccacctctataccacggggttctacatttcttatagttcagtgtcatatttcatatagtaaaccaagagagggctttagaaggtgggaatnttacaaggtcataaagagtgttttttaaaggttatctccaaagggggtgttcaccccttttttgaaacccgatgtggtcggttataaactttcatatagcggcaaaaggcttacgttggttgagactaagtaaatttgggggacaattatcagctaaagcatgtccgagtagcttttttgtagcagtaacgttgttttcccgccttggccataaagcaaataaggt

SEQ ID NO: 648730 - DNA, 195 bp, Homo sapiens
ccataaaattttctagaaatccccttttttccaaagtgtaggtttgggaatagattttggcatgatgaacctgtcataatggtgaatgttccttttgggtaagaaaccaaactaaaggtggttgtccccctaaaatttaattggatattgatgaaatcatgggcctggcaaaataaaacttgttgctttccccca

SEQ ID NO: 648731 - DNA, 190 bp, Homo sapiens
ctcgaatcgacggttcctgtgctaagaatatggagatgattttatgcctgggcttttctcttctcaggaggagtgaagctcagaaatactcctccatctgattttgatgcacaccagtccatgcttggctttgatgcaagttactgcgagaatacactaggcatgcctagaacagatgggctcgacttac

SEQ ID NO: 648732 - DNA, 391 bp, Homo sapiens
  misc_feature (9)..(9): n is a, c, g, or t
  misc_feature (22)..(22): n is a, c, g, or t
  misc_feature (62)..(62): n is a, c, g, or t
  misc_feature (64)..(64): n is a, c, g, or t
  misc_feature (391)..(391): n is a, c, g, or t
agctgggantacaggtgtgagngatcacacctggcttctttttttttaataaggtaacattnanaggttctagggattaggacctgatatctttgggatgttatttttctgcctaccatactgggttaccttgggcaagtgactttcatcagtgtgaacttattttcttatctgtaaaataaaaatgattatcaaatattctgtactaaattgccatgagatttaaatgaaatcttgcctgctaagcacttggaaatgggccaggtatgtagttgatgcctggtatccagaaagcattattattacgtaaacatatattttatattactattatttagtcatcttctgtgaaagggagaggatagttccttaagagtttgacctggcagan

SEQ ID NO: 648733 - DNA, 843 bp, Homo sapiens
agcgggtctctggcggcagccggagcttctggtgtagtcttcactgctctgtgtcttctgctcctagaggcccagcttctgtggcctcgttacctgcaggtatgggagatccacagctaagacgccaggacccactggaagcctagaaatggtgagagtgccgggtccgacatcccgagagagggggcggggctggttggaactggtgggaagtggctgtggcgggactctggcctccccgcagctggctccaaaatccgcggccccgagttctccttggcgcagctcggccctcagtccccttcagccataggatggcggccgggctgacagctcggaccccgggcatcctgtctcctccctgcgcagtgactgtgccttggtctggagtcctctgtgggcagctctgccccaacagccgcagctctccccgattgtgcagggatcactggacggtcgtcaggggagaatactgactcaggatgcagagttcatgaatgggaagagctttggtctgcggggttcccagtcccctttttttctattaaaaatttgtggaagtctccgcagaaatattaagaattaattaaagaggtacttcacgaattggtagagcacccagctatgttggtaagtgggtttatggaagggctgaagaaaacactttattaaggtgctgataacgaagcaaatccatatggtaggtaagtttgggcttctaatgtcaacagggggaattccgccgtaaggcagtcatggagtaaaggtacgtaatttttccccggttctaaaactcccgtattcgcggacccggagcccctaggggcattacaacgaaaccta

SEQ ID NO: 648734 - DNA, 377 bp, Homo sapiens
  misc_feature (26)..(26): n is a, c, g, or t
ctctcttcatgtcgcgcttcacaatntgagatctttcaagggtccaacgttcgacagcagagagccagcgtcaccagaatcaggccattaagtgagacacatcaattccaatctgtgtgagtgtgacccaattattcttaaagtatcagaacttctgccaaagccacttggtaagtccacggcgtcactattcttccagatcttgctgtatcgatattaactgcaagatccggatctactttcggtaacctgtttccttgcacagctttagcatagttaagccccgatacacgcacttgagaacattatagactttaatccggtacccgcgtagtgtcagaatctgtacagctgattcacaccacacaatatctgag

SEQ ID NO: 648735 - DNA, 158 bp, Homo sapiens
ttatgagcgaagtagctggcgtgagttcgtgtgaggcgaggcgaggcggccgtttcccttccggagctcttaggctctaattgtttatcttttgtgtataatcccaaaatattgaattttggaatatttccacccattatgtgaacaaaaaaacaccc

SEQ ID NO: 648736 - DNA, 298 bp, Homo sapiens
aatgcttatctaattgcctcctttggagaggctcatcagaaactcaaaataatgcaaccatttgactctcacctacctgtgacctggaagatccctctctgcttgagttgtcctgcttttctggatggaaccaatgttcatcttacatatattgattgatgtctcatgtctccctaaaatgtataaaaccaagctgtgccctgacccccttgggcacatgtcgtcaggacctcctgaggctgtgccacaggcatgcagcctcaaccttggcaaaataaactttttaaattggctgaga

SEQ ID NO: 648737 - DNA, 930 bp, Homo sapiens
  misc_feature (492)..(492): n is a, c, g, or t
tatagtttgggccctccaaggcactgcgagcatgagtataaatgctataaaccttatgaaaaacatgagtttgaaagtttttatgttttgttttgtttgtttttaaagagatgggggtcttactgcgttgtccaggctggagtgcagtggcttttcacaggtgcaatcattgtggcacgtcactgcatgcctagaacttcctggtctcaagccatcctctagcctcaggcacacaatgtatgctgggactacaagtgcaattggcagctgtctcctgaatattaagcttttaattttttgtattcggtcactcgttgatagcagacattgactgaaacagaaaattaaaagctttattattcaaaatgttgcaaaatgaagctgggtgtggtggtgcacgcctatagtcccagctacttgggaggctgaggctggtaggatgtgcttgtaggtcaagtattgggaggctgtgagtgtacctagtgatggtgncgtatagggaataggtattggagatccaagctggaaaatcgttatcaagagccatttcttagaaaaatgcctgttgacctggcaagaacatggggtggggatagtgataaggcggtaaatccagtaaacccgggaaggccgagctgcgcacgacagcgtggacgggcaagattgcagagcacactagggcagcacaagggtggccctgcgcggtggacaacagcagcacacaacgggggaaaggggacagtcgattgcatatcccccactcgggggaaacggcggatgctcgaaacccggcggcgacaaaggtaggaaaaacatgacatccgggtgaagtgctcactgaaacaagtaacgatgggagcggctatacaaacaagcgcgcatagcaaacgcacaacgctatgatcgataccatactgccatcgagaggga

SEQ ID NO: 648738 - DNA, 520 bp, Homo sapiens
cagcgcctgtatcattgcaggcggcatatggcaataggtggaggcgctggccttgcctatgcactgggcctcgcgtgaggttacgcgctggatcatcggctggaacgtacgcgcctgggactacctgctgctggcaggatggatagatggcgcgctcaagccgggcccagatccagcggcgtgcgtgccagcaggacgatggcgctgtggcgattctgacgctcgtggtgatcgcggcgctggccagcctgggctctatcgtggcagagttgtccgtggccaaggatttcaccggggcggctcgcatggcgcacatcgccctggcgggcggcaccatcctgtcgtcctgggcgttcacgcaggtgatgttcgcgctgcactatgcgcacgactttaattcggcacggcgccagtggcagccaggcgggttgcagttccccgacacgcccgaaccggactacctggaatttctatactttgctgccgtgatcggaacatcgggacagacggccgacgtgtc

SEQ ID NO: 648739 - DNA, 154 bp, Homo sapiens
ctcgacgtcggacatagctcgcgacgctgatgcaacacgacgtgctcagtggtcgagaggcaccgggcacgtccggtagtttcgctgtcaacgttgggagcgatgcgccaacgtcgagcaagcaggtcctacgtcactgagatgcgcccagatt

SEQ ID NO: 648740 - DNA, 641 bp, Homo sapiens
agcggaggggtccacccggactacgaccatgtaggggtatagtgggtcgggtggccgctgctccgagacctccgagggaccttgcggagactcaccccttcagcagtcgcatgaaccccagaccgtcagcatcatatacatgcagggccgacgatccggacgggcgggtccagtccgcatgatcaggtgactagtgcggacgacaacacactcgtccgtatcgcgcaaaaaggcaggacgcacgaacaccagggacgcaatcgaagggacggacaatagggcagacagatggaatggaacggtccagaattaagactgcaggggaacataacgcacacaacatcacgtaccaaaatgaccacatgaggaagatgacaaaggacaagaggaaagcacccgaggaccatggaatacacggagcagcggatggcacccacacaactataggagaatggaggagaccaccaaggataacgggcacatcattggccgtactgagcactgggtcaccagcacagggcactaggaacagcagaagagaccccagacaagatacatgggaacttctgggatggcacacaagtcaaaacataacctgcatagagatccgtgaagacctaaggaggcagacagtcatgcaa

SEQ ID NO: 648741 - DNA, 370 bp, Homo sapiens
  misc_feature (20)..(20): n is a, c, g, or t
  misc_feature (28)..(28): n is a, c, g, or t
  misc_feature (61)..(61): n is a, c, g, or t
  misc_feature (70)..(70): n is a, c, g, or t
accaagctgcatggatgccnaaaccgtnccctggtggaaaaaggccgcggtgcctgcgggnccgctgtgnctggctgccaggcctgctgcatgctggccatcttcctgagcatgctggtctcctaacctgccgccggaacaaggcaaggaaggccccacatctcctacacacatgtccgacccatctcaactggaggcctgagactacctaagaccagaatttaggagaaattggttctaatcttgattctaaatctaactcactgtgtagcatgatgcaagtgatttctccgccttggacctgcttcctcatctgtaaaataagggcattgaacttgattcaataaatgctagttgagtatctactcta

SEQ ID NO: 648742 - DNA, 165 bp, Homo sapiens
ccggtaggcgtaccaggctttggtagtcttgggagaatggtacaacgggatgattttccatatggtcccgtggctcttgttgaactacctgcaaaattacttgcaataccatcaccgggttcacctgttaacctctgcttaacaaactgacccttaactggcaag

SEQ ID NO: 648743 - DNA, 355 bp, Homo sapiens
aacgaagcccacgttctggactggcctgggttcactcacactgtagtcttctcgggggaactagctggaaacgcacctgtacccacaggaaccgtgcgaggccaaggcacaatgggtctcttgcgttgttccaggaacaaagggaacccatgctcatgtccttcagggccttaaattatccagccacttctcttggcttatggcttatccttcaggggctcgggacctggtgctgcctccttccaggaagcctacccgcagaatagatgctccctgggacctaactctgtgggcttgccatccccaaaccttaagtctggtcaccaggtggtcctggtcctatccctaagccaag

SEQ ID NO: 648744 - DNA, 227 bp, Homo sapiens
  misc_feature (8)..(9): n is a, c, g, or t
  misc_feature (30)..(30): n is a, c, g, or t
  misc_feature (46)..(46): n is a, c, g, or t
  misc_feature (148)..(149): n is a, c, g, or t
  misc_feature (189)..(189): n is a, c, g, or t
  misc_feature (226)..(226): n is a, c, g, or t
ctgcaggnntgaagaaaactggtgttagtntttctttaaatatttnttagaattcagctgtgcagcgatcgattcctggctgtctctttgttgggagactttttattattaccttgatcttattacttgttattggtctgttcaagtnnttctatttcttcctgactcaatcgtggtaggttgcatgtntccgggaatttattcatttcccccagtctttccagtnt

SEQ ID NO: 648745 - DNA, 404 bp, Homo sapiens
tgcgggtgatctagaggatcctgaagtcacccgcgtacgctgagtcgataatggcgagcaccgcggtgcgctcggtcatcaggcggccgctggtgatttgcaggctgcccaggtcgccggagtcgatagccacggccaccagcgagaagggaataccgttcaggcctggcaaatattgcacgtcgctcaacatgagtttgtgatccttgggcagcggctggatcgacggcaactcaatattccccgggtttaccagcagcagtggctgtttgtcgggggcggcaatgctcagcacggattcgcggttgcccaacatgttctggaacagctctggcttggtcttgatcaggtccagggtattgctgtcgttgagcaggttgcgtaactggtccacccgggatatc

SEQ ID NO: 648746 - DNA, 130 bp, Homo sapiens
gggatgatgaagtttcaaaggatgctaacccaaaaaaaaatttttttcttttttgagacttgctctttttttgagtcttgctcttttgcccaggctggagtgcaatggtgcgctattggctcatgggagg

SEQ ID NO: 648747 - DNA, 1014 bp, Homo sapiens
ggtttcaagccaaccccatggcctccatgactttttcaaaaaaaaaaaaaaaaaaaaaaaaaaaatttttcaaaaaaaaaaaaaaaaaaaaaaaaaaaattggggggggccggggacccaagaaaagtttctaacaccccattcggtggggcgggcggcggggcgccccagagtaggtaatgagtaagcaacagtgcgcccaaaggctgcgtcccaagggaaaaacccggtcgccaagaagaggggggtgggggtctcttcccaccaaaataaaaaaacgcgcgcggggggggacccaccgaagcggcgtctgagaccacacctcaaggagggggctcggggcgggcaaacaccgcggcctcttaccaacacgggcggcctccaacggcgaggcgccgcgaaattaacaaaaattacgcccccccggcggggggggagacatcacaaaaaccagaagacacaaacacatacatgaacagacagacaacccagacaagagtagaaggagcaaggaaaaagcagagtaagatagaacagggatacaaaggacgaacaccgaaccgagtaccacaaacacacatacagccagacggacgaataacaagtccaagagcgaagccaagcaacaatcgagacaagctagtcaggactgaaacaaaaaagcaggccaacaaacgaatagacacaagacagagaacaaacgaaaacaaaagaaaacacgaagtaaacacaacaacacaaatatgcgtgatccagcaacggacaacaacaacagccgacaataaaagcgcgaataccgaaacactgacaacaaaaaagagagaaaaaaaccggaagccaaaaaccacgggacacacacacgaagaaacacacagacatggctacaacacggggagaagcagaacaacacaacacaccgcaacgccaaatgagcaaaacaagcagcacaaacagagaaaaagaacacaggctacacgaatcacaacacaaacgcaccaaaaaaacacaggcgta

SEQ ID NO: 648748 - DNA, 492 bp, Homo sapiens
taccctatactgcagtgtcgtccctctgttgtgtctgtgtcctcatctcctcttcttatgagatgtcttactccatctcaggctgctgtcacagaataccagaggctgggcggcttagaacaaaacgcattgattctcccacagccctggaggctggaggtctgagatccaggtgtgggcagggctggttcctcctgaggcccctctcctgggcttggagacgccgtcttctccctgtgccctcacagggtcgtccctctgtgcgtgtctgtgtcctcgtctcttcttatgagatggcttagtccatctcaggctgctgtcacagaataccagaggctgggcggcttagaaacaaaacactgattctcccacagccctggaggctggaggtctgagatccaggtgtgggcagtgctggttcctcctgaggccactctcctgggcttggagacgccgtcttctccctgtgtcctcacagggtcgtccctctgt

SEQ ID NO: 648749 - DNA, 441 bp, Homo sapiens
tgagaacattgattgatgagaggactgtctatagtaaatggggctgcatcaatgtatgatcacgtgatcgatcaaaaataaaagtacagactatcataaaccagacgcaaaaatcaactcaaaatggattaaagacttaaatgtaaggcctacaactctgaaactactagaaggaaacattggggaaacactacaggacagtggtctgaacaaagattttttgagtaagacctcaaaagcacaggcaacaaaagcaaaaaattaacaaagtgaagagacaaccttcagaatgggagaaaatatttgcaaaatatttggatatttgaccctcaaaagcctcatgttgaaattgaccccagtgttgcaggtggagcctaattggaaggtccacttccaatgggttataggggcagatccctgatgaatggcttggtgttgacc

SEQ ID NO: 648750 - DNA, 241 bp, Homo sapiens
gaaaaacctcaaaatatgatggtggttggacagtcagcatttgcagactttgatggagatggacacattggatcatttactgccaggctgtaaagataaaaattgccaaaagagtaccatctacttagtagatctgggatgaagcagtgggttccagtcccacaagttttcagcataagggcacacttggggcttttcccattttgggagcacacacccattaatacatttcattacctta

SEQ ID NO: 648751 - DNA, 409 bp, Homo sapiens
  misc_feature (47)..(47): n is a, c, g, or t
  misc_feature (68)..(68): n is a, c, g, or t
  misc_feature (83)..(83): n is a, c, g, or t
  misc_feature (108)..(109): n is a, c, g, or t
  misc_feature (144)..(144): n is a, c, g, or t
  misc_feature (152)..(152): n is a, c, g, or t
  misc_feature (189)..(189): n is a, c, g, or t
  misc_feature (198)..(199): n is a, c, g, or t
  misc_feature (228)..(228): n is a, c, g, or t
  misc_feature (269)..(269): n is a, c, g, or t
  misc_feature (273)..(273): n is a, c, g, or t
  misc_feature (275)..(275): n is a, c, g, or t
  misc_feature (277)..(277): n is a, c, g, or t
  misc_feature (282)..(282): n is a, c, g, or t
  misc_feature (284)..(284): n is a, c, g, or t
  misc_feature (286)..(287): n is a, c, g, or t
  misc_feature (291)..(291): n is a, c, g, or t
  misc_feature (309)..(309): n is a, c, g, or t
  misc_feature (312)..(314): n is a, c, g, or t
  misc_feature (317)..(317): n is a, c, g, or t
  misc_feature (319)..(319): n is a, c, g, or t
  misc_feature (323)..(323): n is a, c, g, or t
  misc_feature (326)..(326): n is a, c, g, or t
  misc_feature (360)..(360): n is a, c, g, or t
  misc_feature (366)..(366): n is a, c, g, or t
  misc_feature (373)..(373): n is a, c, g, or t
  misc_feature (376)..(377): n is a, c, g, or t
  misc_feature (387)..(388): n is a, c, g, or t
  misc_feature (392)..(393): n is a, c, g, or t
  misc_feature (396)..(396): n is a, c, g, or t
  misc_feature (402)..(402): n is a, c, g, or t
gtcacggggggggggacggggacggggcaacagcgcaggggccacanggagaagaagagatcgataanctaggggtttgtgtngtaaatcttacaaagtgtataaagnntctcgtgtttctctacattaacaaaaaccaaatgntacaagancggttgtatatacaaaatcacggagatattgcttcanttgcaaacnngttccagaccagatggggagacgagacanatgagggggacagggagggccgagagggcgcgttgcgtgcnggcnangnggggngngnngggngggggggggaggggcttntannnttnanaagncgnttgctaatttaacttgggtatgtctgatgataantaaaantctgatnaannaaaaacaaanngttnnttnagtggntgggata

SEQ ID NO: 648752 - DNA, 960 bp, Homo sapiens
  misc_feature (399)..(399): n is a, c, g, or t
  misc_feature (960)..(960): n is a, c, g, or t
gtgctgcatgcctgtagtcctagctactcgggagcctgaggcaggagaatcccttgaacccggagggcagaggctgcagtgagccgggatcgtgccactgcacttcagcctggtgacagcgagactctacctcaaaaaataataataatgataataatatgacctggctaggcatgagtcattacgggctcacacctgtaattccagcactttggtgttgaggcaggcagattgcttgagcctaccaggaggttgagaccagcctgggcaacatctacaaaaaatacaaaaaactaaccaggtgtcattggttgccttgccttgtgttcccaatcatactcaggaggctgaggtaggatcgcctgagcctgggacattgaggctgcagtgagccacgantgcaccactgcactgcagcctgggtgacagagcaaagccctgtggaacaaaaaaaaaggtgcctcaagagggctttaaagatccattctgccctgggtcctttcttcccggcgtggttcagttctccccaattctggtgacctttgtgcgaggtgccaggctgcagtgccgtggttgcctgaccagggttccccaaccaggttttgcgccacaggaatcctcatgcttcccagggcacccaggcgaatttcctttcttgtggccttgagtaataataccgtgagcgtgccccaggtgccggggctcatgacaattgttgaacccacgtgtctcatagaggccagcagccacctgggagtagtgtggggtccttgtccccggttgaactctaattgttctctacaattgtcttaactgagttttcgaatacagtctggtttcaccaaaaaaaaaaactcgggctttgtcgggggcaagggtagaatggcatggcataggtcggcccgtgtgaaggggatgcggcgccatgggtatcacaccgtctactataaaaaaaaaacn

SEQ ID NO: 648753 - DNA, 303 bp, Homo sapiens
aagctgcaggaggagattcagttgcacggaagaagcagagaccactttggctgccgtcggagcggacgtggatgcagctactctagctcgacattgacctggagcgcagaattgaatctctcaccgaggagatcgcgttccttcaagaaagtgcatgcaagaggcagcatccgtgcagctgcaaggctccagcttcagagaacagggaggtcccaggtggcagcatggacatgtctcaagcctagcacctccactgcctgcccctccagggcatcatcctggcgctccagtcatgcagcacca

SEQ ID NO: 648754 - DNA, 761 bp, Homo sapiens
  misc_feature (145)..(145): n is a, c, g, or t
  misc_feature (150)..(150): n is a, c, g, or t
  misc_feature (180)..(180): n is a, c, g, or t
atccaattattgaccaaatcccaaggtaatttttaatttacatttttaataaaagcaacttgttgaaaccaagagagggtgagattacctttttgttaaagtattttcccagtcaaagacaggaagagatcagagtgaatgtgcnttctnaaccagagctacagaatttagtgaataatnaaagtacaaactgctttgacctccttgaacttttccaagcaatttctctgtacttctatatatgaatgtcttagccaattttctgctactataacagaatacgacagactgggtaatttaaaaagaaaagaaatttattttcttcctagttctggaggctgggaaggcgaagggcatggcactgacatctgccttgtaactgatgagaaccttcttactgcatgataacaaagcagcaaggcaagcaaaagcgtaagatgaagagagaggaaatgaagccaaacacatcctttcatcagaagcccattccctctataaggcgttactacatttatgagaatggagtcctcatgacctaatcgtgaccttaaaggcccctcccaacactgttacaatggcaattaaatttcaacaaaggttccagaggtgacattcgaatcagcaatgaaattttcatagttaaatttggtattcgtggggaaagaaatgaccatttcccttgtatttttataattaaatcagcaaaatattgtaataaagaaatctttcctgtgaagataccatgaccccaaaaaaaaaaa

SEQ ID NO: 648755 - DNA, 212 bp, Homo sapiens
ggagtaggcacagatgatctgaaggggtcatctatttaaaatgtctgcaattctcagttcaactggacagtcttaaacactgtcaggcactgtaccccaatgagaaaattaggcccagagaagaaaacctcaggcttgagagccctgtacccctcctcaatcgctgccacctgggaccagtgccatgtgtggcatcgataaacaccgtggag

SEQ ID NO: 648756 - DNA, 383 bp, Homo sapiens
atctactgtaatttatagaaaccagtgttccatatctgcaagtgaaagtgaacctcaaattaaacaattataagaaaaaggtaatgttctagctctgaaactttccgaggacaatgaataaaataactggaaattcaagttggggccgaagtttaaagactttagtttgggccgggcgcggaggctcacgcttgtaatcccagcacttggggaggcgaggcgggcggatcacgaggtcaggagatcgagaccatcctggctaacacggtgaaaccccgtctctactaaaaaaaatacaaaaaaattagccgggcgtgatggtgggcgcctgtagtcctagctagtcgggaggctgaggcaggagaatggcgtgaacccgggag

SEQ ID NO: 648757 - DNA, 489 bp, Homo sapiens
gttaaccacctactgtcagagtttataatcaagagaaaatagatgaacctgcctaggctcaagtcactcttctgtgaattgcaccatgaaagcaatatatacaaagtgctcaggcgataaatatatcagagtgattaattctgccctggaaaattacagaggagatatgtgagcagaccccgaagggtaaaaagatttcctcattttttcaacaaatatttattgattgcctaatgagctaggccctggggaaataacagaaaacaagacaccagtcctctcttttggagccctgcatcttaagacaaataagtacacctcaggtcgctttaagcactatggggaactcaaagcagggtgatgggcgagagtggttgcttggggtgtgtgcatgggcatgttatctttaggggagtcagagaaggcctctctaagaaggcaacctgagggaggagaggacaatgttaaaaaagagccagtcacagctca

SEQ ID NO: 648758 - DNA, 195 bp, Homo sapiens
tttgagttactcatcattgatgtttctcctgtgtgattagcgttatgtatgttaataaactctgtattcctcttgttaatctgcttgtccaattcgcagggccccagtcagagcacttaggaaagtaaaggaaaaaaagtatagtatttccctagaatccacactaaggtgcccctcaacacctaataaaagggc

SEQ ID NO: 648759 - DNA, 321 bp, Homo sapiens
ttctcaatgaactctccttctttgggtctggctgaaactgatgatctcttactctctatgccacggaattaacccgagcatgcatggaggcctctgctatcacctcatcagcagtgaacagttttgccaaagtggtctgggtggcctctggctctggcgtagtttttgcccctggccaggattgctacagttgtgatttgacagagcagccaagatgatgtccgtggcggacattgccaatggtggtggagttttgcctctggcagccttgtggctactctgcaatcactgggagcaactggactctccggatttaccaat

SEQ ID NO: 648760 - DNA, 678 bp, Homo sapiens
  misc_feature (76)..(77): n is a, c, g, or t
  misc_feature (81)..(81): n is a, c, g, or t
  misc_feature (87)..(88): n is a, c, g, or t
  misc_feature (92)..(92): n is a, c, g, or t
  misc_feature (104)..(104): n is a, c, g, or t
  misc_feature (106)..(106): n is a, c, g, or t
  misc_feature (119)..(119): n is a, c, g, or t
  misc_feature (128)..(128): n is a, c, g, or t
  misc_feature (135)..(135): n is a, c, g, or t
  misc_feature (140)..(140): n is a, c, g, or t
  misc_feature (142)..(144): n is a, c, g, or t
  misc_feature (148)..(148): n is a, c, g, or t
  misc_feature (151)..(152): n is a, c, g, or t
  misc_feature (154)..(154): n is a, c, g, or t
  misc_feature (156)..(157): n is a, c, g, or t
  misc_feature (169)..(169): n is a, c, g, or t
  misc_feature (176)..(176): n is a, c, g, or t
  misc_feature (180)..(180): n is a, c, g, or t
  misc_feature (184)..(184): n is a, c, g, or t
  misc_feature (193)..(193): n is a, c, g, or t
  misc_feature (200)..(201): n is a, c, g, or t
  misc_feature (213)..(213): n is a, c, g, or t
  misc_feature (217)..(217): n is a, c, g, or t
  misc_feature (227)..(227): n is a, c, g, or t
  misc_feature (309)..(309): n is a, c, g, or t
  misc_feature (311)..(311): n is a, c, g, or t
  misc_feature (319)..(319): n is a, c, g, or t
  misc_feature (326)..(326): n is a, c, g, or t
  misc_feature (330)..(330): n is a, c, g, or t
  misc_feature (345)..(345): n is a, c, g, or t
  misc_feature (350)..(350): n is a, c, g, or t
  misc_feature (353)..(353): n is a, c, g, or t
  misc_feature (357)..(357): n is a, c, g, or t
  misc_feature (359)..(359): n is a, c, g, or t
  misc_feature (371)..(371): n is a, c, g, or t
  misc_feature (383)..(383): n is a, c, g, or t
  misc_feature (397)..(398): n is a, c, g, or t
  misc_feature (402)..(402): n is a, c, g, or t
  misc_feature (432)..(432): n is a, c, g, or t
  misc_feature (438)..(438): n is a, c, g, or t
  misc_feature (448)..(448): n is a, c, g, or t
  misc_feature (470)..(470): n is a, c, g, or t
  misc_feature (474)..(474): n is a, c, g, or t
  misc_feature (481)..(481): n is a, c, g, or t
  misc_feature (490)..(490): n is a, c, g, or t
  misc_feature (492)..(492): n is a, c, g, or t
  misc_feature (495)..(495): n is a, c, g, or t
  misc_feature (497)..(497): n is a, c, g, or t
  misc_feature (519)..(519): n is a, c, g, or t
  misc_feature (526)..(527): n is a, c, g, or t
  misc_feature (529)..(529): n is a, c, g, or t
  misc_feature (547)..(548): n is a, c, g, or t
  misc_feature (552)..(552): n is a, c, g, or t
  misc_feature (564)..(564): n is a, c, g, or t
  misc_feature (591)..(591): n is a, c, g, or t
  misc_feature (638)..(638): n is a, c, g, or t
  misc_feature (647)..(647): n is a, c, g, or t
  misc_feature (667)..(667): n is a, c, g, or t
cccaaaccatctgctgcatttgatccaagctgtaagagcctcctgggccgctaatgggcagttaattgcaggcctnncgtnctgtgnncaanagctgactcttnangcgtccgcctggnacttgcggnctcactntagtntnnnctcntgnncncnntgtggtggtctnagtatangcgnctgnatacatgcnttatctnnagggcaagtgcntgcntcacaagccntgctagacaggaaaaagaagcaagatagcacactggggtttatgacatagctccgacctatcctcatattttaaatagccanancctggacncatcctncatncctgtcagcataagnatagnttntaananttgtgatattcncacaatagaatnctactcagcaagannaagnagtatgtttctaacacacatcatggataantctcanaagcatggtnagcaagataagttagatataanatanaatgtgnagttctagnanagncnaaatttctggtggtaaaaatcncaatagnnantacctttgaatggtgaanncagncaagacagcatnaggaaggaacttttctagagtggcaanaatgttctgtatactgattgggagtggtgtttacatgagtataaacntttgacaanaaagtttaccaggcaaggtngggtgtacttg

SEQ ID NO: 648761 - DNA, 620 bp, Homo sapiens
  misc_feature (23)..(23): n is a, c, g, or t
  misc_feature (41)..(41): n is a, c, g, or t
  misc_feature (82)..(83): n is a, c, g, or t
  misc_feature (87)..(87): n is a, c, g, or t
  misc_feature (93)..(94): n is a, c, g, or t
  misc_feature (98)..(98): n is a, c, g, or t
  misc_feature (110)..(110): n is a, c, g, or t
  misc_feature (112)..(112): n is a, c, g, or t
  misc_feature (125)..(125): n is a, c, g, or t
  misc_feature (134)..(134): n is a, c, g, or t
  misc_feature (141)..(141): n is a, c, g, or t
  misc_feature (146)..(146): n is a, c, g, or t
  misc_feature (148)..(150): n is a, c, g, or t
  misc_feature (154)..(154): n is a, c, g, or t
  misc_feature (157)..(158): n is a, c, g, or t
  misc_feature (160)..(160): n is a, c, g, or t
  misc_feature (162)..(163): n is a, c, g, or t
  misc_feature (175)..(175): n is a, c, g, or t
  misc_feature (182)..(182): n is a, c, g, or t
  misc_feature (186)..(186): n is a, c, g, or t
  misc_feature (190)..(190): n is a, c, g, or t
  misc_feature (199)..(199): n is a, c, g, or t
  misc_feature (206)..(207): n is a, c, g, or t
  misc_feature (219)..(219): n is a, c, g, or t
  misc_feature (223)..(223): n is a, c, g, or t
  misc_feature (233)..(233): n is a, c, g, or t
  misc_feature (251)..(251): n is a, c, g, or t
  misc_feature (253)..(253): n is a, c, g, or t
  misc_feature (261)..(261): n is a, c, g, or t
  misc_feature (268)..(268): n is a, c, g, or t
  misc_feature (272)..(272): n is a, c, g, or t
  misc_feature (287)..(287): n is a, c, g, or t
  misc_feature (292)..(292): n is a, c, g, or t
  misc_feature (295)..(295): n is a, c, g, or t
  misc_feature (299)..(299): n is a, c, g, or t
  misc_feature (301)..(301): n is a, c, g, or t
  misc_feature (313)..(313): n is a, c, g, or t
  misc_feature (325)..(325): n is a, c, g, or t
  misc_feature (339)..(340): n is a, c, g, or t
  misc_feature (344)..(344): n is a, c, g, or t
  misc_feature (374)..(374): n is a, c, g, or t
  misc_feature (380)..(380): n is a, c, g, or t
  misc_feature (390)..(390): n is a, c, g, or t
  misc_feature (412)..(412): n is a, c, g, or t
  misc_feature (416)..(416): n is a, c, g, or t
  misc_feature (423)..(423): n is a, c, g, or t
  misc_feature (432)..(432): n is a, c, g, or t
  misc_feature (434)..(434): n is a, c, g, or t
  misc_feature (437)..(437): n is a, c, g, or t
  misc_feature (439)..(439): n is a, c, g, or t
  misc_feature (461)..(461): n is a, c, g, or t
  misc_feature (468)..(469): n is a, c, g, or t
  misc_feature (471)..(471): n is a, c, g, or t
  misc_feature (489)..(490): n is a, c, g, or t
  misc_feature (494)..(494): n is a, c, g, or t
  misc_feature (506)..(506): n is a, c, g, or t
  misc_feature (533)..(533): n is a, c, g, or t
  misc_feature (580)..(580): n is a, c, g, or t
  misc_feature (589)..(589): n is a, c, g, or t
  misc_feature (609)..(609): n is a, c, g, or t
ggggttccccgaagctctcgtcnctagtgtagctcttgatntcctttctgtaaaggagtctttcagtttaattgcaggcctnncgtnctgtgnncaanagctgactcttnangcgtccgcctggnacttgcggnctcactntagtntnnnctcntgnncncnntgtggtggtctnagtatangcgnctgnatacatgcnttatctnnagggcaagtgcntgcntcacaagccntgctagacagatagccanancctggacncatcctncatncctgtcagcataagnatagnttntaananttgtgatattcncacaatagaatnctactcagcaagannaagnagtatgtttctaacacacatcatggataantctcanaagcatggtnagcaagataagttagatataanatanaatgtgnagttctagnanagncnaaatttctggtggtaaaaatcncaatagnnantacctttgaatggtgaanncagncaagacagcatnaggaaggaacttttctagagtggcaanaatgttctgtatactgattgggagtggtgtttacatgagtataaacntttgacaanaaagtttaccaggcaaggtngggtgtacttg

SEQ ID NO: 648762 - DNA, 139 bp, Homo sapiens
gttagtctttattacttacatttaaatttcttattgccaaaagaacggttttatggggggaacaaacttttgaaggcagtcatgtcatgccttgcacaaaagtgatgaaatctggacaggtttgttcaccccttttatt

SEQ ID NO: 648763 - DNA, 814 bp, Homo sapiens
tctatgactggaatatattcacagtttctctaggcgttctaggataagaacttcctatccttcatggtcctctttaaacctgcgagaatgaagttgagtacagataccagtagtagcatctgaaaaagaaagccacatcacatttaacgttctatcagtcggacgtccaagcagacctgcgtacactcgagcagttgagctttatcccagaggatgattcggtaggcgactgcatcactcttcaggtacgcaaccctaatgtcatgtgcatgtcccagagcgtgacccatcagtccatcgttcatttgcatctttttcatcattgcctctgacgggaacaggacgttcaagcatcagtgtaataggagcttgtcgtatatccacaaaggtattctcaataatccaagtgtcttactttaaaagatctgagaggaaatcagtggtgttacaggggtgaattgtgcgcagacgtaaattgaatatttcatcgtcctcattttgagttgtgaaaagagggagcttgaaaatgcatgaagatgcttgtcgtttgttggtccaaggatcaacttcacccaggttaaaatttggcaagagcagaacggcacggcgcgacttaacgaacaatggggttattggcgacaaaccaaaccaaggcagaaatcccagctcctggtcaagtacagtaacgctggtcttggcctttagggcaaacggggtttccacccgctcttgtgggcttcagtttccttggtcccttaaattgcccttacgaattaagactttcttcaaggaaattggcgggacagaactatta

SEQ ID NO: 648764 - DNA, 1433 bp, Homo sapiens
cggacggcgtggtgcgatggcatggcacccatgatgagctctgcaggcttcccaagggtgtgctgcagagcagtgggggtcccatctgtgccccgttcagcggacaatgtgcgtctgtcgatgcgggagaggacgggcgcgtgacgctacctgcgtgcccttcgctgctccgccgttgcccccgcggtggccatcctgcctggccttatgtgggagccacgcggggctacaagagcgcatgatcgacatcaccaacggcaccatccgaccatgggttggctgagagaaggcgtgacagcgcataggactcgagggtgcctcgcgatgaccgtgaagagcgcggtggcacccttgcaacagatgacagaggagagcacaaagcaagcgccttagtgccgcggagcataccgggatcacataggaaaccgccatgacgccctggtagccacagattgcctagggcggtctgggcgccacacggatactttccttcttgtactcttcgatgctggcggcgtatggcttaagtgtgggccaaggagctaggcgccgttggcaggggcactagttagcacagaatacgaggcccaattggggggcacatgggcatatctggccccgggcgggccggccccttcgtttggtgtggggttggtgagtcgtccccaacgacagcccgttagaacccggcctcttgtggccgcgttacgttgcagatcggggggcggacagagcagacggagcccccaccgggggggaaacacacatagccaaaacaccgagaacggggggcaaattgccggacaccagaatacacgagagagatagggagagtcgggccccggggtcagggaccaccaaggcggaaggcagttggaggcggacgagcagagagagaaattcaccccaggcacgatgggatcaggaagcgagaatccccccactgggggagccctaagggagatgaaggatagctttgaagcaaaagggctgaaggccgccgccatccacaccggtagggcgcactgcactccgattgagcgactctgggggtttgaaagcagccccagggcagacttttaaagcaaacgcaccgataacatgccccgggatgggatcgtgaagagaatcaccggtagcggccgtgcaaccgaacaagagatggagacacaccagtgggcgaaccgcagaatggcaaacactcacactgagaaccacccggcggtgaacgccacacagcagccacccaactatacccagcgcggtcacaccctaatcgcgccacgcacataaatcaccaaaagaaagcagagaacagcgacgaaggagacgccccaaccggggagcgccggtcgacaaacaccatggggcggcggaacaagcaccgcgacaagtcagacccacgtcacgcatcgtcgcacccacaaaccccg

SEQ ID NO: 648765 - DNA, 104 bp, Homo sapiens
  misc_feature (1)..(1): n is a, c, g, or t
ngaagagaccactagaatctggaattgagggcttaaaagacaaccttcttgcttatgggacatccagcctgacagccaccaaacagttgcatcgtccgagcgga

SEQ ID NO: 648766 - DNA, 186 bp, Homo sapiens
  misc_feature (118)..(118): n is a, c, g, or t
cccgatacaatcacttgatcccaactcatctctcatttatttcggctcttttatccaggattaagtgtagtgtaacattttcatttcttttcgcttttattctgctttggtaaaagcngtatttggagatggacattgcctcttcatggtatttttacgtggttagatatggggagtagtgtgatg

SEQ ID NO: 648767 - DNA, 353 bp, Homo sapiens
  misc_feature (8)..(8): n is a, c, g, or t
  misc_feature (85)..(85): n is a, c, g, or t
  misc_feature (114)..(114): n is a, c, g, or t
  misc_feature (127)..(127): n is a, c, g, or t
  misc_feature (212)..(212): n is a, c, g, or t
ggagggcnagcccttgaagccagcatttgtgttgctatggctacatgaaaacccatttacaagattggtgcagtagctcatgtcnaataatctcagcattttgggaggctgaantgggaggattccntgaggccaggagtttgagaccagcctgagcaacatagcaagaccctgtctccaccaaaaaataaaaaataaaaaaaatagcccanctggtgctgatgcctgtagtagtccccagctgtgcaggagactgaggtaaaaggattatttgagcccaggagttccaggctgcggtgagctataatcatgacactgcacttcagcctgggtgacagagtgagatcctgtct

SEQ ID NO: 648768 - DNA, 812 bp, Homo sapiens
  misc_feature (1)..(1): n is a, c, g, or t
  misc_feature (376)..(376): n is a, c, g, or t
  misc_feature (744)..(744): n is a, c, g, or t
ntgcaggacagcacatactttgctgcacatagaaattcgtaatatctcctgtgctgtccaggcacccagaagacctctcaacattttgtctatatcacaccaaatatgaagtctaatcaccactactgtcatgtgtttactgcctttgttgtgaccgatgaaggggccccaaatagcctcggggacagggatgcgggaggacagcgaggaagatctctttgtctctccatgagcctcctctggatgtaatgagagtcttgatggacacttttactccctctgggtgggcagtgatcacttactggatactgactataggctggacagctcagccgcaccaaggacacattccttaacaaatgattagagcttggtnaatatctgtggtgatgttcaatatccatgattgccttgaagaaaccacagaaaatataagctgacctgcatatgttcagctagcacaagaaaagtgagtttgcatcccttgattgccttatgatgtatctttatgatacaggggtgtcttaggctcctgattatgtgagagtgtttttatgtgcaaatcaaaatccgcgggcatggcacagtggatcatgtcgtttatccatgcaacgtcagagagagcccagtattgtggatccctttagggtatggacttattgacaatcctggaacgacactgggaaggcccttttattaatcgaaaataaaaagaggtctggtggggattggggaccaatgcgngaggatccatctggagcgtggatcgttaatacggcaactgccgtatacttcccttagtataaacgccg

SEQ ID NO: 648769 - DNA, 288 bp, Homo sapiens
  misc_feature (74)..(74): n is a, c, g, or t
  misc_feature (77)..(77): n is a, c, g, or t
cacctcggagatagctacggtttcctctggtggagatggtgaggatgaaggctggagagtgagggaggaggctntgntggtcgctgagaacacagggatgggagggtccacttctttctgtcgccttcagggccacatagctggctcataacacttagagggcaactctttgtccctacagtacccttactttgttttatcttatattagtggcctttctggagctggtttcagcaatatccgagtgggtttgtcactgttttattccttgtgttggacctgtctttt

SEQ ID NO: 648770 - DNA, 426 bp, Homo sapiens
  misc_feature (207)..(207): n is a, c, g, or t
gggtttatcgatgccacaacatatagtgtggcatgtataggaatttcattcctttttatgctgaataatattccatggtatgtatatcccacattctgcttatccattcatctgtgatggatgctgtttcttcctttggtttattgtgagtagtgctgctgtgaatgttgacgtaaagtgtctgtttggatccttgtcatttctttngggtgtatacctaggaatggaattgctgagttatatataaatctatgtttaactttttgagaaaccaccaaactgtttggtggctgcatcattttacattcccaccagcagtgtacgagagttctaatttcttcacatactggacacttgctccactttcttctttgattgtagccatcctaatggatgtgaagtggcatcgataaacaccgggtaccg

SEQ ID NO: 648771 - DNA, 150 bp, Homo sapiens
aacatcagggccagatgttgggattagttgattgccttggcaatatctattggagatgatcatatgtctcccatttctagtgcggcagtatggaggttatcaatacagtaatatggtaaacatttgattataattactgctgtatggcaa

SEQ ID NO: 648772 - DNA, 305 bp, Homo sapiens
agctgtaatggtaatcacaagaaggttgtgccgtccgcatctaactccaggatggtgtgtagcccagtgactgtgaggatcgccctcctgacagaatatataatcgcgtactgcgataacagagcagataatacagctcaacactgtcctcaccatcaagtaacgccccagacccatgtgccaaggagacagtactgagtgcgctcaaagagaaggagaagatttatacagtggaggaagaagaccaaatattccttgatggccaggaaaataaaagaaggcgccatgatagcagtggcaagtgg

SEQ ID NO: 648773 - DNA, 320 bp, Homo sapiens
taaaaggcaacccaaagcaacatacctcccttcacgcgctaacaggagttggcgtgaagaaggtaccgtactgatagacttagggttccactggcaaccgtgggaggggggaggaggggggtacggcacggtgaaggtcatgaacacgcctcaaagaaggaaacgacgcccggaagcgttgtcgtggttagcatcggccaccgtcgagcggagcttttgccttgaccatacaccgtgaccctaatgcatctgacactaaagatagggaaggaggaagccgtcggctttacccacaccgtcaagagggaagaccccaagtt

SEQ ID NO: 648774 - DNA, 660 bp, Homo sapiens
  misc_feature (67)..(67): n is a, c, g, or t
gattcagccggacacagatagaacaagaggacacatagtggacgtatgatttttgttcgggatccangatagagttgggtttatagaaaagcaaacggggccaatgtccacaccatcattcttgatctaggaccaccaatgtcatagggcgcaatatctacaataggtagtctcacagccttgcgtgtacgatattcaagagactgtgttgctccattccccagtgtgtgacgttaatccatgatacagaactgtgtaggtgaatttgctatttccttcagccttgaattcaccttcatttgaccccatcagcttcagggccttctttacatttccactggcctgatccatgtatgcaatgctatttttgcagtgatatgtgatgttctgggaagctcggctggagagaagtcgaaggaatgccagctgcacatcaaggacatcttcaggaagttcaggattgccgtagctaaactgaaaaccaccatccatggactctccaaaccaaacgtgtttcttctcagcactagaatctgtccaccagtgtttccgtggaccattcaaaggattggcacttatgcatgtttccccagtttccatattacagaataccttgatagcatccaatttgcatcttggttagggtcaaccagtatctcc

SEQ ID NO: 648775 - DNA, 156 bp, Homo sapiens
agcgcccattaggcagctttcctactcttaactgatacattagtccaattaaagcgagtatagatggatagattcttcccgcagtcaggtctatggggatgcaagatcaatgcagcttttccctgcagtagaagctcacatgatgctaggagaggg

SEQ ID NO: 648776 - DNA, 165 bp, Homo sapiens
accggactatgtctgacagagatatatttatctatgggctagaactaggaagaataatatattataagaacacagacactaatatcccaccatccccttcattggggtagtcacagacaactgtaataagcagtgcttattacagttttactgggtagtcacaga

SEQ ID NO: 648777 - DNA, 622 bp, Homo sapiens
aacggctaggtacgaggctgggtttaactccgccgccatggagcagcgccgcgtaaccgacttcttcgcgcgccgccgccccgggcccgctccgaatagaaccgcccaaactagggctagccgacactacatgcctacacataccaaattaaccaaaaaaaagtaataataaaacaaaaagacgcagacacgcaaagatcacgcacaagaacaggacactaccaaaccaaaaagaccaacaaaaacaacgcccaacaaaaaagccaatacagaaaaagaaaaaacagagaaaacaaccaccaaaataaccaacacacaacacactacacccaaaacaaaacataaacagacacaaagaacaaccacaataatatgacacctgaatagtaaataagagtttacacctcaataaatatcacaaaagcaaataacaaaaacaaacaaataaaaaaaaccaacaaaaaaattaacactaatcaacccaccaccaataaaacatcacacaaacacacaccaccacaaaactacgtcaccacaaaaaataaacaaactacccatataccaaacaaaataaataactcaagcacacaaacaccacaaccataattcaaattacacaacc

SEQ ID NO: 648778 - DNA, 744 bp, Homo sapiens
  misc_feature (174)..(174): n is a, c, g, or t
taaccactcattcatcgagctcgtcaacccaatccaatcatctccgctatgatgaaacttcggatcacctcctgggcagccatgccctgactccatccaaactcaccacaggagtattccatagtccagtacatgtactctaccagtacgcctcaaacgccattttcaatcaantcgtcacaaattctactccagagacgtagaattatggctgagatctatccgtatacctgtcacggcaaataggccgtcactcaattattctttatctgactctcttacctactacatcgaggatgaaggccatatattacggatcatttctctacatcagaaacctgaaagatcggcattgatcctcgtgcttgcaagtatagcgaacagaccgttgcataggctatgtcctcccgtgaggccaaatatcatactgaggggccacagataattagcaaacttattatccggcatcccatacatgggacagaactagtgtcaatgaatcgtgaggaggactactcagatagacaggtcccagccctcaaagaattgctttacctattcacggtcatctatgcagttgattatccgcgagaccctatgacagcacatccaactcctatgcttgcacgaaaggggatctacacaaggcccctaggaatcacctccgagtgccgataaaatcgaccttccgacccttaacaataaaatataaattcccctaaaaatcaagaagtagggcccgaa

SEQ ID NO: 648779 - DNA, 119 bp, Homo sapiens
agaaaaaatgaaaaaaaaaggaaaaaaagttaaaaggcaaaccccagtttgaacacaaaggctctatggaagaaatgcctctatgtaggtgaatgaaatcttaaaaaaagaaccaatga

SEQ ID NO: 648780 - DNA, 133 bp, Homo sapiens
actctctgtaatgcaaaattttttgactcttcgtcttactacttaactattttgtcttattttgaatgatgagccttcgtgcccccccttcccccttatttgtcccccaagttgagatgtatgaaggcttttg

SEQ ID NO: 648781 - DNA, 143 bp, Homo sapiens
cagacagtacagacatccaggttggtccggcacactagtcaaattactcttatttataaatgatatgaggccaggcatggtggctcacacctgtaatcccagcactttgggaggccaaggcaggtggatcacttgaggtcagg

SEQ ID NO: 648782 - DNA, 128 bp, Homo sapiens
tcaatcttaactaattatatcatcaaaaccggttgttccaaattaaggtcacattctgaggtcatgggtgcacatgaatttgagggacccttcgtctgctgcagggagccctgttgtagcccagccta

SEQ ID NO: 648783 - DNA, 244 bp, Homo sapiens
aacacctgtttctgggacatctccggtgtcatggcccaccagctcaaggccggccgcacccgtaccggaaaaacggtgtccatgatcggcgacgccgtcgagggtgcccgccgcaactggcgcgtcttcgtcatcgacccgaaacgcatcgagtacctgggcctgcgggagtggcccaacatcgagatggtcgccactaccgtccccgaccaggtcgccctcatccactggctgtggtctctca

SEQ ID NO: 648784 - DNA, 292 bp, Homo sapiens
cggactctggcgagaccagatctgagcatactggacgcatgttaactagactgcctgcgtgtcaccgaacatgtcatggatagaatacacacatctctggaatggcgtttcaccatggcacggtggattcaactgcatggtgaccacatcagatgtctgaactctcatgtgccggaagcatagatagcttgctcactatatgagagacttgcgccgacccgcatacagtggagagccgtctttacacttgctaaccctgccatatcctatcgacatgcagattgattctgtg

SEQ ID NO: 648785 - DNA, 84 bp, Homo sapiens
ctcatgacctggcatagtagatcctcaacaaatatctgaggaacgaacagaaacataagtgaacggacttctcagatccattcg

SEQ ID NO: 648786 - DNA, 297 bp, Homo sapiens
  misc_feature (50)..(50): n is a, c, g, or t
aaattcgcgtgccgtcgactctatctctacaaaaaaatttaaaaattcgngcgggcgcagtggctcacgcctgtaatcccagcactttaggaggctgaggcgggcggatcacctgaggtcaggagttcgagaccagcctgaccaacatggagaaaccctgtctttactaaagatacaaaattagccgggcgtggtggcacatgcctgtagtcccagctattcgggaggctgaacagaacgcttgaacccgggagcagaggttgcggtgaccgagattgtgccattgcagtccagcct

SEQ ID NO: 648787 - DNA, 493 bp, Homo sapiens
aactatacattcctgccactcggattattttattgtgctttactatctgtagtttatagttttaaaacaagaattatacggactctactttttaaaaagtatacctctccattagagattctaatatctcaagtctcctagggatgtgaaggccgggcatgatggctcacacctgtaatcccagcactttaggaagccgagatgggcagatcacaaggtcaggagttcaaaaccagcctggccaacatggtgaaaccccatctctactaaaattacaaaaattagctgggcgtggtggccggcgcctgtaatcccagctactcgggaggttgagacaggagaatcgcttgaaccccagaagcagaggttgcagtgagccaagattgtgccactgcactccagcctgggcaacacagcaagactccatctcaaaagcaaaacaaaacaaacaaaacaaaggaaatactcattggagcagttcggattttggctt

SEQ ID NO: 648788 - DNA, 469 bp, Homo sapiens
  misc_feature (447)..(447): n is a, c, g, or t
cacgaggtaaggaaagcgcaggtcgtagcagatcgtcatgcctagaacgccccacggcgtctctgccagcaccgttctctcgcccggcttgaaggtcgaggattcgcgatagctctcgccgccggcgagctggacgtcgaacatgtggatcttgtcgtagctcgccacgatgccgccggccgaatcgatcaggtaggagcggttgcggatctgctcctcgccgggcacgcggacatggatcgagcccagcaggaaccacgcgccggtctcgcgcgcgctcgcccgggccgccgccagcatggcgtggctctcctcggtctcggccttcgccagcgtctcggcgcggttggcgccgatcaggcccgtgttctccggcgtcatgacgaaatcggcgccggcgtcgcgcgccagccgcgcctgctcgcgcacgtaggccacgttctcggncatctcgttgctgacgttggtc

SEQ ID NO: 648789 - DNA, 235 bp, Homo sapiens
  misc_feature (23)..(23): n is a, c, g, or t
ccttttttttgagacagggtttnggtctgtcacccaggctggaatgggacgtcacaatcacagctcactatagcctggaactcctgagatgaagcaatcctcctaccttagcttcctgggtagctgggactacagatatgcactaccaagttcagctaattttttactatttttgtagagatggaatctcactatattgcccaggttagtctcaaactcctgggctcaagcgatc

SEQ ID NO: 648790 - DNA, 150 bp, Homo sapiens
  misc_feature (27)..(27): n is a, c, g, or t
ctcagatgagaaacctgagactcacanacacaaagtggtaactggtttaagaacaggaatccaggccaatctcactctaaaacggggggggggtgtaatacaccaattttcatcttaattctcaatgagaataaaaatgtacaaaatatc

SEQ ID NO: 648791 - DNA, 876 bp, Homo sapiens
  misc_feature (190)..(190): n is a, c, g, or t
  misc_feature (193)..(193): n is a, c, g, or t
  misc_feature (200)..(200): n is a, c, g, or t
  misc_feature (230)..(230): n is a, c, g, or t
  misc_feature (241)..(243): n is a, c, g, or t
  misc_feature (247)..(247): n is a, c, g, or t
  misc_feature (254)..(256): n is a, c, g, or t
  misc_feature (264)..(264): n is a, c, g, or t
  misc_feature (286)..(286): n is a, c, g, or t
  misc_feature (315)..(315): n is a, c, g, or t
  misc_feature (320)..(320): n is a, c, g, or t
  misc_feature (330)..(330): n is a, c, g, or t
  misc_feature (332)..(332): n is a, c, g, or t
  misc_feature (338)..(338): n is a, c, g, or t
  misc_feature (343)..(343): n is a, c, g, or t
  misc_feature (350)..(350): n is a, c, g, or t
  misc_feature (353)..(354): n is a, c, g, or t
  misc_feature (365)..(365): n is a, c, g, or t
  misc_feature (369)..(369): n is a, c, g, or t
  misc_feature (378)..(378): n is a, c, g, or t
  misc_feature (387)..(387): n is a, c, g, or t
  misc_feature (392)..(392): n is a, c, g, or t
  misc_feature (395)..(395): n is a, c, g, or t
  misc_feature (402)..(402): n is a, c, g, or t
  misc_feature (434)..(434): n is a, c, g, or t
  misc_feature (454)..(454): n is a, c, g, or t
  misc_feature (456)..(456): n is a, c, g, or t
  misc_feature (463)..(463): n is a, c, g, or t
  misc_feature (475)..(475): n is a, c, g, or t
  misc_feature (495)..(495): n is a, c, g, or t
  misc_feature (508)..(508): n is a, c, g, or t
  misc_feature (512)..(512): n is a, c, g, or t
  misc_feature (523)..(524): n is a, c, g, or t
  misc_feature (529)..(529): n is a, c, g, or t
  misc_feature (548)..(548): n is a, c, g, or t
  misc_feature (554)..(554): n is a, c, g, or t
  misc_feature (568)..(568): n is a, c, g, or t
  misc_feature (570)..(570): n is a, c, g, or t
  misc_feature (582)..(582): n is a, c, g, or t
  misc_feature (584)..(584): n is a, c, g, or t
  misc_feature (604)..(604): n is a, c, g, or t
  misc_feature (610)..(610): n is a, c, g, or t
  misc_feature (618)..(618): n is a, c, g, or t
  misc_feature (623)..(623): n is a, c, g, or t
  misc_feature (650)..(650): n is a, c, g, or t
  misc_feature (664)..(664): n is a, c, g, or t
  misc_feature (673)..(673): n is a, c, g, or t
gacgatggagatgaacagattccggctgattgggccactttcccactccatcctaactgaagcaataaaagctgcttctgtccacactgtgggagaggacacagaggagacacctcaccgctggtggatagaaacctgtaagaaacctgacagcgtttcccttcattgcagacaagaagccattttcganttnttgggangaataacatcaccagcagaaattccggcangtactattctnnnactnacatttnnngatcctcnaataaatttgccccaaaataantccaaagcttttcccaatccataaaaatnccaanataattatananttatanatctncttcttnatnnttttccttttnaatntacgcatanctttatctngaacnaanatatctntaatattttcacagataataaaatctcggatnaggatttaaaccggatgatnantgaattnctggtgcctggntcacagcttattttaggtcnccattaatccaanatanctatacttttnnttcancagccaggaaaagtgattngtgaanatcgactaggctgntnaagttgctgggntntcctactcccaaatggctgnggcatngctttctngattncatttatttatctaggtgtgatattcntatggttgaaatantctgcagtncattctcattataataggtctcctaatgtcccaggcgattttccagactgccctgccgggatgctgtttgcggaagagcaagctaagaatcttcttgaaaagtacaaaagacgccctcctgcaaaacggcccaactacgttaagcttggcactctggcacctttctgctgtccctgggagcagttaactcaagactgggagtc

SEQ ID NO: 648792 - DNA, 391 bp, Homo sapiens
  misc_feature (2)..(2): n is a, c, g, or t
  misc_feature (54)..(54): n is a, c, g, or t
  misc_feature (111)..(111): n is a, c, g, or t
  misc_feature (158)..(158): n is a, c, g, or t
angtgccaaatgatgctgtatataattgtcctataggtggttatcctattaagngataatatgagagaaaaaataagctattgaaacttatatgactactatggcaggtcngtgaatgaaagttttgccatctagaaaaatattgtgttttctcctcngtttctttgcccgaaggtacactttatcattgtagtttattactaagacttggaattccaactccggaccctttccttctctacagaaatgccagtttgaattgtttatagtttgaattgttttgtgtgcttatagttatgtcagggttttttttgagattattagattttatgtcaaattaatatataatttaagtcctaataaaataactacaaagttacctgtaataatc

SEQ ID NO: 648793 - DNA, 326 bp, Homo sapiens
ctgtgagtaccgcacctggcctagttcatatttttgaaaaaaatgaaacagtgttgacataggctgcaaagttttatcgaatgaaatgaagattttgtctgtagaagtttgactatgtcatggtggaaaataaatcattgctaattagcacttgagttatatatttgttaccttattcaaaggttggcctggaactaattttcttagcagtatttgcagcagaggaagctcctgtttgatgagcatccaatttatgcccagaaatgctgttgctgggagggtaggaagcattgtttcaattaactcccttgtcaatccccggtcga

SEQ ID NO: 648794 - DNA, 758 bp, Homo sapiens
  misc_feature (75)..(75): n is a, c, g, or t
  misc_feature (232)..(232): n is a, c, g, or t
  misc_feature (237)..(237): n is a, c, g, or t
  misc_feature (239)..(239): n is a, c, g, or t
  misc_feature (246)..(246): n is a, c, g, or t
  misc_feature (376)..(376): n is a, c, g, or t
  misc_feature (413)..(413): n is a, c, g, or t
  misc_feature (431)..(431): n is a, c, g, or t
  misc_feature (538)..(538): n is a, c, g, or t
  misc_feature (551)..(552): n is a, c, g, or t
  misc_feature (592)..(592): n is a, c, g, or t
  misc_feature (599)..(599): n is a, c, g, or t
  misc_feature (603)..(603): n is a, c, g, or t
  misc_feature (618)..(618): n is a, c, g, or t
  misc_feature (625)..(625): n is a, c, g, or t
  misc_feature (631)..(632): n is a, c, g, or t
  misc_feature (635)..(636): n is a, c, g, or t
  misc_feature (641)..(642): n is a, c, g, or t
  misc_feature (644)..(644): n is a, c, g, or t
  misc_feature (646)..(646): n is a, c, g, or t
  misc_feature (648)..(648): n is a, c, g, or t
  misc_feature (657)..(657): n is a, c, g, or t
  misc_feature (660)..(660): n is a, c, g, or t
  misc_feature (663)..(663): n is a, c, g, or t
  misc_feature (684)..(684): n is a, c, g, or t
  misc_feature (689)..(689): n is a, c, g, or t
  misc_feature (696)..(697): n is a, c, g, or t
  misc_feature (699)..(699): n is a, c, g, or t
  misc_feature (705)..(705): n is a, c, g, or t
  misc_feature (711)..(711): n is a, c, g, or t
  misc_feature (722)..(722): n is a, c, g, or t
  misc_feature (724)..(725): n is a, c, g, or t
  misc_feature (727)..(729): n is a, c, g, or t
  misc_feature (731)..(731): n is a, c, g, or t
gccagaagccctggagcaggatgtcacgtctgaaaagcctattgatgtttaccaaatttaatttgcagattattntagtctgtcatccagaaaatgtgtcagcatgcatagtgctaagaaagcaagccaattggaaacttggttagtgacaaaattgaccagagagtgggggtgatgatgaccaggaattacaagtagaatggcagctggaatttaaggagggacagaatcnatggntnagcgtgngtggagaagatccaaacagaaaagtgcaaagttattccccatcttccaaggttgaattctgaggaagaagacacattcctagttccccgtgaacttcctttgacttattgtccccactaaaacaaaacanaaaacttttaatgccttccacattaattagattttcntgcagtttttttatggcntttttttaaagatgccctaagtgttgaagaagagtttgcaaatgcaacaaaatatttaattaccggttgttaaaactggtttagcacaatttatattttccctctcntgcctttcttatnngcaataaaaggtattgagccattttttaaatgacattatngataaantatntttgtactagttgangaaggantttttnntannctgannananantttgcaaanaanacnaaattatttgtataataaaanaccanattcatnnanagcaanatcacngatcaataaantnnannnantatccaataaaattttaaaacattaga

SEQ ID NO: 648795 - DNA, 248 bp, Homo sapiens
  misc_feature (51)..(51): n is a, c, g, or t
  misc_feature (64)..(64): n is a, c, g, or t
  misc_feature (72)..(72): n is a, c, g, or t
  misc_feature (81)..(81): n is a, c, g, or t
  misc_feature (95)..(96): n is a, c, g, or t
  misc_feature (101)..(101): n is a, c, g, or t
  misc_feature (109)..(109): n is a, c, g, or t
  misc_feature (117)..(117): n is a, c, g, or t
  misc_feature (169)..(169): n is a, c, g, or t
  misc_feature (195)..(195): n is a, c, g, or t
  misc_feature (199)..(199): n is a, c, g, or t
  misc_feature (207)..(207): n is a, c, g, or t
  misc_feature (227)..(228): n is a, c, g, or t
gtcagtgcgaaatccgctgctgccaaagaaaaaagcgacaacagcagcacnaaggaagcacaanaaaaaaancataaaagnaataaaaaaaaaannaaacncccaaaanaaaaaaanaaaaaaacaaaaaaaaaaagttaaaaaaacaaacataaggaaaaaggaaaancaggaattcgaaaacccaacataaancaanacataatnccccacaaataaaaaatcannaaaaaaaccacacccttccc

SEQ ID NO: 648796 - DNA, 788 bp, Homo sapiens
taggtctagacaaagctgccctacaaagtacgccgacataggcctaggctagcctaggggacgcaaggccctggacattgctagagaacgagatagccgggcctagatagcgtatagcgggagcggtactacggcctaccaagccactagaagggcgcccgcatacgctagagctagcctagcacatagaccgtaggagaacggacgtacctacataatagagaccctacgtacacacctaggagtagacatagaggtagcaaggtagagtaccagactagcaaacatactatactaccaacccagagcaccatagcaggacgggctagccaatatagccaagggctaggcatatacccgggtagtaatagcctaggaaaagagggcgaacacggaacagaagggagtaacctagatagggtagccatatagcagacgaggaaccctagataactatacaaaggaacggggagacccccctacaagaccatagaatatactagggaaacgaaacagagagagaggcgaaaaccttacgagcgcagaacgctaacgattaccaaacaaccaaaaggtaacccacggacgaggtcttatacttatgcccagggccattacccgggaggggacactacttacctaggcagggcaggaactgcaacagacctgagggggttaccaaccaaaacactactaacctaaagaattagaataggcccaatgggggattaccttacaaagggtggccttagccattcgaatagttacaatagactaccggacaagca

SEQ ID NO: 648797 - DNA, 144 bp, Homo sapiens
gcccctcggagccttcggagatccagcctgctttgggggcaggatggacaggatttgagcccagagcggacttggctttaacaacttcccgtactcaagataacagccacggaggacaagcaaggctgggctcatggacagact

SEQ ID NO: 648798 - DNA, 512 bp, Homo sapiens
ctcatcatttattaattgaagcaccgcgaaaagaggctttattatgaatgaagtttatgttgtttagacaagggggtggtttttctccaccgaaaaagaagaacagctgaataagctgctgatcatcattatctttctgttattatcatggtgggctgctatgctgctaaatgaggtgttgtaagcctaaggcagcttgacttgtagcaacaagttgtttaccatcctcgtcaaagcaggtatacttattatcagccgtgtagcagtactttactaaagctgctaagtcatccatcacagcattcagcagctgttttgttgccgtgggctggtggtgcacaagatgatcaagagcagcaggttgcttgatgagtctctccttctcagaaagagggcatctattttcatggtaggtgaatgatgcagcattaaactatttgggaacgtctgttgcatcgtcttctagaactgctgagcatggtcgcctgttgaccaccgatgatgctctgcat

SEQ ID NO: 648799 - DNA, 135 bp, Homo sapiens
ggcgattggtgaccagctgtaaggggtccacgacatccactaggggctccttaatggacacatctttgatgcacgacatgtcgaagccatacacgttctcccaccagtggatctagtagtctttgtaccgacgtg

SEQ ID NO: 648800 - DNA, 242 bp, Homo sapiens
atctcctaagtccatggcgagagtggaattactatgaattaaacttctggtcaccatgtaccggattttggctatgttgactttacttaattggtcctttttggttcccaaggtacatggtgctaggtaggtgtcaagccattactctcattggcttgtcctacatgctaacattttgctaaatataaatctaccagtatcacagctgcatatatttctgaagtcctatcaaaagacggggt

SEQ ID NO: 648801 - DNA, 182 bp, Homo sapiens
  misc_feature (23)..(23): n is a, c, g, or t
  misc_feature (28)..(28): n is a, c, g, or t
  misc_feature (70)..(70): n is a, c, g, or t
  misc_feature (151)..(151): n is a, c, g, or t
  misc_feature (170)..(170): n is a, c, g, or t
gccaccgcgcccggccggaaatntgctnctttagaggaaagcaccgttgatcccacctccttgatctggnttctgggacctcatgcaggctgggcccgttggtctttgctccctgatgctgtctggtgccatctggtctcactccttcctncccatcttgttcattcatnggttcactcatt

SEQ ID NO: 648802 - DNA, 304 bp, Homo sapiens
ggccgtgctgagcggctcaggaggtagatctactctgagctcacacccacccggaactggaagccttagaaaccagtagcagttatgtctgacctgaaccctagaccataggatacaaacttcactttcagaatgctaacctcaccacagactcctaatcggctaataaacagatgaatacacctatttgactgtttcctcactcacaaggaagcagtctttgtgatggttatgctcttacttttaactttagttaccagatttatttctgccttcctttattttctctagtaattgagaccgc

SEQ ID NO: 648803 - DNA, 306 bp, Homo sapiens
accgtactgattagacatttggcagctcttactgaagttaaacatagtcttaccatatgattctgcagtcatgctcttaggtatttccccaaatcagttgaaaacatgtccacacaaaaaccagcacttgaatgtctatagcagctttattcatagttgccaaaactggaagcaaccaagatgtttttcagtgggtgaatgaataaataaactgtggtatatccaaataatggaatattattcagcagtaagaagaaatgggctgtcaagctacaaaaatgacataaatgggtctaaatgcaatca

SEQ ID NO: 648804 - DNA, 181 bp, Homo sapiens
attacatattataccagatcactagcccactataagcctctgcattcatcaacaagaatagagttactaataaagatgcaggcacatcgatctgtccttcagctataaacacaaactgcttcaatctataaatgtatttcaatatgtatcgagaaaacagaataaagttaagtgaatgtat

SEQ ID NO: 648805 - DNA, 532 bp, Homo sapiens
taaaagcaaaccatggtttgtgtagtgttaagttaccttttggggctatgggtctcttggccagccctcccctttcccaatgaaagccaggtcaaattaatcacgggatggactggcggttcactcttttaatttttaatgaagggtgtcccagggtggtaaacgcaataagattggagatgaacactatggaaacttcgctttggccgtaaaacaatagcagtggatctagttattcaaaaaaacatagaaagatttagtcaaaaggatgggccctttctccaccgggactttaaaaattcaatggtgcctctattaggggttcatctggtctttagaccccaggtttcgtggtctaacacaaattcctgactttaaccttcccccgctgaggcaggtcgcgcgatacagatgactccggagctgtcacctaaaagtactcctttttccctgtagggcggggggccaggggtaacctgaccctattcgagggtaggggcactcttaatcctcactggtttctcaagagacc

SEQ ID NO: 648806 - DNA, 171 bp, Homo sapiens
  misc_feature (161)..(161): n is a, c, g, or t
acttagaggatccctgacggaagcactagcgattaggagggagcaggaattgtactatcatgggagtgatgagaagtgacgtttagaatgcccagttaatacatatgccatgaaactggaaatttatttttctttagctcatgggaaagtattttcagacnaacagtattt

SEQ ID NO: 648807 - DNA, 116 bp, Homo sapiens
cccccccccccctttttaaatcccttataaaaaattgggggttttgcaggtcagggggggatcccggtcccccccctttgtggtgtccccccccccagccccgctgttaatttcca

SEQ ID NO: 648808 - DNA, 192 bp, Homo sapiens
ctacgtggatgcgccaagatacttaaatgtactcatctgtcgaaccacctatattatagcctcacccctgacatggtcggaaatcttcgttatcaggtcagaccagcctggggtctgtgggtaaatcagccctactcccaggcctgtgcacacaccccttcagcactccctatgcgcgcgcactagggacta

SEQ ID NO: 648809 - DNA, 292 bp, Homo sapiens
  misc_feature (11)..(11): n is a, c, g, or t
  misc_feature (21)..(21): n is a, c, g, or t
  misc_feature (26)..(26): n is a, c, g, or t
  misc_feature (32)..(32): n is a, c, g, or t
  misc_feature (69)..(70): n is a, c, g, or t
  misc_feature (80)..(80): n is a, c, g, or t
  misc_feature (85)..(85): n is a, c, g, or t
  misc_feature (88)..(89): n is a, c, g, or t
  misc_feature (107)..(107): n is a, c, g, or t
  misc_feature (161)..(161): n is a, c, g, or t
tcgttactgtnaatgccagcngtctntcgacnaggttcatcgcaaatgttgttttacccatcgacgganncgcggcgacnatganaannccgacggctgcaagccancggtttttttgttgagatcgtcataaccggtgtttaccccggtaacgccatcgngtggctgctgaaacaactgctcaatacgcgccacggttgcgtcgagcacatcggcgatgttcttcggcccttcgtctttgttcgcacgactttcggcaatttgaaagacgcggcattaacagtaacgaaag

SEQ ID NO: 648810 - DNA, 1241 bp, Homo sapiens
ggcctcatctatgctctcccactccgttgtatacggggttttctctccttcgctggttaatagggggtgtgctcacatctgtgggaaagtactctttctggtgggggagtcaccccctggtttgtttttgtttgtggggcttttggggggtgtgtgtgagcgcccactattggctccacggggaatgttgatctttggggggcccccccgccaggtggtcgcccaccaaccatggtgggtgagaggatgccccgtctgcgccacggtaggggcgcggcggttgtctttttgtcgcgagcgcattgtgggcgcctggtggctgttcagggggcccgcgcgatggccgcactacggggggttagccaacgagggttttgttctgtgggggctggtcccccctgtgtatgacggtgctcccccccctgaggggcccccccctgttctcccccagcttgtgtgtcccccccgcccccgcggtagacctctctcactgtcccccacttgggggagcccccctcgcggggactctcggcgtttctcttttcgtgtgcacacaccctctggggaccaccacggagcccccagagcccccacggttcgcggggacccacccgccacagatggtgaccccacaaatgcgacacgcacatagtgcccccccttgcgtggcgccccaaaggtgttttcccacagtctgtgggcacacaccacagggcgcgcggtgagagggtctcccacacggggaagtgggggccccccaaaggtcttttagacacacgtgtttctcccgctgttctctcgagacactttcactcaccctcacgccctctccacaccacccacacggggctttcccccaagacccctataggggctccacttggagccgcaggtaattgggaaggccacacacgcggaagaaagggatataaccctatacacccccgagacccccgcgctgtgacacacaagctgagctcgtcctctcttctccctcccacgccctcttggccctctggctctttttatgccctattttgcccgcacggctgagaccacctctttttcccctttctcccacgcactcaccctcccccaaggagaagagagcccacatgttttccaccccacgtaaatcccttttgccgagacccctatgttccctttgctccaggcccagacttgttatccagactttcagggccctgggtccaccaatagaattaaaggtagtaattaga

SEQ ID NO: 648811 - DNA, 106 bp, Homo sapiens
gggaggtcagtgaaagagggaagcaggattgcggcactgataggagagtgagagcatgtgaggggtagatgggatggtggggtaccagccactggaaggggtcatc

SEQ ID NO: 648812 - DNA, 122 bp, Homo sapiens
gcggccgcctactactactactgctcgaattcaagcttctaacgatgtacggggacatggtgtcttgtaggaccatatcgatgttacctgtcaagtaaataaataataaaacacacaaaaaa

SEQ ID NO: 648813 - DNA, 122 bp, Homo sapiens
ttaataaaccctccagatgtacagtgattgggtgctacagaaacagaaaagaatgctttctatcatatatatgcacaagacagagacaggaccttggacaatcatctactagaataagacaa

SEQ ID NO: 648814 - DNA, 126 bp, Homo sapiens
accgggctaatgttgctaggcattttaatcttagagcgaaagctataatcactgcgcccgctcataaggggatggcatggctaggtttatagatagttgggtggttatagtagtgtgcatggttat

SEQ ID NO: 648815 - DNA, 770 bp, Homo sapiens
gtcaggcgctgtccccttcgctgcagatgccgtgtggagaacctggaggagggagggtctggccaagaatccccgacttgcgtatcgtgcagctgcgcttcctgctcatgcctgtccctgatgcaccgcgtgagacgctgcctgtgacgcgacgagctgatggcggcgcgaccgcgataaccgaacgagtggctccttactatgaaggccttgtgtcaaatccctcgactgtgcagatagacgtggacctactcagataagaatgaagaaggccaagtgaagatgagttgacagcgttcggatgaggagctggaagatgcagagaatgaactcgtaggagagagcgaaattcgcgatgccatgtgatggcaatatggccgaggtacctctgccggataggtgacaaagagggagctctgacagtcctttcgcaagtacatatgacataaagtgtggccctgggtcaccgatcggatatcgtattctatctccttaggattggcttattgtatatggataatgatctcatcagcacgaagacacagaaaaggccaaaagcttaagtagaagaaggaggagactgggacaggagaaaccggctacaagtgtatcagggtctttattgtgtggctattcgtgatttcaaacaggcagcgtgaaactcttccttgacactgtgtcaacatttacatcctatgaactcatggattataaaacatttgtgacttatactgtctatgtcagtcatgattgccttagaaatgaccaga

SEQ ID NO: 648816 - DNA, 97 bp, Homo sapiens
tgatattgtttaaaatccggttttggtatcttggggcaagcctgcaaccttttttatatctttggggtattttaagccctttgcccccaatgttcat

SEQ ID NO: 648817 - DNA, 122 bp, Homo sapiens
cgatctctggcctgataaccttcctttactcccatcactggatccaggctcaaggtcacagcacacggacacagttgggctgtagtctgggtgatactgaactgctgtcttcgcaggcgtga

SEQ ID NO: 648818 - DNA, 475 bp, Homo sapiens
ctacaagggaaactacaaaacactaatgaaagaagtaaacaaatggaaggacattccatgtgcatgaatcagaagaattaatatcattaaaatgtttacccaaagtaaacttgattcaaagcaatctctatcaaaatactattgtcatttgtcacagaaattgaaaacaaaaataccaaagttcatatgaaatcaaaaaagaatcagaatagccaaggcaaccctgagcaaagaagaaagagctggaggcatcacgctacttgacttcaaaacattacagggctatggtagcccaaagagcgtggtattgatataaacggacacgcggaccaatggaacagaatagaaaacccagaggtaaatacatatatttaccaccaactgattttcaccaaaggtgccaagaatgtgtatcagggaagggataccctcttcgatgaagggtactgagaaaactgaatattcatctgcagga

SEQ ID NO: 648819 - DNA, 1076 bp, Homo sapiens
gtgagcaggaagcccagggccgtgttcctcatcaataacttcaggagaagtcagtgggagaagatgacatgaacaaggctggttgaaaatcattataaccatcagttactgggtttcagttgacacaagatatagtaatggtgtatacagctgtcagtagtgcatgacctacagataatatatattttgtatgtctgaataaagaacatttgtggattgctggatactgggtacaatgagccatgtaccagcgtactgctatgcaccgtgcaactcactggaggcatgagcactacatatatctgtgtaacaagtcaggatttgagctagcattggcatcaccagatgcagcaagtgtaagcagggcgtattctgtggagcagtgtagtaataatggttgtaacaagaggtgatgaggagagtatccaaatacatgtggacacaccttaggtgtaagtagaaatataagtttaacaggttcaaaaaataggcagaacaacaccaatcatgacacataaaacatcaacacaaacacaagcactggcccaggccggcccgtacgcctgaaatcaccagcggacacgcgccacggctgacacgcagcgaggacacagcaagaaaccccgggccaggcgcgagagtacgacacgccgcagccaacagcgaacagccaaccaactgaaaacatacacaggacgctggagagcaacaagcgcacaaaatccaatacacagaacgagcacacacccagcactggagtaacaagaaggaagacgaagacataacgcacaggggagcacaagacacacgacccgactccgaccacacaccgacaaccacaaccacacccacgacgtgacacaagaacaagcgaaaagcgcgaacggaagcaacagaaacgataccacctacagagacgaaacaacaactaacagagagcgcacacaccacacacacacgcgcagcacagcccacacccacacacacgcaccagccgcacacgcggccaaacgggcaccgaaagacaaaaacaacaaaaaaggcgacaacccacaacaccccaggcccgcacataa

SEQ ID NO: 648820 - DNA, 730 bp, Homo sapiens
gggccccccgaaccaagaggtcttgttttgaatatggataacccaccgtccacatttttgttggagcaacaaaagctcagtaaaaataggtgaggggccacagcggcggtagaaaaaggggtattttaaaaccgggttgggtcctcgtgtgcagggggccgtggttttccactttcgtacggtttgttgcaaacacactagcccctccccccagggggcaccagctgaagagaaattgctccaggtaagaccagttttagttgcccatcaaatttgaatttaaatcaaacgtccggactctccgaaaatctaataggcttctggagcacagctaacgctttcggaagcttctcggatgggagagagatactttctgcatgtgggcaaaacaaacctttcggccggcctgaagctcacctctatggtctgaatcttgatgtcttccctctctcttatatgatgaagcctatccccctcagtgagcgtcttgagaaatcggacctttggggaagtgattaactcacagagtgctctgctctcgcgaatgggtgtcattccataaaaagcactaggagacctctgataaagtctctaaagtgtgcaggggctcgttttttccggtacaatttgggaggcgttcttgtgaccctcagcaagccctaactcgaccaggtgcattgatctaggaaaaatcagaaagcacaaataggaaaattaaatttatataaaa

SEQ ID NO: 648821 - DNA, 1091 bp, Homo sapiens
ggtcaccacctcccgcaagtgccagagccgagcggactgcgcggaggctgtggagccggcggccgcgtgaggctgatccctgctggtgtccctggtggcggtggacgtgtggtgatgccgctgaaggcccccgcactgatgtgtccgccgctgcctgggcgctccccttccccgcctggggctgggcgccagttgctggggtgaggcccgtgtagaccgctggacgtcggggcgggcagcctgccatggtgatgtctcggcccttgctcgtcagacagcgggtagacctgtgcaccaagtataccacacactgtgaacttgcgccccggcacggtgagaccccgtctgccaacgtacttatcggctgccccatcgggtagctttggggccctagctgtccttgtgtgccgggtgggggggcccacaccaacaagcacccaccgagggggcccaccaacaaggggatatattcttcccatcctttgaagcggacgatgaattggccttggaaccccaaagtacattgggcggggcagcactacagaaaccctggagcaagcggaacattttttcacccactgacataattgcttggccaatggcgaaagcctgtgtcgtaacactcatgacggtactggcgtggcactatccagtttgttgtcacacacagggtatcgtatcgaaccccgtgtggcaacaccaacggtggaattggcgtgctcaccccgactattcggaacgttggtctcccctccgttgtgaaggacaacttcccccacacacaacaaggcaacggctttctatcccgagggcaacagcccatccgtgtgggcaggcccaactttttccccaaagttccgtccggcggcaatatgtgtcaatagaccagcagcgttactttggacaggcaaaaacaacactctttctgtcggtgcacaaccaacctgaaccagctttgagacagcacccggtcatcttccacgtgctgcaacgaccaaatatgtgtgaccccaccacatttgcaggaaacacctgatggtatcccaactagcagaacactgttggccgggggccacgcaacagaccgcaac

SEQ ID NO: 648822 - DNA, 170 bp, Homo sapiens
tcctagcccactctggcaactcaagagcatgcagagtcctcacagtctagcaggaggccagccaggcggacacgagccagtaacagtccttagcttctgtgctctgggaatgagcggaaggagcacgagtaaccggcttctaagaacaaggggagctcttttatctagca

SEQ ID NO: 648823 - DNA, 392 bp, Homo sapiens
  misc_feature (302)..(302): n is a, c, g, or t
ccttccttggggtgctgcggggcggggccctccagggagggcaggacgagagcgtgaggcctcgggcaggaaggaggggcctggcaggcgctggggcaggataataaagcctttgagagccggtgggttccgaggggccgtgcgcctctgaagttgcttctgacacggctttccggcctcctctgcttcctgcctggccccgggtgggaaaggacctgctaggggcctgcctgaactgaggccgcttggaggtctcggccccctgggctgctgtgctggggccaaggcggcacagtccctgnccaggggtctgggtgaggaagggcccggcaggcctcggagcagggctcagggagccccagagggaccaggccctcagctggaggcggccg

SEQ ID NO: 648824 - DNA, 318 bp, Homo sapiens
agtgtggcgattgttagagtgagtatggtccttgaagtatagaacatagatgcctgcctaaaggtctactacaacagtaacccctatgacctttagtccttattcggtcgcgtgacaccacgccaccggagaaggaccacgccaccgagaagggatacttcgagctccgtccccgtaaggcactgaagaggctggcacaagccctcaggatcggaagacgtgcacggctcggatcacgtactgccggcagatgggacactcgttcatgcgcttgccacacttggtacaggtcaccccttctccggtggcgtggccgca

SEQ ID NO: 648825 - DNA, 244 bp, Homo sapiens
tcgacaaaaaaggaatcttggtcaggtgtggtggtgcacgcctgtaatcccagaacttatggaggccaaggcgggtggatcaattgagctctggagttcaagacaagcctaggcaacatggcaaaaccccatctttacaaaaaatacaaaaattagccgggcctcgtggcgcgtgcctgtaatcccagctacttgggaggctgaggcaggagaatcgcttagaatctaggtcgacgcggccgcg

SEQ ID NO: 648826 - DNA, 93 bp, Homo sapiens
aaagcttaaaaaaaaaatttccttttttttttttgcccccccttttttaaaaaaaaaaaaaaaaaaattcctttaaaaaaaatttgggcccca

SEQ ID NO: 648827 - DNA, 112 bp, Homo sapiens
gagtcggtagccctcggcttcaccctcgtcttccgtcctcgggggctgatgcgtggcggccccgcccggctcggctctttactccattcacagccgtgcacgcgctcaagcc

SEQ ID NO: 648828 - DNA, 94 bp, Homo sapiens
ctttctagccacatgatcaccagatactaatacagaatactctttcttatgcgaagcatttatatcctctggtgttttcctccaaaaaaaaaaa

SEQ ID NO: 648829 - DNA, 312 bp, Homo sapiens
  misc_feature (25)..(25): n is a, c, g, or t
  misc_feature (70)..(70): n is a, c, g, or t
  misc_feature (84)..(84): n is a, c, g, or t
  misc_feature (88)..(88): n is a, c, g, or t
  misc_feature (91)..(91): n is a, c, g, or t
  misc_feature (99)..(101): n is a, c, g, or t
  misc_feature (104)..(104): n is a, c, g, or t
  misc_feature (112)..(113): n is a, c, g, or t
  misc_feature (117)..(117): n is a, c, g, or t
  misc_feature (120)..(121): n is a, c, g, or t
  misc_feature (123)..(123): n is a, c, g, or t
  misc_feature (125)..(125): n is a, c, g, or t
  misc_feature (132)..(132): n is a, c, g, or t
  misc_feature (134)..(134): n is a, c, g, or t
  misc_feature (136)..(137): n is a, c, g, or t
  misc_feature (140)..(141): n is a, c, g, or t
  misc_feature (144)..(147): n is a, c, g, or t
  misc_feature (152)..(152): n is a, c, g, or t
  misc_feature (158)..(158): n is a, c, g, or t
  misc_feature (161)..(162): n is a, c, g, or t
  misc_feature (164)..(164): n is a, c, g, or t
  misc_feature (166)..(166): n is a, c, g, or t
  misc_feature (168)..(169): n is a, c, g, or t
  misc_feature (171)..(171): n is a, c, g, or t
  misc_feature (174)..(174): n is a, c, g, or t
  misc_feature (176)..(177): n is a, c, g, or t
  misc_feature (179)..(179): n is a, c, g, or t
  misc_feature (182)..(182): n is a, c, g, or t
  misc_feature (184)..(186): n is a, c, g, or t
  misc_feature (189)..(189): n is a, c, g, or t
  misc_feature (191)..(193): n is a, c, g, or t
  misc_feature (198)..(199): n is a, c, g, or t
  misc_feature (205)..(205): n is a, c, g, or t
  misc_feature (208)..(209): n is a, c, g, or t
  misc_feature (212)..(212): n is a, c, g, or t
  misc_feature (214)..(219): n is a, c, g, or t
  misc_feature (221)..(222): n is a, c, g, or t
  misc_feature (228)..(228): n is a, c, g, or t
  misc_feature (231)..(231): n is a, c, g, or t
  misc_feature (235)..(236): n is a, c, g, or t
  misc_feature (239)..(240): n is a, c, g, or t
  misc_feature (246)..(246): n is a, c, g, or t
  misc_feature (250)..(253): n is a, c, g, or t
  misc_feature (255)..(255): n is a, c, g, or t
  misc_feature (258)..(259): n is a, c, g, or t
  misc_feature (266)..(266): n is a, c, g, or t
  misc_feature (271)..(272): n is a, c, g, or t
  misc_feature (276)..(276): n is a, c, g, or t
  misc_feature (279)..(279): n is a, c, g, or t
  misc_feature (281)..(281): n is a, c, g, or t
  misc_feature (289)..(290): n is a, c, g, or t
  misc_feature (295)..(295): n is a, c, g, or t
tggctactaagggaacttgggaggntcccacctcagccttcgtgactagtgaggtgcgcaaacgcccganttttccctggtgcncggnttncgcctttnnngtnccctccanncttnctnntntnttatccncntnnttnncannnnttttnttcctnttnngnananntngtntnntnctntnnnttntnnnttttnngttttnttnncangnnnnnntnngttttnttntttnnttnntttttnttannnntnttnnttttttntattnnggcngtncnttgccatnnttagnttgttgtggcattttta

SEQ ID NO: 648830 - DNA, 690 bp, Homo sapiens
agcttcaccaacaggaactatgacctcgatacgactcggtgcagccgtatttctactgcgacgaggaggagaacttcgtacctagcagcaagcgagcgaagagcgagctgcagcccccgtgcgcccagcgaggatatctggaagaaattcgagctgctgcccactccccggcccatgtcccctagtccgccggctccgggcttctgcttcgcccgtcctacgtcgcgggtcacacccttctcccttcggggaagacaactgacggcggtggacgggaggttctccgacggccgaaccagtctggaattggatggtgaccgagctgctgggaggagacttggtgaaccagagtttcatctgcgacccggtcgacgagaccttcattctaaaatcatcatcactccaggactgtatgtggagacggttctcgtgcagacgccaagttcgtctcagagaagctggcgtcctagcaggacttgcgcgcgaagacagcggcagcccgaaccccgaccaagatcagagaagtttgatcgaactccagatttgttactgcagggatctgagcgccgccggctcacaagtgcgtcgaccctcagggtatttcccataccctttaaagacaggaggtcgccagttcctgggctcgaagaactcggggccttcttccggccgaatttttgaaccactcgg

SEQ ID NO: 648831 - DNA, 697 bp, Homo sapiens
ggtggtgtgagcagaggtccacaggtgggaatacatatggtgagtaggctgaaatagcgtcttgggggcagtctgccttgtgcaggactcctgagaagcaggcagcgtctgactgtggagggcactaggggaagcccttcttagtcagtcccgcatttcccaaagtgcctttcacagactgttagtcccaagtgatgctctatgaaaacagatcagtaatttacaagtttgggaaatgctgcgtatgttccccctttggcagattcccaatgcatgttggcttattaaagcatctttgaagtcctgcagagaaaaagccctctttaacactaagtgcaacaatttccaaatgtatttgacacctatgaacagctgcagacataacttattccacaaaacacaccttgtgtgcggcagcgcagtgggaaccagtgacacggtgtttaacgggagtgtagttcttccggtgtgtcacgcagtaccaattcccttatgtcagcacgagagcatgcatgtggagtctacacagatgtgcccaaaacctgctggcaccagttgatcccgctctgctgtcctggggcaccagagtacgttgtgctggtaagctgaacccacgctgccctcgcattccttagcactgacagcatgtattcgcccttggccattacctcgccttcagcctatattgccaccacac

SEQ ID NO: 648832 - DNA, 183 bp, Homo sapiens
gtatgtccggctgctgatgatcgggcatccggggtgggcccgacctgactagctgtgccgcttcaccgacaacgagttccactacctcgcacatctaccaccatcggtgtagactttaagatgaagaccatagcaggtagacggcatcaaagttgtggataacagatctagggacactagcag

SEQ ID NO: 648833 - DNA, 332 bp, Homo sapiens
accagctattttctgccctggtttgacaacaaggtaaatgttataatctctctcacacagttaatgagagacactgattcaaaatttccttgctactttaaagaacttgatcaaacatagcattgatattgtctttaatcacacttactggaccacgaaatcctggagggccaatgtcccctttctgtccctacagtgaaagacatttacaaattgtgaatatggtcacccaaagtatttacatataaaaagcaagatgtacagttaaaatgaacaatatattgatatgtagatgtcatgtacaaaccaaattaaagttaaagagacactga

SEQ ID NO: 648834 - DNA, 514 bp, Homo sapiens
  misc_feature (287)..(287): n is a, c, g, or t
  misc_feature (382)..(382): n is a, c, g, or t
  misc_feature (438)..(438): n is a, c, g, or t
  misc_feature (451)..(451): n is a, c, g, or t
  misc_feature (476)..(476): n is a, c, g, or t
  misc_feature (485)..(485): n is a, c, g, or t
  misc_feature (502)..(502): n is a, c, g, or t
tgagatggagtcttgttctatcacccaggctggagtgcagtggtgcaatcttggtacactgtagcttctgcctcccaggttccagtgattctcctgcctcagcctcctgagtagctgggattatagttgtgcaccaccaagcccggctaatttttgtatttttagtaaagacggggtttcactgtgttggtcagactggtctcgaactcctgacctcaggtgatccacctgcctcagcctcccaaaatgctgggattacagacctgagccatcgtgccctgccaatnaacaaagttttgatgagcgtttttctcttctctccttctagtgaatccagttttgggaggttcagggtcataatgttggggatcctgcccagctntctccataatcccctgtgtgtattattgggaaatgccctttttaattaagggggcncaaggttattccnttagtgaggggttaattttaggttnggaattggncttcggttttaaaagtngtgaattgggga

SEQ ID NO: 648835 - DNA, 153 bp, Homo sapiens
tcccagctactcaggtggctgaggaaagagtattgtttcagccgagttcaaggctgcagtgagccatgattgtaccactgtactccagccaggacaacagagtgagactcttgtctttaaaatgaaaaaataaatgtttaatgagaaaagtga

SEQ ID NO: 648836 - DNA, 765 bp, Homo sapiens
tctggaaacctagggctctttatttccatggtggataattcaaacaaagtcattcagtagtcttggtccaatttttttttaaaaaacaaaaaaccctcaaataaaaaatctggggcttaaaagaactctatcacaggagccgtggtgggaggatccctagttttatatacatgagaaatagaagtgcagagtttctcgtgaagaggtgttctaaagaaggaagtggatagctgtgagggggcttattctcccaggctcaaagtgattataggggtgggtgtcacaggtgctacggatatagggcggagtagggacagatgactcacggccagaggggcctgggaacgggactctggctggtcacacaatggcagggtacacaagagagggggacaacaaaaagtacatcaagggcgccaaccaacatctctgggatcagacgcattcatcatataacgtccaaaagggtggtacggcataggggagggtgggggtagaggtgcctaacagcggtcagccaggggacacagcctgcagaaattccccgaagcctgggcgctctgggggcgtgaagccagcaatcttatggtacccccttggggtcgcgaaggtcaatcttcatgtgcccatgggggtctccacaaagaacagggggctccggaaagccaggccttaggtacttgcaaaggttcaccagggtgcggacccaggacaacctcgcgataggacttgcggccgcaaagagtatcacaaacgtcgaagcac

SEQ ID NO: 648837 - DNA, 1395 bp, Homo sapiens
ctcacgagactagtccctgtgtttactagcatgtatactttagcgcacagagctacaaccaatttgtaagaattgcactctacttatgtatcactacacaacttaaacaaaactatgtctaatgtatattaatacattccaaaaaggtgcccgcgactaccagtacatcaggtatttgtcatctgatatattgattggtatgatgtaccttttgaaattggtacatgtgctcgcgactcacacatgcaatcatgtcattgatgattgcctactagtaactgtgtccttatcgctatgtcactctagatgtgtccccatttctttgtgtatccaggcattaaagttaaccagctacaatcttgaggcctcgagattttatgtccttgataagtctttcttgggtgaacgtggcacaccttggtcatggtgcctgaccgtgtgtgagtgcaactcttccagcactctcacgagaagtgtcctaacaagaagagtgccaccccgtggacagccctgtcagaggggacacccatagttcaaggcactgtcacgacataaccttagcagagaagacgctgctagtgtaactgaggtcgaagttataatacatggggccatcaaaatcagttgccatcaaacactatatataacataccgttgggagatctacctcgtagaacagaagtttggcccccaatcccatgtgtcttccaccgagaggtgatttaacacgaaggggtgctaaaccccagttgggggttctacaccccttgttgtgtaccaccccgaagcatcttataacgagagtggttacaaaaggacctacaaccccccggtgatatccctctgtgggagagaacaaacccacgaaagttggttccgacgatacatctatagcagaaacgacaacaatcaaggggacaaagtccaaggatctcacccatataagggtctagccacatcttattgctttcgtgggtgccacaacatatcactactgtactccgtgtggagtaaacactctctactagaggtcccccattcccacatctctcgggtgtcaacggccataagttaaccccccccacaaaacggggattatctttacggcatcccacaaacaaaaaagctttgtcatatacaggccagctttccatattccaaattctaaaaggggtccaaaatttaaagccactttcaacatctcacactgcgtggggcctccactctgacactaattttgccccctaaggtccacaataagacttgacccatacaacctgtcgatgggtctaccacggctcatataagtacagttgcgtgactcatcgacgttgtagactatatcttcgtcaagtgaccaacacgtggacactacaaaacgctgtgcatcccata

SEQ ID NO: 648838 - DNA, 130 bp, Homo sapiens
  misc_feature (2)..(2): n is a, c, g, or t
gntgagcaaggctgggcagcttccagcctcagtcacaggcttccggttggccatcgaggcacagcagcgcaaagtctggccagcttcaaatccttagcccatgccgtcattggttatttccatcagtgtt

SEQ ID NO: 648839 - DNA, 114 bp, Homo sapiens
atatctctcatcgtaaagccacacttatccccacctggctatcatcacccgatgaggcaaggcagccagaacgcctgaacgcaggccatacttcctattctacaccctagatag

SEQ ID NO: 648840 - DNA, 156 bp, Homo sapiens
tccgagcaggaagggttgctggatgcctgctcaaacacgtgcttctctgtctgtaccagtcacatatctcgtcatcatgcacccagtctttcttcaccactttcataggcgtaacattttggtcattcttcttcaaccgcaaccaggagaaccttt

SEQ ID NO: 648841 - DNA, 360 bp, Homo sapiens
  misc_feature (7)..(7): n is a, c, g, or t
tgcattngatttacttaattgttcaatcctagtatgtagttgaccctagaacaacacaggggttaggagcacctatgccccacacaggcaaaaatccatgtagaacttttgcctcctcaaaaactaaactacaaggagcctactgttgagcagaatctgactgataacagtcaattaacacgtatcttgtatgctgtatgtattatatactgtgtccttacaataaagtaagctagagaaaagtcaatgttattaagaaaattataagaaaaagaaaatatatttactattcattaagtgaaaatggatcatcctaaaagtcttcatcctcaccatcctcacattgggtaggatgcagag

SEQ ID NO: 648842 - DNA, 168 bp, Homo sapiens
aagacgttctggggaatctcgcttctggcctgggatgttttagctcacttggaaagtgctagagacccaagtgagcagatcccgtaaacagtctgaagagctgcgagagcgtgcagtgcccaggtaaggtgctctatggaaccaaagattctgtaaactacaggcgtc

SEQ ID NO: 648843 - DNA, 212 bp, Homo sapiens
ttcaaatgggcacagaaattcacggtcatatactgtactactttcaccaagatcacacagttttgcaaagacttgtcatatgtacaatgctatatatcacatgagaaaagctgtaagctattatatacgccaaataaatgtcgctatttacagttcgtcaggagacattataaatcatctatacattatatttctgtgcccatttcaagggc

SEQ ID NO: 648844 - DNA, 447 bp, Homo sapiens
  misc_feature (235)..(235): n is a, c, g, or t
  misc_feature (376)..(376): n is a, c, g, or t
ggcctatggcatgaagagatgaaaaaccagattattgcatgcaatggctctattcagagcataccagaaattcctgatgacctgaagcaactttataaaactgtgtgggaaatctctcagaaaactgttctcaagatggcagccgagagaggtgctttcatgatcaaagccaatcttgaacatccacatgctgagccactatggcaaactcacgtagtatgcaccttcctacggncctggaagcaggggaagacgtgggatgtattcatttacaggacgagaccagcaggctaatccaatccagttcactctaaataaggagaagctaaaagataaagaaaaggtatcaaaaagaggaagaagagaaggagagganacagcaccatgtgtctcttggagatagagtgaattctaatttgggtcctgagaaagctggaagagacacat

SEQ ID NO: 648845 - DNA, 398 bp, Homo sapiens
  misc_feature (267)..(267): n is a, c, g, or t
  misc_feature (320)..(320): n is a, c, g, or t
  misc_feature (355)..(355): n is a, c, g, or t
  misc_feature (371)..(371): n is a, c, g, or t
  misc_feature (382)..(382): n is a, c, g, or t
tgagacagagtctcgctctgttgccagggtggagtgcagtggcgcaatctcggctcactgcaagctccgcctcccagcttcaagtgattctcctgcctcagcctcccgagtagctgggattataggcactggccaccacgcccggctttttttgtatttttagcagagacagggtttcaccgtgttagccaggatggtttcgatcccctgacctcgtgatccacccgcctcggcctcccaaagtgctgggattacaggcgtgacacncgcgcctgggcaagggactttggtctttcttgcttggggctgggatgagtgtntcctgtgtgagaagaaggaggcacaaggcagattngggtgggccacagctnttaaccggganccacagagcgggcttt

SEQ ID NO: 648846 - DNA, 572 bp, Homo sapiens
  misc_feature (235)..(235): n is a, c, g, or t
  misc_feature (398)..(398): n is a, c, g, or t
ggcctatggcatgaagagatgaaaaaccagattattgcatgcaatggctctattcagagcataccagaaattcctgatgacctgaagcaactttataaaactgtgtgggaaatctctcagaaaactgttctcaagatggcagccgagagaggtgctttcatgatcaaagccaatcttgaacatccacatgctgagccactatggcaaactcacgtagtatgcaccttcctacggncctggaagcaggggggggggggggcttgcttcgtggaagacgtgggatgtattcatttacaggacgagaccagcaggctaatccaatccagttcactctaaataaggagaagctaaaagataaagaaaaggtatcaaaaagaggaagaagagaaggagagganacacaggcagcccatggtggtgctcttttggggagaaataggagatgaatggtctggaatggtgtggattccctgagggaaaggacttggaagagaccagcatgtcttcagtagccaaactacttcttgagcatagataggtatagtgggtttgcttgaggtggtaaggctttg

SEQ ID NO: 648847 - DNA, 552 bp, Homo sapiens
gcgaattcactagtgattgtgagctgagatcgcacccggtccaagcactggctttgagataagcaatattaaaaacattttcagcttcatcagatgctgactaactgacctccaaccactgttccaccagccataactacagctttggttggacaagtgactgatttcagtaactttttcctgacaaggtgactacccatcatggactggttctggctggcttacagagctcctgcacttgcatgtctttgtgtcctgaaaaggccttttgccatatagggcctaattataatacatttaaatgttaagtctccaccccaaagtgaccatgggttgtatgttgcatgcatgtttgttcaatatgcatgtgtcagaaccactttcatgaatattcatagctcctcatgtaacctgttgaatgtgtatgtttagtcaatccattgagcatgaagctcctaccctaaaccctccttctttgaagttgctgtctctcgtcttggctggagacatgcttccccgcaggtctcactccctttctgaagctggagcgca

SEQ ID NO: 648848 - DNA, 378 bp, Homo sapiens
  misc_feature (1)..(1): n is a, c, g, or t
  misc_feature (104)..(104): n is a, c, g, or t
nattgacccacttggtgaaaccctcctgccagaagaattgtttgagggaccagaagtttccattttccattgaaaaagttgtttcagggccctggctccggttntcacgcctgtaatccccagtgctttgggaggccgaggcgggcagatcatgatgtcaagagattgagaccatcctggtcaacaaggtgaagacctgtctttactaaaaatacaaaaattagctgggcatggtgccacatgcctgtagtcccagctactcgggagactgaggcaggagaatcgcttgaacctgggaggcggaggttgcggtgagtggagatcgcatcactgcactccagcctgggtgacagagcgagacttcatctcaaaaaaaaa

SEQ ID NO: 648849 - DNA, 445 bp, Homo sapiens
gggccgtcccagcagtccactagcagtgttgtccctgtagtcctggcatcatgaaggatgtatatgtgaaggggttgtggaattctctaaggagagctactgaggccgggcaacatgtggcagggcagttcccacaggaaggccctgagaggccattgcacgaagcagaagtaaagcctgggctgtcagagatcccaggtggtaggggtgtgagagtagaggtgcctgctgggaactgctggcaggaagtggaatcagcttaaaagatgtatctggccaggcatggtggtgcgcacctttaatcccagcactcgggaggcagaggcaggcagatttctgagtttgaggccagtctagtctacaaagtgagttccaggaaaccctgtctcgaaaacaaacaaaaaaagatgtatctggaagtcagcaaactggactgctgggaccg

SEQ ID NO: 648850 - DNA, 292 bp, Homo sapiens
acaggcctgcacagaaaatggcaggtcacagcaaaggagcagacatgtagtgaatcagcccaagaatatgtacatgcttggtgagaactctttggttaccacagaggctggcccatgaggtagggggtgactcgagtgaatgtcactggtcaaaatgtcccggatcatagtagagagataaggcgcccgacagacaaagcactcatcccgagtagggctgggagggtggcggcaacacaagatggtgctgggtcttcacagcaatactcccggacacaggacatctgcggcc

SEQ ID NO: 648851 - DNA, 256 bp, Homo sapiens
  misc_feature (7)..(7): n is a, c, g, or t
  misc_feature (248)..(248): n is a, c, g, or t
  misc_feature (251)..(251): n is a, c, g, or t
aaatcgntagccttttgaccatgcggatccttccattttcaccgtgctgactgccaaatccctccgacctggggtggctattgctgactttgtcatctatccacctcggtggggagttgcagataaaaccttcagacctccttattaccacaggaactgcatgagtgagttcatgggcctcatcaaaggtcactatgaggcaaagcaaggtggattcctgccagggggcggcagcctgcacagtgccnttnccctc

SEQ ID NO: 648852 - DNA, 417 bp, Homo sapiens
  misc_feature (21)..(21): n is a, c, g, or t
  misc_feature (170)..(170): n is a, c, g, or t
  misc_feature (229)..(229): n is a, c, g, or t
cccccccaaaaaaaaaaaaancccctttattttgggggtaaattttccaaaaaccaaagtgggcgtctcctcccccccccgggttaaaaaacacctcttaacctccgcgttaagaaaatgaccaaaagggaaaacccgggattttaacccttttaaattaaacacccccnggggccctttttcccccccttccgccccgggcccccgccagggtcccttgttgtcttcncaaaggtcactgggctcctgttttatgtaatgactgaccagacgatctcgcccactcagcaatgtgaacagacacccttgcatggtgccggtggtgggtgcggttgtttctggatgtcatggaaaaggctggggcataccagggctttccccaattgtgcctaaaataaattggctcttgggaggtta

SEQ ID NO: 648853 - DNA, 968 bp, Homo sapiens
cttctttttccccgtttttgtgggcccccccgtcggtggttggcttttttcctggcaggctccccgtgtgtggttgtgttgtcttgcctcctgttggtacgtttcattgaggctttgggttgtgagtgctgctatctagctctctagccgccgttcccgcgctttctccgtcgcttatatttgtgttgtgagtagagtggggggtcgctgcatcttttctcttagtttctccccccctctcccgcggtgtggttttttctcgtcgcgctccgtgatgcgcgcggtgttgctcctctctctgttcgctcccgcgacctctcgtggctctccctctcccccgcggggagagacagccccgcgcgctccactttataaatatatcctccgcctccttcccctctctctctctctcttgagacacactcctctctcccaccgcgcgccgcataatgtgtttggggcaccccgcggcgccccctccgcccgcgcgcgtgcgcgccccccccccccccctttcctccccctctcctccccccacagagacacaccaccccacacacacacaccacaccctggccctctgacccttaacacacctcctccacacacacccccactcaccacccacgcaacacacactctcccgcgcggccacccacgagccgcgctcttttgggagggacagcgcgcactcccccctcccccccccccccccccccccccgcgacacccccccccctctccccctctttcccccccccccgcgcagccccccccccccccccgacaccccccccgcggggcgccccacccccccccgcgcgcacccccccacacaaagaccacacccccgggtccccccctggagagtttctcaccacccccttttaaaccaaattcccccctccccccccccccccccctttttccccccccccaccccattaaatttttttcccccccccaca

SEQ ID NO: 648854 - DNA, 684 bp, Homo sapiens
tgtctctccggtgcgtgctttcaaaatgagccaaatactagaaagaacaaaggtacatgctgaataggggcgtggctcgagcagtgctgtctattacctgtggcacataagtgtgcccgatgattgcccaacggacatggcccttcagaaatcccagtcatactgaataccaatagggtggaacggcacgcaagtccgttgcgaccggtaggctactttatgtgaagagcgaagtcgatcattctgactcgcacttaatgcttgcgatacccggtcgcatggtcccttgtcgaagggctaagaatccaactcgttgtcgatgtgtgggctagtttgacccgtgataggtagtctaggcgacctaggaagctcggtcaatgcctccgtagcggacacggaacagcctacaagcgtctcgaatgcccagaggcataggaaggtctgggagggaagtcagcgatcgacgcgaatactggagactctccaggtctcgtgtatgcatcgtaatttcatccaaaagaacgcgaacggcacactttaactcagtcttggaatgtatagcaaataaacaaagggaaattagatggcttactttcttttaacacaatgtcaaaaaaaaacaaaacaatctatccagccgaacacacaaaccccttctggtcgggcccctttgcacccctccaa

SEQ ID NO: 648855 - DNA, 120 bp, Homo sapiens
gttgtagacagcggcctagaagaaccagccctcaaaatcgagtaggaatatctacatcgaggccactcagctccaaggtaccgatgatgcatccatgtcagtcctcttgttcgaaggaca

SEQ ID NO: 648856 - DNA, 108 bp, Homo sapiens
gagataatgaatggcctagtactagataatatatgggcccacaggcttttgactttttatcctcggggaaagccattttgttaacaacactagtgagatttacataat

SEQ ID NO: 648857 - DNA, 407 bp, Homo sapiens
gctgccaagaaagccacccgttaccttggccgaaaggggcgagctgcgcaagtccattttctcgtgagtcccggaagcccagggtgtccatcatggagccgggggagaccgggcggaacagctaccccggggccgagacgggccttttttcacggtccaggtccggctcagaggaggtgctgtgcgattcttgcatcggcaacaagcagagggcggtcaagtccggccgggtgtgccaggcctccttcggcgagctgcatctcaagcccgaccgggggggcgccgctttccgagaccaccagtggctcgaagcccatcggggcatgggaggcttgggcgcctccatgcaggggcaggaagcagaggtgagtcagggtgcacaggcaagtggcggcagccaaggaagg

SEQ ID NO: 648858 - DNA, 356 bp, Homo sapiens
aagtctgaaggagagacttacgagaaagagaatgagagatatttttctttacaaacttttgttcctctggggctcccattacaaatttcagggtgaatcaaaccattccagcaaaacccatagagtactttttttctttttctttttcttttcttttcttttttttttttttttttgggaaaaaaattttattcctttttgcccaggcggggggccaaggaaaaattttaagttaattgaaccctcggcttggggggtaaaaggaattttctttaaaatttggggacccggcctaaaattcgaaataagggcaatggtttttcccggggggaaaaaaaggccccccaaagaaaaaa

SEQ ID NO: 648859 - DNA, 595 bp, Homo sapiens
agaagccctgggtggacatgttccaaaacaagggcatggttttactcagcacctttgaatctttgatgactccaggctctggtaggagccaggaggagatgtcaggtctgaagctgaacccgtgtggtcgtggcagctctccccacgtgggtttcccaaggcgctcaggctctgagttgttcttccagtctgtaatgtggtacaaaggtaggaggcatctcaaaggatgaactagaagtaatgtaataagcccttagcctgaggcccggcacgtagcgggcaagctgtgaactccgactgcgccaccgtattccggacatgctgtgatcgtcgggtgggggcggatgttgaagcatcagtggcctctgtctggttagcgacgctgcacctcctgacccctttctactccctcaggcttggtccttccctgggccccgttagcttcactgtgagtgcctcccattcatccaggcatccgtgtcccacgcagaggtccccatgacagtgaggacttacgtcttttaaactgcagttcccgtagtccctggagcggtgcctggcatgtcgtgggctcaataaataatcattgaataga

SEQ ID NO: 648860 - DNA, 1347 bp, Homo sapiens
  misc_feature (338)..(338): n is a, c, g, or t
gtgacatcgtgtttaaaccctgcttggaagtccctgacgcaccgccgtgatgcccagggaacgacagggcgaccgggaaggtccaattacttccttgaagatcatccaagcgtattggattgattgatctcgcaagagtgttgtgcatcttcgttgtggtaggccaggaccgaaatgtcgtggcgtgccataagcatgaactcgcacgtccaggatcgcgccatgttccttgcagtgtgcgagatggctcgtgggttgctgaatgtgcgcaagacacatcacagttgatgcgtcgaaaggctcgatcccgagagtgccactcggtagggacacaaacnagagcgctcaggcatcctagggatgcacaagctcgcttgagctcgataatccgtggtggagatattagttggggactatttgattgtatcaaccaaattgtgatggtgactcatgcaaactcgaagactcaacggggacgagtagtatgcgtggggctcaaagtaaaaggcgtttgcaccatggcattgcatttgcactctcggttggccttggggtagcacggatatggtgcacccctatggctttgaacacgcgttgacgtacgtaagcctacagaggctcccaatgaaaacctaccttcgggttccgtcacgtggagccacgaggaagcaagaaggaaccctgtccccatgtctatgcacctatggcgccattataacgtggttgagttcatatcgcgaagctgaccaagagagttcttacccaagtgcgggggtcacccccagtttaggccgaaaatttcccctggggttagttttcacggaaccctaatcgaggccatggggtattactaagcaatagtcccttgtgtcaccaggctgtgcacttttggaacttacttacgggcgaaggcaatgggccaacaatcttcctttgaccgattattccatacgggcttaatatcccttggggacaaaagaggggtttgttcaccccggtcgaaataggttttggccccgaagttagggtgccttggatcctttgcacggcggccatttcggggtcgttaaccccacaagaaacgttgggttttggtgtacaacttcccaaaggattataggcaccacgaagatgtacctttatctacaaatatccgaaaaaccggggatggttaaccgaaaaactcgtgaaggattcccctttacgcccgcatttttgagattccttggactggcgcaacgaacgcggcgtcaactttatacacaagcgacagtttatggcccaccaataggcttattgggtcacattgggacacacacaaggggattcccagtgggggatcacgtt

SEQ ID NO: 648861 - DNA, 1150 bp, Homo sapiens
ggcaggattcgggcacatacctgtacttctgctccagagatgtgcgactcccacaaatcccctgtagtacaacctctctggaccatgcatgatcagaaacacacatgcgatcagagatgagcgagtgcacatcaccaccatcatgtggagacatccagacttgagggaggataggatgaccttatacactatgacaaaatcatcccatgccatcactcatccagaaaacatgcataccatgcatggcactctcatgccattattatatgcaggacagagacacagaaaacaagacaataggccacagtaggtatgaggggcactgcatggcaaccagacagtgacatgaaccatcagcaacagacacacacagacgtcaatccaccacaaggacaccataaaacacaaaaacataaactagaccacactgcacacaagagaagacacagagaacaacacggcaacaacaaagagaaacaacaaacaaaaacaaagcagaaagaggcaaaagaaataacacatacaagaaaggaacaaccacaataacaaatcccagaagacatacacataaaacaaacaaacaaacagcaccgacacagacaggaaatacgcaaataacaccggaaaaaaaagacaaaacaaacccacaacacaacaacaaacacgcagaagagaacacatagacagaaaccaactacacacaaacacaaaagaaacacagaggagcagagacacacacagaacacacaaggcaagacaaagaacaagaagaaagacacatacataacaaacaggacacaactcggacagacacaagatccagagcgaacagaccgagactcacccacacaacaaaaacagaaccaacactgaaacacagaaccacaacgacccggcacagaaacagacacaacagcacaacagagagagcacacaacggcacacacaccaccaacaccagacacacaacacacaaccgaaagaaagagaacaacaaacagcacacggagagagaacgaagcagagacaagaacagaaagcagagcaaacacaagacacacgaagaaccaaaacgacgcgaaacacgcaacgaccgcacggaacaagacgaacgaaaaaaaaaaacgaaacacagaacgccccaagaaaa

SEQ ID NO: 648862 - DNA, 224 bp, Homo sapiens
gttcgactcgaggtactagcaggatcctctatagatcgagcaggctccatctataacgatattatggagtgtcagcacggtactcacgtgtcgacggaacttgtacagggaaggcatgcaccgacagtgatagaatacacgatcgaccatggctccagtcttaacgagtatttggaggtcagtcacgagtgctcacgatgatcgacaggagacttgtccaggga

SEQ ID NO: 648863 - DNA, 196 bp, Homo sapiens
tcgacttctagagcgatcccccattggtccgagaggaaattacggagggcctgaagtccaggaatgtatttcacatagcctgccaaaaaaactttaaggctaaaaacaaagcataaccagttaccactaatcttaagaagataacattatgaatgaggaaaaagttaacagtagtaaattagagcttttgtaatat

SEQ ID NO: 648864 - DNA, 1141 bp, Homo sapiens
gacgggtttggtcccccaaaggtcttgtcgaaatatttgccccccaaattagtatttttccaactgtgaagtttttaaaggagggggctcataccgcccccccacgagcgtttttgccagacaccaactgtttttttcctccggcggggaaaaattcggtaatagatcccccccccgcggtggcttgttaaccacgattgtagacttctttgtccgtgggttttttacacccagaaaaggggcccaacaggccccctccttttggggggtataacataacttttgggcgtgggccacaaaaagggtgccgcacaaaattagtcctttccccaaaaaggcgtttttcacaaaagttatgaataaataaatagtaatattttattatgggtgcaaattttatctggcgcccctcttttgggagatagtaacaccacagggggatcccacaaaagtgtttccctcgtttttgcacccctctttattattgactgtgaatttgttttcgctcagtagaacgcgttcttttgcttaaatattgtgaaagacaaaattatataacacagaataccacccacggttgaaaaaagttttattaaaaaaaatcaccccactccacccgagatatttggggtgtgtggggcgtggtatatatcacaagagtcgctatattaaatataatcgtggagatcggggaatatacccacaatttcaccacacgccacaatataattaaggagatcttaatgccacaaattgtgttataacactatggtataagttgggcgcgcacacattatagaaaataataataatagaaataataataatttttcacacccacgcacattttaactacacttgttaccccttccccccacatgcctgagaattatattttgtttgtgtgagatatttgatacacacgaaatttttatatgagctttttaataaatgtggagtttcctatttttaaacccacatgcacgcttcactcacaatttttaaaacacataatcagagaaaagtagagaattaataatctaaatttaatacccaaataaatttaacctaatttaaaccagcagaaaagtgcttagaaagttattgtgttgccttagcacttctttcctctcccattgta

SEQ ID NO: 648865 - DNA, 403 bp, Homo sapiens
gtgcctacaggagcggcagctgccttcctgtttggtgaatgggtacgtggggtgattgattcttagtctgtttgtgctattgtaacaaaatacctcagactggatgatatggtttggctgtgtccccacccaaatctcatcctgaattgtagctccctcaattcccacattttgtggcaaggacccagtgggaggtcattgaatcacgggggcggctctttcccgtgctgttcttgtgatagtgaataagtctcacaagatcttatggttataaaaatgggaggtctcctgcacagcctctctctctctttgccggcttaaccacaggccaccatggccaccagaaaggaactggaagatatgatagaaaatctagagccccatattgatgatccagatggta

SEQ ID NO: 648866 - DNA, 827 bp, Homo sapiens
tacacatcttgtaattaccttttttgttgttgtgtagcaagcatttgtaacacatgtccaaataattccacagtcctgaagcatgaatcgaatccctttctcactttggaaggtgacttttcaccttaatgcatattcccctctccatagaggagaggaaaaggtgtaggccgtgtcctttaccgagagccaaacagaggccagggagactccgctgtgggaaacctcattgttctgtacaaagtattagctaaaccagaaggggtgatgccaggaggagttagccataacaataacaaaaacaaaaaatgtggctgtctcaatgttttcagcttctaatggatatcttggagataatgtgatttctatatggtaatcttctttcattagaagtgaccaaacttaagatggtaagacctctgagaccaaaatttggtcccatctctacccctcaaatgcttagagaatggatcagtgtccccctgtatgttgaggtgaccacttaattgctttcctggcctcgcttgggagactagaacggaacagaagactgtgtttgggccaactgatttagccatgtggaaactcatgctcatttaccctttttcttgggtgttgaagcctggtgtctctagaagtggcatcttcaatgtgctttggatcagtccagtgcgggcacatcttgaatagcttttgtacaaagactttttcacatttatatactttctgaccctttgctttgggtttgtgcacccggggccccattggtgtgaaactctaggccggggggggtggggccctaaagtcttccaaccacccttttgggg

SEQ ID NO: 648867 - DNA, 297 bp, Homo sapiens
gacgctgtggtgcagggggggctgggcactggggagcggctctgaacgggagtggcagcagctgacccccttagatttggaaatagtgccaaggaaaaaaaaggactctgaaactctggcataaaatacacataaagtatctcaaatcaggtttgagcggtggcagtgcagcaggtgaggtggggccggcctagagcccctcaggacaagcccctgggtcccgtctcagggcgggggcacgcagcagggtgcagggtcacagcctggttccagctcgagtctcctccctgagggagg

SEQ ID NO: 648868 - DNA, 806 bp, Homo sapiens
ggaggcgttggtgcgaggaggcgccgccatcttgcgggctgctgggactccgctgtcggttggcgacttccctggacgtaggtaagtgtgttgaggccgggttgctgaggccttgcttcgtcttcacgtttgaccacatctaggccacgatgccggcgagtaccagacctgggaggagttcagccgctgctgccagagaagctttacctcgcgtggaaccctatgaaggcgaggtgtggttctcaggatataggacattctgatgggaactgtgtgtgtggaaagtaacacgattgatcttagttatgtgtggtggtataaatagacgaatcaaagcgtcaatgaatgtagaaggaatcgacttgaggaagagttcgcacaggatcaagcttatagtgctgacttgtatggtaagccaagggtacagcccgcacatgattgacgcatggcataacgtgaggtgaattgggtttgagaatgaaaagaactcttcgtacgtggtagcttgaggaacgtaagatatactgtggagaaagtgaagaagaatagtggtcggggacagaaaggtacgtgttatggtaacttagagtgtggcatggttcagaaagctttaagagagtgcattgtatatgtaaagtgtgtcttattgaaactgtaccttttagaagaaggctaagggaatgcagattgtttacaaggttagaaaagccgttaatttgacctattgggaaaattgaaccagagaatgcattctgtcgttcaaaactggagattactatgatggtaggttaaaaatggttaatggg

SEQ ID NO: 648869 - DNA, 453 bp, Homo sapiens
  misc_feature (7)..(7): n is a, c, g, or t
  misc_feature (213)..(213): n is a, c, g, or t
gcagtancatttggccataagcggtggctcacacctgtaatcccagcactttgggatggcctaggtgggtggatcacgaggtcaggagctcaagaacaacctgaccaacagggtgaaacctcatctccactaaaaataaaaaattaaaaattacccggcatagttgcatgtgcctgtcatcccagctcctcgggaggctgaggtaggagaatngcttgaacccggaaggcggaggttgcagtgagccgagatcacgccattgcaccactgctttagagcatttgtgcattcagcagtttctttattgttgtgaagcaggttctttcaccaatggtgactcactgaatgctcacataactccatgaaatgattggctttagccccattttacagatgaggcagccaaagcctggagaggttatatgtgaaaggataacacaggaagtgctagga

SEQ ID NO: 648870 - DNA, 317 bp, Homo sapiens
gtggagggagatgagcccggcctcagtttttttcccaaccccttttcctttggcctgggaccgcgaaattttccctttaacccaaggcccggcctttttcccccccccctttttcggggggcctttggttacctccctccccccccccccggcccccggttttaaatattggtggggggaaggggaaaggggtgggccccccccctcccccccatttaaagggcccccctttttggggccccccccttaaaggggtgccggcgtggggggggccccaactttttttttttttgggccataaagctgttttgccccca

SEQ ID NO: 648871 - DNA, 404 bp, Homo sapiens
gccaagtataccagaccttgctcacctacagtagacgattagtagggcgcggatatagctggacgaggtggtgactgtagctcagtgacactgcgtggaacgcggcgcttgcagaggtgagagagcagcgcaaccgtactgtgtgaccttctgggcgtacccaggccccagatggtagccccagactggtgcctgctaagaagccagtcctggagcccatacctacacccctgccaggtgaggatgtcttgtccctgagggaggccggtgtggacaaggcctcgcaacagtggtacctccagctgttgaaggggtcgcgctggcccttggaggctggcactaggctgacagctttccctctctgcacctgcgctctggtgacttggggtggacgcctctgcctt

SEQ ID NO: 648872 - DNA, 633 bp, Homo sapiens
  misc_feature (26)..(26): n is a, c, g, or t
  misc_feature (73)..(74): n is a, c, g, or t
  misc_feature (81)..(81): n is a, c, g, or t
  misc_feature (95)..(95): n is a, c, g, or t
  misc_feature (118)..(118): n is a, c, g, or t
  misc_feature (123)..(123): n is a, c, g, or t
  misc_feature (136)..(136): n is a, c, g, or t
  misc_feature (145)..(145): n is a, c, g, or t
  misc_feature (148)..(148): n is a, c, g, or t
  misc_feature (154)..(154): n is a, c, g, or t
  misc_feature (157)..(158): n is a, c, g, or t
  misc_feature (164)..(164): n is a, c, g, or t
  misc_feature (191)..(191): n is a, c, g, or t
  misc_feature (217)..(218): n is a, c, g, or t
  misc_feature (222)..(223): n is a, c, g, or t
  misc_feature (227)..(227): n is a, c, g, or t
  misc_feature (233)..(233): n is a, c, g, or t
  misc_feature (237)..(237): n is a, c, g, or t
  misc_feature (249)..(249): n is a, c, g, or t
  misc_feature (252)..(252): n is a, c, g, or t
  misc_feature (259)..(259): n is a, c, g, or t
  misc_feature (265)..(265): n is a, c, g, or t
  misc_feature (270)..(270): n is a, c, g, or t
  misc_feature (274)..(274): n is a, c, g, or t
  misc_feature (280)..(281): n is a, c, g, or t
  misc_feature (289)..(289): n is a, c, g, or t
  misc_feature (307)..(307): n is a, c, g, or t
  misc_feature (383)..(383): n is a, c, g, or t
  misc_feature (403)..(403): n is a, c, g, or t
  misc_feature (479)..(479): n is a, c, g, or t
  misc_feature (539)..(539): n is a, c, g, or t
  misc_feature (547)..(547): n is a, c, g, or t
  misc_feature (558)..(558): n is a, c, g, or t
  misc_feature (589)..(589): n is a, c, g, or t
gggaggtgcgtcgttggggggggggngggctgggtgtgcacgagatgggaccttttccttgggtccaccaggnnggggggngcccctaggtaccnggctcctcatcacagcggcagcnctctnggttccacatttngtttttttnttntttttnttnntttttngtccggagcctctggacctcggcagcnagctcctccacctggtggcaggtttnntggnnggtncacgcntgcngctgttgcagcntcntattttnctcctncggcntgtngacagnnggcttctncaggctccagggtaggtntcggcaccaggctcctggcttggctggcgggccctggcagggctctcgggtggtgggaaggcggttcggtaaggtnctcaggaggaaggtcccttnccggctgggaacctcaaccggtggcggctcgggcccccggccgcaatcgacgtggtcccccgggccgtcaacctcntccccccacgtgggaaaccgtgggggtgggggaggaatccccaatggggggcaacaatcncaaaggtngggggcatccntccggggggtccccctggtcaatctcaatcnggggaacatgggggtgggtggttggtaggggggggccacggggg

SEQ ID NO: 648873 - DNA, 1989 bp, Homo sapiens
gatcgcatgtgtctgctagcgaggcgtactgctggtcggctgagggtgatatcttgtctgccaatatctgctgtcttccactgagttagccaagaccaaagagcagtgatgcatagtccttgactggcgtagaggatgcatctgctgaacaggcggtgcccagtatcctcatgcatgatctcgtctgggccttctcgtcctcgaatgctgcagcattgtgcgcagcgggacacagttcggacggcttccagatttgacgtggaaccatatcacccatcctgggtaacattacctttgccttccaccatcgcgagcacgcagtgggacatagacaaatcggtagcagcgcaaatcacacggtgggcgctggcgcctcatcgttaccctcacggcagactgtgctcagcgcatagtcgaccccagtcgcgaacgtccggtcgcggagcgacatgcgtagttgcagcccacgctgcgagcgcgagtgggagacaaggagcgacgcacaggccatcgagagaagcgtacccaggccagcgtgcaccgatactctgtccccacgcgtcaggccagcggtcctagcccccagggcacagcggcagacagctcacacgagcaatgcgagagaggcagacgtagctcgcgctcagaggggcgagcaatgccacacatcggatagaggctattggcgcagacagcgtacacccttgtagcaacgcacaagattgcaacctaataagccgacagccgattggagccaatctgcgggccccgtcgctatcgccaaaggcacacgacaaacaattccgaacaagcaatcccaccaacaatatatgcaaccccacagaggggagtacacaccactatgggggcatggaagccttcaccactagacccccattggggagagcatcgccggtgcagcatgccaactccctcacatagcaacacacaagatgggcacacgacagtaaccatagatatggtccggagccgcaacaatacccatggcatggagacagatcccgtagcatggttacccatattccatcaagcagaagagtgcggcctcagcacccctggcattgagtcatcgctagcagctatgaccactctgcgcaacagaaatcaaggactgagcccactggtcacagtcgtacaacgaacgacattcccacaggcgagacaggacagaccacccagatagatacaccattcagcaatacacaggatccacagaccacagctagcaaagagaagcgagacagccaaaagttagaagagcaagcaaccctatcccagcaagagggccagccacacagaggcagcacgctaagaccattagaaacgagcacaaccagtgcagcaattgcttacactccgaaggagacaccacgagccgcatcagcgcaccactgagacgagcgtatacaccaacagtgcacacaagcgagcacacatcaccagtagtaaggtcccctaccacggaagccacgcccacacgaagggccacaacacaatacaccgcaacacgcaaccaccaaaccgcgctcacccacagcccgagccacagccacacacaatccatcaaccagagacacacgagaagtcccacaacctcaaacaagacatgtagccaccacaacacagtgccacgtccacagcacacgaagacaacagaccagagacacaacagaaaggtagccaccgaagactccagggccacacacaagaccacccaagaccacagccacaccaacagaccgcaagaaccagcgagagaaaagcgaagcgcacagcaagagcagagcagcagcacaccaggccacagcaacgccaaacagaaccaacaagagcactacaagcagaaaacacgtggaaagaacatcgagacaaccacacagacccagaagcagaagtcagcgcgaggacagccgcaacaactacgacacaagacaccgcacccacaccccaaccccacaacctaataca

SEQ ID NO: 648874 - DNA, 750 bp, Homo sapiens
aacatcggctaggtacgaggccgggtggttcacataagaagtgcctttcgcctcctgtcgtgattctgaggcctccccagccatgtggaactgtaagtcctattaaacctctttttcttcccagattcttgagtatgtctttatcaacagacatgaaaatggactaatacagtaaattggtaccagtagagtgggttgttgctgaaaagatacccaaaaatttggaagcgactttggaactgggtaacaggcagagactggaacagtctgaagggctcagaagaagacacaaaacatgtggaaacgtttggaacttcctagagacttattgaatggctttgcccaaaatgctgatagcaatatggacaataaaatccaggctgaggtggcctcaggtagagatgtggaacttttttggaactggagaaaaggtgactcttgttttgttttagcaaagagactcatggcattttgcccctgccccagagatttgtggaactttgaacttgagagagatgatttagggtatctggtaaaagaaatgtcaaagcaacaaagcattcaagaggtgacttgggtaactgtctacagggattcagtctttaaagggaaacagaccttaagagttcagaaaatttgcagcctgactatgtgatagaaaagaaaaaccatttctggggagaaattcaaggcagctgcgaattgctaagtgtaagggcctatgtaatccagaccctggaaatgttccgg

SEQ ID NO: 648875 - DNA, 164 bp, Homo sapiens
atgtaccccataaacatagacacctactatgtacccataaaaattaaaaattaaaataaaaaaagagctgctcttagataaaagcaaatcttgcactgatgttgacgttttgacgtatataacgcgatatatagtttcagaagttacattatgaaagaaaaggt

SEQ ID NO: 648876 - DNA, 234 bp, Homo sapiens
cgatctcagctcactgcaactcctttcccaggatcatgcaattctcctgcctcagcctcccaagtagctggaattacaggcgcccaccaccaaaaccagctaattttgtatttttagtagagacgggatttcaccatgttcggccaggctgtgtctcaacactccttgctcttgtggtgaccatgcccacctacagcctcccaagagtgctcgggattacacgacatgacgcca

SEQ ID NO: 648877 - DNA, 329 bp, Homo sapiens
actctcgtgctgcagccatctcagcctcccaaaggtgctgcgattacaggcatgatccattaaacccaggcctttgtttttttgggaaagggattctaattctgtaacccaagccccaagcgtggagttgcaagggcacaatctctgctcaccacaacctcgtgcctccggggttcaagttgattctcccgcctcagcctccctattagcgtggaattacaggctcgtgccaccaggcccagcataattttttggtatgtatagtagagacgagatttacaccatgtgggccaggctggtctcaaacttctgacctcatgatctgccca

SEQ ID NO: 648878 - DNA, 463 bp, Homo sapiens
tctccctattcatttctgattttgttaattaggacactgtccctgtaccctctagttagtttggctaagggtttatctatctcgatgattttctcaaaataaaaccttagtaggttttacacagacagcagctattatgagtgtatgaatgccgtaggcatgtcctaacaaccacacattatttcaaagagctcttccccacctcttacattctctccacttcctcttgctcactgttctccgactcctcgctggaggaagagtaatcagtcactttcttcagatttcaaagggtaccatttgtacaaaaaaaggaaacgtgtgtgctttttatgcatagaacatctctggaaggatttttaaaaactacaaaaagtgatgctattttgggccatggtggagtaatgtggtccctgccttgaaaaaagggaaagggaaaaagggatagggaaaaagtcgacgc

SEQ ID NO: 648879 - DNA, 111 bp, Homo sapiens
tactctctacttcttcatctagaaaggatgatttagactagatcactgttactcaaactttattcattctcaaaccaccttcatggcttttgccacatgcatgcacccagg

SEQ ID NO: 648880 - DNA, 383 bp, Homo sapiens
tctcgaggatctcgcttggatgcggctatttacggttgcgcatagaaatacggacaggctttgctgctgacacagtgtcacacacgcttgctcacagctgtatcctcaggcagacagatgggcctgggatcccgcaggggctcaatgccgtgagtgacagagccatgcagacgaaggtgaacttcttgatgtgggctgccgtgactgtgttgctcgtgctcaccgggtttgtggctgggcgttacttcttgtcgacaagcaggtatacaccagcacggactttccgatcaagccagtccgtagtggcactgtgaccgcacaggggtatgtggcatgtcaaacatcgccactgccgtcgtgatggcatgcagaacatgccacca

SEQ ID NO: 648881 - DNA, 472 bp, Homo sapiens
  misc_feature (463)..(463): n is a, c, g, or t
cattttggagaagttaagtaattgttgaaaaataattcaactggtgagggagtcagacatttcagtaggctgctgtacctcaaaggtttggctggctggcaatcagccttcacatggcaggcatactaattagaaatcagtgtcttgattttcttaaaaagttttggttttgctagcagaaattgtcaattttcccaggcacggtggctcatgcttgtaatcccagcactttgtaggccgaggcaggcaaatcacctgtggtcgggagcttgagaccagcctggccaacatggtgaaaccctgtcttcactaaaaatacaataattagctgggtgtagtagtgggcgcctgtaatcccagctactcaggaggctgaggcaggagaatcgtttgaacccaggaggcagaggttacgtgagctgagattgcgccactgcactccagcctgggtgacagagggaantccgtctca

SEQ ID NO: 648882 - DNA, 147 bp, Homo sapiens
cctagaggatcctgggtgagcaatagacttacttctctgagcctcattttcacatctgtaaaaggaggataataatacctatatctcccagcactattacgttctatagatatagggctattcagattatctacttcttcttttgtt

SEQ ID NO: 648883 - DNA, 308 bp, Homo sapiens
  misc_feature (63)..(63): n is a, c, g, or t
aagaatgcagagaacagaaaataatagagctaaattttttttaatttacaagccacgtatggnggctcacacctgtaatcccagcactttgggagggtgaggtggaagggccatttgaagcgaggagtttgagattagcctgggcagggagaccctgtctctacaaaaaaatttaaaaattagtgggctgtggcggcacgtgcctatagtcccagctacttaggaaactgaggtgggaggattggttgaggcttcaatgagccataattgcaccactgcactgcagcctgggcaacactctcaaaaag

SEQ ID NO: 648884 - DNA, 240 bp, Homo sapiens
cgtgctaggttcagcgattctctgctcagccgtcccaagtagctggggtcacaggtgtgtgccaccacacccagcaaattttggtatttttagtagtgtggcagttttttttaagtgaaaggaagtttattaagaaagtaaaggaataaaagaaaagaaaggctattccataaacagagcagccccgagtgctgctggtggcccatctttatggttctttatagattatatgctaaacac

SEQ ID NO: 648885 - DNA, 383 bp, Homo sapiens
gcgagatgcaggtgtacctgggactgtactggagcttactctggagcacctattttgtgtacacatgggagtgctccactccctatcattgtctgaaggcctcattatgcccagactgctgttgatggtaccattctactgagacactgcctccctggagcccatgcatgcccagatgttcttactgcttaatagccttgagacagctcatttacactgaacctggcaagattgtgggaggctgcgcaacccatgcttgtatgacttactcctgtgcacaacagtgagagcccctttccaggtgcagcatgtgcttcatgggccaccggcagtggctctgtgtctgacagagtaggcttgctcttcctattgcttctacgcgc

SEQ ID NO: 648886 - DNA, 171 bp, Homo sapiens
cgtgtagggatccagacctgtaagcgatcgttgcattactgaactctgtatcagttccacgactgacaccatacctgcaatgatatccaaggcaccacttgaacacacttagagaaacccacaggccagaatgatgtacccatgaaccaggtctttatagccttatctgcg

SEQ ID NO: 648887 - DNA, 869 bp, Homo sapiens
ccgcggtgtgaaaagtgaaacggggctcgaagggacggaggtttttactaaagactttgccggccagggaccaaccagacttggggtcggcaaggacgcgcgaaagaggcgcgcaccaggtattgggtggtcaacaggacagagttgccacgacacagccctgggggctccccgaccccacggcccacactggggcacgacagaggttgtaagaagcagatgtaataccaacagggcaacaagcagcatcccccccaggtcttgggcccaaagagacggaggagacaccaacaccacgccgtggccgtctcaactcgatccctccactgagtgaggccccccggaggagtcgcaaaaactggaaaatgtcgcccccggttggggcacaaccaccaccgggacaagcttgctccagtaagggccgccataaagaatggccgaaatacaagccgccgacaggcaggcccaaggcccgggggccccacaaagacgcacgtagcagccgccagcaaatcgggtgcttttaatagggagtgccacaaaaaattgtctctcccccaccgcccctccgcacagaagagggggctcctctttccatgaataaccgcgatgatatggtggagattatgcctatacataatcgacaatgtaagaagataggtggcaaggagatgcgcacacttacttaagcggagctcaactgtttcagcacggctttgcgagatgcctcccgcacgctgttctgaccagtcgggccccagggctccaattcgcccgtgtctgcacttgtcacgaaccctactagctattgttctccaccaatgggcccccaccattgttcgcagccgaaaagcccccgaccccaaaca

SEQ ID NO: 648888 - DNA, 259 bp, Homo sapiens
aagatgttcgagaggatcaataccggatgtgaataaggaatgtggctaaccctcaattttcatcctgtaccaccccgtccactgacgtgcgtacgggaagttaattgatgaatttatacattggcaattcatgcagttccctgcaccttatttagaaacaaaataagctgtgctcacattctacttgcttggtacacattaagatgtgcaaaaccttccatcagtacgcctgtttgatggttacatgttgaatatctca

SEQ ID NO: 648889 - DNA, 297 bp, Homo sapiens
aggtcttagggagagtacatagctattgaaggattataaagcactttgctaatattaaatgcaccatcaaagctgaataataatcttaatttagggtgaagggttccattagcagagtaaaaataaaaaggacaaagggtagtgttgctttgtaccttgataacagtgtacaaatcaaaagtgctgctattgatcctcattgccctgtgaactctcaacccaggaatttggctcccctccctaactctctaagtacttcccttacccactcagtgtggtgatggcacctccctaaga

SEQ ID NO: 648890 - DNA, 307 bp, Homo sapiens
gcgtcgacaaaatgtcatgaggccaggcacagtgactcaatgcctgtaattcgagcactttaggaggcctaggcggaaagatcacttgagactaggagtttgagaccagcctggggatcatagtgagaccttgtccctacaaaaatttaacaaaattagttgggcatggtggtgcatacctgtagtcccaggtactcaggaggctgaggtgggagtattgcttgagcccggaaggttgaagctgcaataagttatgatcatgccactgcactctagcctgagtgacagactgaaacccgcatctcac

SEQ ID NO: 648891 - DNA, 397 bp, Homo sapiens
agcgccgtactgcgcacagtgctttctgactgcgctgcggaggcacagacgcgtgtagccatgccccaagtccacctgagcctccctgtcactgctgcccaccacctcaaccccgtccttcctccaggcaggctgaatggggaagcggctctcgaaagctgaaatcactatcaccggcttaccatgcttgaccaccagtggctctctcagtttctctgtcacatctggagcaatggcaggggaatactggacggtcagggtggcctcgctctgctggtcaccagctacaaaggtgtacctcccaacttgggtcccctgcacatgcgtgatgaagaggctgtgcacgataccgtattgcttaaagatgactccatactgggtggtgagcttgacgcca

SEQ ID NO: 648892 - DNA, 234 bp, Homo sapiens
gtgatagatggcagcacctgtagatctcagccacgtgggaggttgagatgggaggaagtgacagatcaataggtattagactctcattaaggacagcgcaacctagatccctcacatgcacggttcacaacagggtgcgttctatgagaatctaatgctgctgctgatctgagaaggtggagctcaggcgggaatgtgagacaaggggagtggctgtaaatacagtcgaagctt

SEQ ID NO: 648893 - DNA, 180 bp, Homo sapiens
  misc_feature (121)..(121): n is a, c, g, or t
  misc_feature (124)..(124): n is a, c, g, or t
gccctagaacaatgggaactattacttccatgttagccaaatcttcaggtttctctctctgggtcaagcttcttcctgactggtcaatgcttgagattttactacctgcttgccatttccntgnactacgtgtgtcactatcatacatgtacacaataatggcagaaaatctgagcggca

SEQ ID NO: 648894 - DNA, 301 bp, Homo sapiens
gaacttgggggaagggagcccatcatccgcctgctgatatagtgtctcatggaagaggatgacacccccaatacagaggttcacgcggtcgtcagctgtcagcagcagcaagcggtagaagcgccggttctcctcggtgtactcggagtcaatggactgaagacgcttggaaatgctcccagtggactcatctgcagccaggatacccttgccaggtgacacgatgcggtgagcgatttcagagagctccttcttctgctccggggtcatggctggatatgggtaggtatgatgaatgacg

SEQ ID NO: 648895 - DNA, 317 bp, Homo sapiens
acagactacatcttattccctgcgcataggcaacatgtgatgaaaatatcaacttacctttgggctagatgtatacagattatgcttaaataaccgtggttagaaattattcaatgcatgcttgtcctgccccacgcaatctccctgaatttagctaaaatcaatcaggcacaggcacagtctcaaatattgattaacatatgccatgctactaaacaaggttatctagaatgcacacctcggtgctttaacaacagatagaataaacctcatcaataagcattttcctaaatatcgtcttaaggaggttattggca

SEQ ID NO: 648896 - DNA, 439 bp, Homo sapiens
agaggttatgggtattggtgtctctatccccaggaatagaacttaaggggtgggaagagcaggaaaagaagctggatcacagaagagaggaggttgtgtctcttgctcatagcaagcctgtgggtagaggatagagtgatctggtgtcgaatagcaggatccatgtagattcgcagtatggcctggatgggagtgaagggcattctggtactatgtccctagcccatcatagatgcccctctgctgagtggtagctaggacgcttcgtgtatgaacatttgtcgtccgtcagctctgaatgtactcacttctcttctagaatctagccacgccctcccgccaggcgtggagagaaagggtgctcctcgaggtgctcctgtcatacatcagcccaaacggcaagatagcaacataaatatacaagaattagtcacttata

SEQ ID NO: 648897 - DNA, 879 bp, Homo sapiens
ggataccggcttttaaaagtagaagaaaaaaactacaaatgcatgaatgtacccaactgtgtgtgttttttttttcttgtgtattttccaccttcctacacttccagctgatgttttttttggttggtggttggtggttttttttttttttttttaaaattagaaagaagacaagggtcttgctattgtggctacagggtgggtcttagaatttcttgggcctcaaggggatcctcttcacatgggcctcccaaaggtgttggagattttgccacagcccttaattgttgtttggtaaaggtggcttttctcaaagattggggcaagagtagttttctataagactgggggattaaatttaatcttttctggtctggtaatttctctgggctttcaatggttactttatttggtacaaataaaatttcccaagactttgtatgaatatagttggtggataagtggtcctttgatagtagtcctgctttttaatcttccagctactggttaatcactttcttttggcaaattggcgaaattttttacttgggctatttaaccatggggtttagaaactttccgggtcttagagtccagaaaatgttatcgatgtgtggagaatcatgcttaattccatccagtgtttttttgaaatatttgccttttgaaaaagtgacggtctgtggggagctttatatacacaatgtttgtattgagagacaatcacttgagggtgtccgaactaacactttgtgttaaaaataatttttttagacaaatttgtggtttccagggatatcgaatttgacgtttttgaaaacccgctgtttggggtgcaaaagttctcttggtgggaaaatttaccagttttttgcatgt

SEQ ID NO: 648898 - DNA, 303 bp, Homo sapiens
  misc_feature (205)..(205): n is a, c, g, or t
tattatctcactgtggtaccccggaggagttattcgtaggccaactacaaaacaaaacagcaacaaaagcttgaagtacttcttgcacttaatttcctccttcataaaacagtttcaggccttataagacttctttgacaaagctcacaaccaactgcacataggacagcagggattccacagggaccttctcccactgcaaganctgaactactttgagatgcccagcaactccctggtagaccaaggcctacgaataactcctccgggatccgtgcacgttaacgattactaggactatgc

SEQ ID NO: 648899 - DNA, 150 bp, Homo sapiens
cattcggcctaggcatctctcatggaaaatggcagtattaacggttccagatgtgaggggtcaggcctctgtgcctgtatctctggactctgcctgagggcctggccctcacatctggaaccgtttacatacggcccttttccatgagag

SEQ ID NO: 648900 - DNA, 266 bp, Homo sapiens
ctaaacaacgagtacagagagcatcttagacatgacctgtcatatccaggtgactgtatgacaaaggtaagatagttgatttctgctcttgatagcttaccatttattcaagagcagccaccaattaagcacacagccaagaaacccagagaaggtgatctcgaaacctaagctgagtagaacaggcaaagctgtacaggagagttaacggaagagggaggtatctggattcaagcccgggcaacaagcaagaccctgtctcaaaa

SEQ ID NO: 648901 - DNA, 1091 bp, Homo sapiens
  misc_feature (1091)..(1091): n is a, c, g, or t
ggagagagagagagagagaactagtctcgaggttttttttaattttttttggaaaagcaattttatggaaaaattgggagggaagtcttccatattattttataatagtaaaaatactaaagtggaatgtggctaaaaaaacgccggggctgcagacggacagcggcagcgtctgggccaggaggcttggaggggcccagggatggccacccccacagggagtcagggagggccgtggggcgacagcgaacaaggttaagcgtcgaaaaggtcaaggtgcaaccggggaaagactcatcatgaggggagaggcctcccggtgggaacagtccaccaaaaacgtgtgacacacaacggggaacgggcgagagaggctaccccgtggtacacaacagactaaaaacacccccaaaaagtgcattgtgaaccaaccgttcaataccacaaacaaagcacagtatggaaacacacagtagacacccatacgtgtcccaacggggaataaaccccgtggacccaatccaccacattcctcgtggatccacatcccagggggcccaagcccctccgggagtaacagtcctcgagagacacggagccctaaagagctaggagaggagcaagacatgtaatagccctggacaaacccccccagagaaagcaaggcgtgcgtggcacaagacaatcaaccccaaagacagagggtacagaacatctaggtcagcccacacagcgataaaaacactagaggagcccaagggccaccagaaagagaatagaccaggaatacagcctgagacgaacgacgacacgaggcacacgaggggagcggagcgtagcgcgtggccaccacgaacgtcagacaggggtgcaacccacacttggcgggcaacagcgcaaccctagggccgggggccccaccgacaaatgtgccacacgatatgcggcgccaatcaaggtgggcaaaaaagccgccataacaaacgtgtacccctaaagtaagaatcacgacgatgtgtatcactagaaaggagctagagagggccaacaaccgggagagaaaaaaaccacgggggagccgaaaacacacn

SEQ ID NO: 648902 - DNA, 844 bp, Homo sapiens
  misc_feature (161)..(161): n is a, c, g, or t
  misc_feature (427)..(427): n is a, c, g, or t
cagagctcaaaccggccggggcgaaagaagggggaaaagcaggccaacaattgcgagcaacgtaaggcccccgggagcgcctggtagcgcgatgtagtgaagcaagcgggggaaccgggccaagcaccggacagctggagaaccgcccaccggagttgacnacaacaacgcccgcatagcaccacagttggtagtcctccccagagtggactcgcgcgcgccgtgatccgtctcctcctagcaccctcaacccccgaggagaacataattgggcgcggacgaacaaagcccccgagcgcaggaatagctctcattctgcagcagaaatccccgaacgcgatgagtgacagtgccccctccaaagaatgaggtcattcatgttctgttagacgcccacacgcgagttcggggtgcggcactcaatccncaccaatctacaacagagggagatatgtccccctgcgcatgaacaagggagtgcccgcccccgtaagaagaatctgctccacggatgctaggacacagacacctccattacacaaatgaatggcactgacgcgagacgagacctctcatcttaacagggccactcgacgcatagagagagtagcaacgcaatggaggccccagcgcctcatgcggcttatgcgtaagggcttctccctagaagaatatgcttcgaccgacgtagagaatatcccccgccgaggaaggtgtccccaaacacaatagatcatcattggggtggaagacgcaggagacagtgacgatgtctcagactggtgaggaaggcggcgaaatacaataaaggatcatctaccccgccccacaatgatacagagaa

SEQ ID NO: 648903 - DNA, 445 bp, Homo sapiens
  misc_feature (15)..(15): n is a, c, g, or t
  misc_feature (36)..(36): n is a, c, g, or t
  misc_feature (74)..(74): n is a, c, g, or t
  misc_feature (155)..(155): n is a, c, g, or t
  misc_feature (291)..(291): n is a, c, g, or t
  misc_feature (301)..(302): n is a, c, g, or t
  misc_feature (417)..(417): n is a, c, g, or t
cggcggtaaacatcnaatatggggacgttagtcggntcttacgccagtgtcgcgcgcatgttagatgaaaggtncaagcgtgccctggtccgaaggcgtgctgttaaccttcgacgattttctgtcgggaatcgaaaacttcggcgagcgcattnaaccactgatgcaatgccgcgcccatctacctgcgctgactcaggaggtggcatgatgacgaccttaaccgctcgaccggaagccattaccttcgatccgcagcaaagtgcgctgatcgtggtggatatgcaaaangcttattgcnnacccaggcggctacttagatctcgccgggtttgatgtctcaaccactcgcccggtcattgccaacattcaaaccgccgtgacgcagcgcgagcggcagggatgctgatcatctgnttccgaaatggctgggatgaacagtatg

SEQ ID NO: 648904 - DNA, 963 bp, Homo sapiens
catgagatacagtagttagttgtctgcgcgttctagtagtgatatataagcggagagtttttggcgcccccgtttgttgttgccgccggatataagacgtggtatctaggctctcccaaagaactggcttaaccacaagaggtgtgaccggcgccattcacagaacgtgcggttaagattataactcgccccggccaaacacagtgtttgctggcacaagaaaaaaaggggcttgtcgcccgtgaaaaaaaaccacaaggggaaaaccacagagcagaccttggggaacatcaagtgggcccaagatcacagggagcatcgtgcatgggcagatagaccccagacaacttatttagggagatcgactcttaatcccctccaaagtgccagggacaccagacgccatttatttccacggcggggcagccccgcccccgccgttggctggagtacaacgccagaccgccggtccacgagtgcgtatgatgtggtcaactcccgcatctgttgtacagcgataattttgggcagaacccgtttgtataacgctgaataaggggtgtacattccactcaagcaggttttaaaagacgctgggagtgtggaagtaatgtaaacacacgaacaagacgtggagacatttcttggaaacacctctgcgaaaaagaacgacaagttgacatatgccccttaacaccacgcaccgcgtggccatcatggtatccccttggtccaggaataaagagagttagagacctcgcgctccttcttgtgaaaaatcgggggggacagaccatagcgagtttaccctgggcaaggcggttctggctaatatcccggccccccgagcattaacgaaaagataaaccaccagcgagcatttcgttgtttcagtgaaaagtaacagaagaaaattagaaaactgttctaaaaaaaaaaagttttataaacagccacaaaaca

SEQ ID NO: 648905 - DNA, 824 bp, Homo sapiens
  misc_feature (23)..(23): n is a, c, g, or t
  misc_feature (62)..(62): n is a, c, g, or t
  misc_feature (164)..(164): n is a, c, g, or t
  misc_feature (212)..(214): n is a, c, g, or t
  misc_feature (220)..(220): n is a, c, g, or t
  misc_feature (224)..(224): n is a, c, g, or t
  misc_feature (226)..(226): n is a, c, g, or t
  misc_feature (234)..(234): n is a, c, g, or t
  misc_feature (237)..(237): n is a, c, g, or t
  misc_feature (252)..(252): n is a, c, g, or t
  misc_feature (254)..(254): n is a, c, g, or t
  misc_feature (259)..(259): n is a, c, g, or t
  misc_feature (261)..(261): n is a, c, g, or t
  misc_feature (278)..(278): n is a, c, g, or t
  misc_feature (280)..(280): n is a, c, g, or t
  misc_feature (284)..(284): n is a, c, g, or t
  misc_feature (293)..(293): n is a, c, g, or t
  misc_feature (366)..(366): n is a, c, g, or t
  misc_feature (406)..(406): n is a, c, g, or t
  misc_feature (409)..(409): n is a, c, g, or t
  misc_feature (430)..(430): n is a, c, g, or t
  misc_feature (440)..(440): n is a, c, g, or t
  misc_feature (457)..(457): n is a, c, g, or t
  misc_feature (468)..(468): n is a, c, g, or t
  misc_feature (476)..(476): n is a, c, g, or t
  misc_feature (479)..(480): n is a, c, g, or t
  misc_feature (482)..(484): n is a, c, g, or t
  misc_feature (497)..(497): n is a, c, g, or t
  misc_feature (502)..(503): n is a, c, g, or t
  misc_feature (540)..(540): n is a, c, g, or t
  misc_feature (544)..(544): n is a, c, g, or t
  misc_feature (553)..(553): n is a, c, g, or t
  misc_feature (587)..(587): n is a, c, g, or t
  misc_feature (591)..(591): n is a, c, g, or t
  misc_feature (600)..(602): n is a, c, g, or t
  misc_feature (605)..(605): n is a, c, g, or t
  misc_feature (617)..(617): n is a, c, g, or t
  misc_feature (619)..(619): n is a, c, g, or t
  misc_feature (623)..(624): n is a, c, g, or t
  misc_feature (640)..(640): n is a, c, g, or t
  misc_feature (651)..(651): n is a, c, g, or t
  misc_feature (653)..(653): n is a, c, g, or t
  misc_feature (657)..(657): n is a, c, g, or t
  misc_feature (663)..(663): n is a, c, g, or t
  misc_feature (665)..(665): n is a, c, g, or t
  misc_feature (667)..(667): n is a, c, g, or t
  misc_feature (669)..(669): n is a, c, g, or t
  misc_feature (681)..(681): n is a, c, g, or t
  misc_feature (686)..(686): n is a, c, g, or t
  misc_feature (693)..(693): n is a, c, g, or t
  misc_feature (699)..(699): n is a, c, g, or t
  misc_feature (706)..(706): n is a, c, g, or t
  misc_feature (715)..(715): n is a, c, g, or t
  misc_feature (720)..(720): n is a, c, g, or t
  misc_feature (724)..(724): n is a, c, g, or t
  misc_feature (744)..(744): n is a, c, g, or t
  misc_feature (747)..(749): n is a, c, g, or t
  misc_feature (752)..(752): n is a, c, g, or t
  misc_feature (812)..(812): n is a, c, g, or t
ttccaggggcttgcatgtctcgncccaacctggtcggggagttcactttcagaagctcaggnatggaccttccccagccccaccagcaaatcatctctccctgcttccaggagggtacttactctccaactagtgggctttatgggccaggaaggatgataggnaggggtgtgtggggtagtaggtccctccaaactgagaaatacgaaagnnnaaatgnccangnttctatcnttntatgattgttttatngntgccncnctgtgagactgaggggnancggngaaaggggnggggagtgttacaacccttatggccacttctaggttgtgcagactgccactcttgttactacgatggactgtnagatcagcaggtggcccaggagggcttgcttgatgcgggntgntttttccttttgcctccgtgncatgcctgtnaggtagttggtacttantggaatcccantgcatgcntgnngnnncaggcacagagangcccnntgactttcccaaggtcacacagcctgaaagggaaagncggntgttccagntgttttccttctaacacccttgggcctgcctccngctngatgctgcnnntcngtcctctcttgngngtcnncgccccggcgctatgngctggtcgtcncnggtngtgtgncncngngttggggctcgngcggntcttgcntttccnggtgccntcttccccncagtncccngtgggcccttgcgttcctgnttnnnttnctccggctctgtctctctgttcctgccccttgctctgtgccctggcctctctggcccccnttccgtccgtgc

SEQ ID NO: 648906 - DNA, 372 bp, Homo sapiens
ggcgggagtgctatgaggatgaagatgccagagtcggtctccaagagggagtggaaataattggtcctagttgctctgtgagattcaatcaacaaagtgctgtcctcggggaacacactagctaggaacccaacatatagctcttcttttggagggcagcatagaggggctttgggccctgggacccagtacgctgtggttaggtcacagagagctgggtccagctaactcccctgcttcttctccagcaccacttcaacctccttcaagccccggcggtcagagaacagctaccaagatgccttttcccgccgccacttctctgcatcttcagcctccacaaccgcctccacggccatcgccgccaccact

SEQ ID NO: 648907 - DNA, 128 bp, Homo sapiens
gtccaggctgcagtgaaccgtgatcgtgcccctgcactccagcctgagtgacataatgagacccccattacaaaaaaaaaaccaaacgggccaggattggtagctaaggcttgtaatccaagccgggc

SEQ ID NO: 648908 - DNA, 772 bp, Homo sapiens
  misc_feature (36)..(36): n is a, c, g, or t
  misc_feature (64)..(64): n is a, c, g, or t
  misc_feature (67)..(67): n is a, c, g, or t
  misc_feature (92)..(92): n is a, c, g, or t
  misc_feature (133)..(133): n is a, c, g, or t
  misc_feature (140)..(141): n is a, c, g, or t
  misc_feature (147)..(147): n is a, c, g, or t
  misc_feature (149)..(149): n is a, c, g, or t
  misc_feature (172)..(172): n is a, c, g, or t
  misc_feature (204)..(204): n is a, c, g, or t
  misc_feature (245)..(245): n is a, c, g, or t
  misc_feature (255)..(255): n is a, c, g, or t
  misc_feature (283)..(283): n is a, c, g, or t
  misc_feature (295)..(295): n is a, c, g, or t
  misc_feature (301)..(301): n is a, c, g, or t
  misc_feature (307)..(308): n is a, c, g, or t
  misc_feature (312)..(313): n is a, c, g, or t
  misc_feature (315)..(315): n is a, c, g, or t
  misc_feature (330)..(330): n is a, c, g, or t
  misc_feature (370)..(370): n is a, c, g, or t
  misc_feature (372)..(372): n is a, c, g, or t
  misc_feature (374)..(374): n is a, c, g, or t
  misc_feature (376)..(377): n is a, c, g, or t
  misc_feature (379)..(380): n is a, c, g, or t
  misc_feature (414)..(414): n is a, c, g, or t
  misc_feature (480)..(481): n is a, c, g, or t
  misc_feature (487)..(487): n is a, c, g, or t
  misc_feature (489)..(489): n is a, c, g, or t
  misc_feature (496)..(496): n is a, c, g, or t
  misc_feature (499)..(499): n is a, c, g, or t
  misc_feature (502)..(502): n is a, c, g, or t
  misc_feature (505)..(505): n is a, c, g, or t
  misc_feature (513)..(513): n is a, c, g, or t
  misc_feature (516)..(516): n is a, c, g, or t
  misc_feature (523)..(524): n is a, c, g, or t
  misc_feature (528)..(529): n is a, c, g, or t
  misc_feature (555)..(555): n is a, c, g, or t
  misc_feature (637)..(637): n is a, c, g, or t
  misc_feature (651)..(651): n is a, c, g, or t
  misc_feature (763)..(763): n is a, c, g, or t
ggtacactatacaaaactttgtaaaaaaacagcctnctacgctccgcaattccccccatccccnccnccccccaccatggctgcccccaccnctgagggcctggcagctgctgcgccctcgctttcttgacanttccctnncttctntnctctcttccccaggccaccccancagacatgtttgccaaggcctttcgggtcaantccaacacggccatcaaggggtcggacaggagaaagcttcnagctgatgtnacaactgctttccccacccttggaactnatcaagtctctnacttantacctnnaaannangacctcaacattgtnaagttgtatgctcacaaaggggatgcagtgactgtgtacntnantnntnntaaccccatcctctttgaactggagaaaaatctntatccaacagtgtacacgctgtggtcctatcctgatcttctgccaacctttacaacatggcctctnntgctcnanaaactgntanggngancagatttnatnctccctnnactnntgatgccccctgctggtctccctcangtacacaagggccacctctgtcccatttctttggtggggaacagaccccctgtagccattggagttgcagccatgtccacanctgacatgctcacntcacgcctgaagggaaggggcttctctctgctccacacttaccaggaccacttgtggcggtctggaaacaagtgctctccaccttccattgctccactggccctggattcancagatctca

SEQ ID NO: 648909 - DNA, 423 bp, Homo sapiens
tgcagtgcattgtaaaggtgaaccatacttaaagtggatagtccatgacagaaaaatgttctttcctcttctttttaaaacaaggtcttcctctgttgcccaggctggagtgcagcagcgcagtatacgtcgctgcaatcttgacctccttggctcaaatgatcttcccactgcaacctcctaagcagttgggaatataggcatgtgccaccatgcccagttacttttttatttttattctgtagacacaaggtcttgctgtgatgcttaggctgatctcaaactgggcctcaagcagtcctcccaccttggcctcccaaggtgttcggattatcgtgcccaaacccagatgaattgtcaaaagcatgagttcttaaggaaaggtagctattgtaactgtgaaaccaattttcactgtggcat

SEQ ID NO: 648910 - DNA, 230 bp, Homo sapiens
tgtatggtagactcattgtaataccatttgagcctagaatattctggttttttgagacgtagtcttgtccatattgcccaggccgaagtgcagatgggattacacgcgtgaccaccatgcctggccagaatattcttcatggtaaaatttaaacgctgtaatttccaacagtcttgcagagttatagatctaattagatttcccatttctcctgaagtcaaatttggtta

SEQ ID NO: 648911 - DNA, 312 bp, Homo sapiens
  misc_feature (15)..(15): n is a, c, g, or t
  misc_feature (28)..(28): n is a, c, g, or t
  misc_feature (241)..(241): n is a, c, g, or t
ttgaattcctaagcncaaacaatcttcnagccaagtagcctcccgggtggctgggaccacaggcatgcaccactaagcccagctattttttttttttaatagacagggtttccctatgtcgggaaacctatgtagggtggtctcaaactcttggcctcaagtaatgctcttgcctcagactcccaaggtattgggattataggcgtgagccatcacacttggccttgggtttgaattttanactagaattgtactcttgtggaatttgtatgtaaagtaaacagcaaatattaaaacaccccaatttctttc

SEQ ID NO: 648912 - DNA, 569 bp, Homo sapiens
agcctggccagcatagtgaaaccccatctctactaaaaatacaaaaattagccaggcgcagtggcacacccctgtaatcccagctactcgggaggctgagggaggagaattgcttgagcccgggagacagaggttgcagtgagtcaagatcgtgccactgcactccagcctggccaacagagcgagactgtcccccccaaaaaaaaaaaagagagagactgctttcaaagaggaccaagactacggtgaaattaaaacggttggctgggctgggcatggtgggctcacacctgtaatcccagcacttggggaggccgaggcggttgggatcacctgaggtcagaagttcgagatcagcctgaccgacatagtgggaaccctgtctttactaaaaatacaaaaattagctggggcatggtgggaggcacctggtaatgccagctcctccagaggctgaggcaggagcaatcgttgaacccagtaggtgcgaggttgcagtgagccacagttgcgccattgcactccagcctgggcaatgagtgaaactctgtctcacatacacaacttac

SEQ ID NO: 648913 - DNA, 115 bp, Homo sapiens
tagaggatccttaagggtctggaaaggggcacctctcttgaacccaaatgctctctcttcttatacccaaaccatggctctatttcttcttcacatccattgtctcttcatgtct

SEQ ID NO: 648914 - DNA, 113 bp, Homo sapiens
aagggttctttggccgctaatttttgattttttgaaacacgcggtttgccacattgcccaggctagtcttgaactcctggactcaagccatctgcctattacaggcatgaggc

SEQ ID NO: 648915 - DNA, 250 bp, Homo sapiens
tccgcgtaagcacatgtcttacagtacagaatgttcattctagtctacatctattactttcatccttctacaggaagttacatagccacctgtaggcactttctcatccttagtataccatatattcacattatatgtcttaatcaacactaagacaaaagtaggaaacataggatcatcaattactacatgaattgtaccaattctattcaactaaaccaacactaatcattcgaaaatgtaaagataa

SEQ ID NO: 648916 - DNA, 370 bp, Homo sapiens
  misc_feature (46)..(46): n is a, c, g, or t
  misc_feature (116)..(116): n is a, c, g, or t
  misc_feature (189)..(189): n is a, c, g, or t
  misc_feature (206)..(206): n is a, c, g, or t
  misc_feature (230)..(230): n is a, c, g, or t
  misc_feature (258)..(258): n is a, c, g, or t
  misc_feature (340)..(340): n is a, c, g, or t
  misc_feature (342)..(342): n is a, c, g, or t
  misc_feature (346)..(346): n is a, c, g, or t
acccctggcccaacatggtgaaaccccgtctctactaaaaatacanaaattagcccggtggcgtgggcctgtaatcccagttgctcgggtggctgaagcagaattgcttgagcccngaaggtggaggttgtagtgagccgagatcgcggcagtgcactccagcctgggcaacagagcgagactctgtcnagaaagaaaagaaaganagagagagagagagaaagagaganagagagaaagagagaaagaaagaaaganagaaggaaggaaggaaagaaagaaggaaagaaagaaagaaagaaagaaagaaagaaagaaagaaagaaagagagagagagananaganagagagagagagaaagaaagaaag

SEQ ID NO: 648917 - DNA, 314 bp, Homo sapiens
ctgagattgagccactggactccagcctgggcgagagtgcgagactacggctcaaaaaaaaaaaaaaaaaaagggtaaaatttgaaagttaaaatgactccttgatctgggggctgcaaaagggatttggtgtaagcgggcatgaaaacaacataagtcccctcggacatctccagcagagctctggagtgactaggtgtattaccaatgagcagtaatatttggaagggaatcttttatttcccttttccccctgatccagtagggtctcaacggggggcttaaaattttcagttaacccagtgcggtttaac

SEQ ID NO: 648918 - DNA, 220 bp, Homo sapiens
  misc_feature (46)..(46): n is a, c, g, or t
  misc_feature (53)..(53): n is a, c, g, or t
  misc_feature (77)..(77): n is a, c, g, or t
  misc_feature (162)..(162): n is a, c, g, or t
  misc_feature (185)..(185): n is a, c, g, or t
  misc_feature (200)..(200): n is a, c, g, or t
caccttggcacggggcaaaaaaattggtgctaaaccttcacccctnagcacgntcagtgagactggtcatgcaagcntttacagtgccatgctcctcaagccgattttttcttatagaaatgttgccctatttgttttctccaatgtatggtatgttatatnattttattattttattttatttnattttattttatcgngggggggcacggtacctgcc

SEQ ID NO: 648919 - DNA, 702 bp, Homo sapiens
gctccctcccgtgcgtcgttgtggccttgcccgctcgcccgcgggggactgcgcgcgctccggtccgcggcaggggcggggacgcccggcctgtgggccccgggcccccgatgatagagctgaggctcggcctgggagctgtgagtatacccacagtccccggtagcgtaggatgaatcgcgtgcgcagtgaaccaggtgtgccttcgcgggatccagtgccttaggcccaggaacgccccgacgacagtagtgccgcggggacgcgcggtcggcctggggggtggctgcggacggtcggggccgaggcctctggcgcggagctgctcgcgaatcgcagaagcagtgccgcaatgtcgtcgattcgccattcttactcattgcggggtcgcgaccatgctacccgtgtggctgctggaggatatgccgcgccagggaggccttccactgggacgagcgcgggcgcgccgccgcctactcgccctctgaggcgctgctctacgcgctcgtgcacgagcaccaagcgtacgcgcattacctgctggccacgttccgcggcgcgcgctcgcaccgccagttgccggcttccgctgctgcgcggctcccgggccggcaggtggcgctggcagtgcgctacaaccgctgtgggcaatctgcgcccgatcctgcgcaccttgcgcgaagttcccgtgcgaggagcggg

SEQ ID NO: 648920 - DNA, 448 bp, Homo sapiens
  misc_feature (11)..(11): n is a, c, g, or t
  misc_feature (16)..(16): n is a, c, g, or t
attaagtggtntgttnttttagatggagtttgtgaattatgaatgagtgagagaatatagttagaaagtttgggaatgatagtttgataatgttaaggttttgtattgggttggagtggtttttttttatttgtaggattatgattaggtttgttattattttttggttgttgtgaataggtagtttaaagatgttaatgtttggtggtatttttagttgatatagttagaatttagtagttattatagaaaagagaagtagttttatttgggtatgtttggttaataaagaagaaagatgtttttttagttgaatttaggtggattattaaatatgtatgaaggagaaatttgagttttagtaagagaaattaattttatatttttgatttaggtggatttttgtttttagttttgtataaattttattatttagatagtttgagtt

SEQ ID NO: 648921 - DNA, 130 bp, Homo sapiens
acgaaataggagggtgctcgtagcacagggttgggttcagtatgtttctcctcccgagaagaatccattaaagcagttacataaatgaccggtagacttgtggccacaaagccattgtattttgctttag

SEQ ID NO: 648922 - DNA, 211 bp, Homo sapiens
attcctctaccgagacgttgtctgcaggcactcagatatggtccagacgtttgacataccgacgtaggctttcctacaatacatgctctaacaaacataggctgtaccgaacccctggtaatagaattgtttacctttataccaagaacggttgggaaagcaccaaaatctgcatgtggtgttgtgccctcagtttccggggaatccctct

SEQ ID NO: 648923 - DNA, 754 bp, Homo sapiens
tggctgtagacggcaggagacttctgccccgtggtgcactgcgagcctcgagacgacagcgcgggtactgccagcatgctgaagtgcgcctcccgcggatgcggccccgacggcgccctgctcgcccatgccgatgctgatgctgctggcagcggctgtgcgggatgcttggctgcttgcttggcctgccagcgttggctgctctgcctgtggcctgctggtgtgcccagtgacagccctggctgccctggtagccggcttcgtgtgcactggcactgcccccagaggcgtgtgcactgccggctgccctgctgcccgctgatgcccatgcagggcgtgcgctgcagagtcccgaggaggagctgaggggccgcggtgctgcagctgcgcgagaccggtcgtgcagcagaaggaggacgctgggcgcgcagcgcgaggccatccgcgagctcacgggcaagctagcgcgctgcggaggggcttgcgggcggcaagggcgctgcggggctgggggccacgggcaaaggacactatgggcgacctgcgctgggaccccggcacgtcgtggagcacgctcagccgctcgctgcagaccctcaaggaccgcttgagagcctcgagcaccagctcagagcaaacgtttcaatgctggctgcggggacttcgcgaggtgtcagagcggtggggagctggagagagtcttgcaggtgaaacttgagaccgaaagtcctgtgcaatgaactcggccggggaa

SEQ ID NO: 648924 - DNA, 236 bp, Homo sapiens
ccccccctttttttaaaaaaaaaatattttaaggggggcgggggggggaaaattttttttaacaaccccgggggattttgccccccttgggaagccccctttttttttgtttgggggaaaaaaaagcccccaacccccctggggcctgggggaaaaaggaaaaattttttttttttttgttttttaggggggggggatttatgggttttccccccaaaccccggttttttttttta

SEQ ID NO: 648925 - DNA, 119 bp, Homo sapiens
atagttaatacataaatagcagaaagtataggggttagtccttgctatattatgctatggttataattaatcatcttatccctatgcggtactatatctatatgcgcccaggtttcaat

SEQ ID NO: 648926 - DNA, 126 bp, Homo sapiens
ggacctgtactgtgcctgcgtgaaatgctcctgctagcaatctgcatcatcgggtgccaatgaccacgcatccatccagatgaacgtggcctgaggttgacaaggtcacaggcaggcttcatgacc

SEQ ID NO: 648927 - DNA, 170 bp, Homo sapiens
  misc_feature (159)..(159): n is a, c, g, or t
aacgaaaacggcgatgtgggagaactccttcacgaagtcggcaatctgctccccggtgtccccgtacttcactaaccagtggccggtgctgcaactccatcttctggttgagggaatccacaaaccactcataccccatggaaaattgcaggccatgtncaacgcctccg

SEQ ID NO: 648928 - DNA, 414 bp, Homo sapiens
aaacaccgccctccttgcacagacaaggcaagtgtggttagcaagctcagaaatctctgcacctctgatcacagccttggcttagggccccattccactctgcctttctgtcacctgagtccactaagaaagtcacctgagtccacctggacatattccaccttcctggaactggaatattgttccacataagctcatacgcaagataattgttggaaggctaaaagagaagaaagatttgtgatatcattgatcaaataacaccagatattgtgtgacaggttgcaagtgctgttgagggaagtcagggaccccgaacagaggaaccagctggagccacagcagaggaacataaattgtgaagatttcatggacatttatcagttcccaaataatacttttataatttcaaaa

SEQ ID NO: 648929 - DNA, 1211 bp, Homo sapiens
agcgggagtccactgtcagcgaccgagcgggccgtcgccgccgccatgaaccccgaatatgactacgctgatcaaagctgtttttgattggcgactcaggcgtggcgccagattatgccctgactcgtgccttgggtattgctgagtgatcagcagtatcacagatggagctacatcgaggcaacccatcgggaggatggcacgtggcgataggatcccgtaagaccatcagaggctggtatggcatacagtcttactcaaatcttcagatcgtaggtgacacaagcgggagtccaaggcaactggattccggtagcattccactatcactaatgcgtaccgtaaccgtggagtgcgttcctcgagttgagtcaatcaatccgttggattgttattgaacgattcaagcttgtatctcaggaaagtcccttatcgactcgagaaccgtgtaacagcagttgggtcttgtcaccggtgcaagatttggactcggcttagtggccgaagcctgattaaccgtttctaatcagaagacgtcacgttgcgttggagccacatcaaatgtatggcgacaaccttcacacacacaaggaaatggatgtgtgggaactaaacctattctaaccagcccatacgggaaggtattggcaacagaacttcctcatgagggcgtaataccccggtatctattggggattgaactgacggccggctccattggtaaacatgaccccacctcgaacactggcatcgtaggccatgggcgattccctagttgagccatgatgggcctttgccattgaacaaattcttcaacacatgcaggggactggtgggcggccctttgtgatgacaagccctcctccttgggggagagtctgaagaccggggcctcccagatgttcttccaaatggacttcttgaaccatcgtcgactccccccctttggttcaaaaggtcccccgaggcaatagatccgatagttaggggcagtagggcatagacactaaccgcaggaacgaggggtgacccaccacattgggtaacgcatttgtgggcaaccacggtggaacggctgagcggggcaatcctcatttccattcctcacgcacacttgtacgtatgttccctctatgtgtcaaggcgagcgtgccaatgtgaatgtggttaacctcttgcctcactttccttacgacctctccgttcccatt

SEQ ID NO: 648930 - DNA, 140 bp, Homo sapiens
atgggctcccgagtcaaagctctgctctcggcgttcggaggccagctccgctgcagtggctcttcaggcccatgggctcattcctgacaacggctttccaggccagtttttcccttccggcggccctctccgggcccaga

SEQ ID NO: 648931 - DNA, 123 bp, Homo sapiens
cacccctaaaatggcacatggccaatgtgataatttattgctggctgtttatttatcggcaacatgccgtgttgctgttgcacccgcaatggatgaagacatgtggcatcatgcttcaaccag

SEQ ID NO: 648932 - DNA, 150 bp, Homo sapiens
ttaaatgcccatgcctccataataacctttaagaaatgaataacctttgaagcctcctaaataggcctccaaggaacaaccaaataattccgcttaaatgtttccagtaaaagtagcccgagaccaatacaaaatgttttcccctaaagg

SEQ ID NO: 648933 - DNA, 163 bp, Homo sapiens
acagaagactggactctctatggctctcacaatggctacactctattgacaacatgagtctgtacactttcacagtcccagtacgtcacggccactacagacatccccgatttcatgtactaacgggcgcatagctgacgtactccatacccacacatcttag

SEQ ID NO: 648934 - DNA, 358 bp, Homo sapiens
aggaagagggaagcccattataaaaccatcagatctcctgagaacttccacgtggtcccacccttgacaggtgggaattattacaattcaaagtgagatttgtgtggggacacagagccaaaccacatcaaggaacataactcaaaataatgagagccatgtatataacaaatccacagccaacatcatactgaatgggcaaaagctggaagcattccccttgaaaactggcatgaaaccaggatgccctctctcaccactcgtattcaacatagtattggaagttctggccagggcagtcaggcaagagaaagaaatagagagcacccaaatagaaagagaggaagtcaaactatcc

SEQ ID NO: 648935 - DNA, 770 bp, Homo sapiens
cacaggcccgcagcggcgctataccttcggccacaggtagcgcgttccttcgctatgctgaccgtcgatcccgggggcgctagagcgccggctccggggagggcagggaagcgtcagggacctttcttcttcttttttggtattctttttttggagacgggagtctcgtactggtcgcccatggttgggagtgtagtgggcgcagatctcgggttcactggcaatttccgcctcccgggttcacgccattctcctgcctcagcctcccgagtagctggggactacaggcgcccgcaaccaggcccgggctaattaggggtattttaagtagagacggggtttcaccgtgtgggccaggatggtctcgatcttccgtgacttcgggatccacccaccttcggcctcccaaagtgctgagattacgggcatgagccaccggggcccgggacaagcggtcaaggggaccctttcttagaagccttgctgtggccttgaggtccgggactggggctgtcccggattccggtttctgccatcagtgggggccaaaggcctgaagacggctggtaccgcaaccttgggcgcctcgggtccgggctgcgacgtgggagcgtcctagcctacggaccgggaaccggataggagacgaatagacagggggaaagccctggaacattaggccggcaccacgacagggggacccgttgggcaggtcaggcaaggctgactggccttggggactcgggaaccaggaggcttacgggcgatgc

SEQ ID NO: 648936 - DNA, 208 bp, Homo sapiens
tcggtagcgggaatcgtgttaatatggtattgtgatggcgcaggatcaaagtgaacctttataacaacccaaccaattaaagctaaacatccatttgatcctccatccggtatgcagaagccaactgttgaagatacaagtgatgattcagttactttagcctgggaccccccgtcgatcacaataccatatttaacacggaattccg

SEQ ID NO: 648937 - DNA, 279 bp, Homo sapiens
aagtgtctttcaagaagtaagtatcagcacagaggaagatgaccaaatactgaactcgaactgtatagcttaaccacgtgatctgagaaacacaatcaccaggctcatgaaattatttggaagagactatagaaaggccaagaacccaaaattaaatttcttcctgttaattgcttttttctaatctttgttttagtatttcgtacctgccacttcaagaccatcatcaactttctaagaataaaatacaaagatgcatttcagtcttgtaagaacact

SEQ ID NO: 648938 - DNA, 453 bp, Homo sapiens
  misc_feature (453)..(453): n is a, c, g, or t
gatcgtagcttggaacaggaatgggaggatcttgatccttgaatatgtggcaattttttcatattcgggagcaaactgcttggaaggtccacagcatggagcataaaactccagcagcactgtgtcttggtcaggcacaaaattatcaaagtgtgcatcatttaggaccaagactccattttcttgcttaagttccaagtcgtcttcttcctcatcatcagcttcctcctcctcctcctcttcatcctcaatggcatattctctgtgagaagaatctggatgccttattctctaggaataacaacttttccttaattagcacttcctaatcttcagagttcttatgtctgcagctagctcacttcgaagaaaaatgcagggaccatgaagtagttgttactattcctactggagtacgcgcttcatgggcagggaccacactcacaatctttn

SEQ ID NO: 648939 - DNA, 114 bp, Homo sapiens
attagagctgcaggacccggctcacaagcgccttcttctggacaccctgcagctcagcacgtgatagcggaggcaccacgaagctagtgaactcagaagcccctcgcgctgcta

SEQ ID NO: 648940 - DNA, 172 bp, Homo sapiens
tgggaggatcacatgaagatagacgttcaagaccagcttgggcaacatggcaagaccctgtcgctctctctttctctatatataaaataatcaggcgtggtggtgtacgcctgtgttcccagcttctcaggaggctgaggtgggtgtattcattgagcccaggagtctgaag

SEQ ID NO: 648941 - DNA, 117 bp, Homo sapiens
  misc_feature (82)..(82): n is a, c, g, or t
acatagtggtcaagattcgcagaggtggagtcgagattgcattcagaaggttccggacatctcggctcgttacaaatatcancagctctgcatcttctggaggtcaattacactttg

SEQ ID NO: 648942 - DNA, 431 bp, Homo sapiens
  misc_feature (189)..(189): n is a, c, g, or t
ctttgagaccagcctggccaacatggtgaaaactcatctgtactaaaaaaacaaaaattatgtgggttggtggtgtgcgcctgtaatcccagctacttgggaggctgaggcaggagaatcgcttgaacctgggaggcggaggctacaacgagccgagattgcaccactgcactccagcctgactccgcnctcaaaaaaaaaaaaaaaaaaaaaaaaaggcgtttctgttcaaatagggaaaggatacatccttctttctttctttctttctttctttctttctttctttctttctttcctttctttctttttctttctttctttttctttcctcccttcctttatctctctctctctctttctctctttctttttgagatggaagttcactcttccttgccaagctggagtgcaatggtgcgatctcggct

SEQ ID NO: 648943 - DNA, 171 bp, Homo sapiens
taccagggagcagttgcatcgtgggttatccctcttgtattactgggattaagagggttcagatcccggaatgcctgaaccaactgttttgagcctactttggggataaaggattaattggtcttctggatttggaggcaatcagcggacagcttggaagctgtgtagttg

SEQ ID NO: 648944 - DNA, 261 bp, Homo sapiens
agatccctaacccagaactacaagtgactatatctggtgaatatctacacagataatcatattaatgaaaacaagggatattgatagggtcgggaagacaagagggaaagaactccagatatgcgtgtgtgtgtgtgtgtgtgtgtgtacaccctccgccttctctatagtgtcaggtagcggggttcatacacatacaatcttatggttacttatacaatttttactctcccactctcatttgggtctggtaagggactg

SEQ ID NO: 648945 - DNA, 446 bp, Homo sapiens
cgaaacttcacgtctgaggtatataccagaaggctaatcatatgcgtctaccatatgagctagcaagcttcactctcaggtatacacccaagagaaatgaaaacatgtccacgagaaagatgtgtgcatgaatatcaatagcagcactattcataatgggccaaaaggagaaaagaatccaaatgtccatctgatgaatagatagacacagggtgggctatcctcacaatggaagtattatttggccctgagcaaggaacaacgtgctgatacatactacgacctggataaacactgcaaatattacgctgagtgaaagaaatcagacccaaaaggacacatttgatgattccatttataaaaggtctagaataggccaatctgcagagatagaaagggcccgggttggaggcaatgatatcacgggtaaccgtagacgttgaggg

SEQ ID NO: 648946 - DNA, 683 bp, Homo sapiens
  misc_feature (357)..(357): n is a, c, g, or t
ggaggaacctgtggagtcaaacgtcagcatggccagtttaggggaaaagagggaccaccattcaacccactacagggcttcagaggaagaacctgaatatggagaagaaataaagggttatccaggcgtccaggcccctgaggacctggagtgggagcgctataggggcagaggaagtgaagaatacagggctccaagacctcagagtgaggagagttgggatgaggaggacaagagaaactaccccagcttagagcttgataagatggcacatggatatggtgaagaaagtgaggaagagaggggccttgagccgggaaagggacgccatcacagaggcaggggaggggagccacntgcctatttcatgtctgacaccagaaaacagaaaaggctcttgggtgaaggacaccaccctgtccaataaaaccaaatggacaaggcaaggaggcatccacaaagtgcgtggaaagagctggacacaaattatctcaactacggtgaagaatgaccccccaggaagtggcaacatcaaggaaacccacatgacacttatcaaaacatggaggaagcttagtttcaaaataaacatttaactgccaatacacacttatacaaagaacaaaattacggaaccttttaacccatactacaaccctcttcaattgacactccgcttgttt

SEQ ID NO: 648947 - DNA, 620 bp, Homo sapiens
  misc_feature (390)..(390): n is a, c, g, or t
aaactaaaaaattaagaaataagccaacaaaatgtctccaaaaatatctcccaaagtgctgagattacagacgtgagccaccatgcccggccagccttatttttcataaacacacgtagtagggccaggtgactgtcagtccccttctcttccctgtagcagagctagggagcttcgttcagcacaagagggaatggccaggactatagccagtaggaaacagttttcttctaaatcaagttatgccctcaaagagttcatagttgatgcatttctttgcttggatttttctttttaggcccaggcacatctaatttatatttttctgggaggatggaaaatttgattgtgtttcatagaagtggcacccagaaatgctcacaacatgtncctggtgtcgactgccatgcagagatgtttacgagcagtcatctctcctcttccactgccaaacttcaatggtgcccctatgagtccattggtggtacagtttatagcagtgcgctcaggaagtttgcaaacaagttgtaattttagcaattctcattcctcagctttttatgagtccttgggagaacattttttgcttagccaaagtttatttgatattgctgaacatt

SEQ ID NO: 648948 - DNA, 408 bp, Homo sapiens
gatctcgtccccagtctgttcacacatgagatggtggctttgttattgatcactcggtgtaatagtagcacaggagcaaacgtgcttctctattacgtcgtcctgcacccctgtcccccaccttatccgtgcgtggcaaactcatacctgaggacaaatatttctgcacaatataattacatctatcttcaatagaggagtccttataaaggtcccaaaataataataggccaagggcatgaacaaccaattcccagaatccactgtacattgttacaatacacaggttaggtcgggcgcagtggctcttgcctgtgatcccggcactttgggaggcctacacaggaggatcacttgatgccaggacttcgataccatcctgggcaatatagcgagacctcatctcta

SEQ ID NO: 648949 - DNA, 262 bp, Homo sapiens
  misc_feature (158)..(158): n is a, c, g, or t
  misc_feature (191)..(191): n is a, c, g, or t
  misc_feature (202)..(202): n is a, c, g, or t
  misc_feature (234)..(234): n is a, c, g, or t
  misc_feature (247)..(247): n is a, c, g, or t
taccctcgctgacgtgtatcccctgaaccaagaacctcagggcaggggaaagacagcaaggaacatgtgagcccgaggctgcagaaggaagagtcagtgaatggctgcggtgtgacaacatgcaccaccagtggcttctgcgtggccgcatgctttgngggtgattttcatggttcatgggtggctagcanagttcatcacngtggtacctttaagagacccacgatgtgtacnagtgccaaacagngagtttctggttcct

SEQ ID NO: 648950 - DNA, 224 bp, Homo sapiens
catgctgcaacaggaggcgccgattttctggatgacataataccaggtcactgctctcctccagtgattcctgtgcggcgctccttgaggccgagcgaggaagtggctgtgcgtctccagaaggtcgtcagcgcatggcaagaggcggccaatggccttgctagctgaactgcagctcctcctgcagggccctggagtaccaacttcagcatgatcttgagcag

SEQ ID NO: 648951 - DNA, 144 bp, Homo sapiens
agttgactctagagatcccgctcagagtccaggcaaggggggatgtatatcaaggcccgatgtagtccaggtgaagcttgtggcccttcttggtgccctccaggtgcactttgtggcaagaagtggcagtgaagagtcgcaagg

SEQ ID NO: 648952 - DNA, 719 bp, Homo sapiens
gaggaacgcagatggtgcctcatctgaaggcatgagtgccgtagcagtgccctaggaggtcgagctcaaggggttcgaactccagtggtcagacctgctcatatctcagcattttttgaggaacgaactatcccagatatggtgtgggaagatgcacgcacatatacttgtcaccgagccaccattctggctccaaggctgcatcgtctccactggacgtagcgagagggttgtcagtgttttgcatccgtgggtctgcattccgggtgcttatttgaatccttgcgtctgagatgggactattccctggctgtagacctcactcttcatgtgtcactgtggcctttggacaagttgttactgacatatgtacatggggatgccttgcatgaaagctgccaacggagagggcttgtgcacgtttcagctttaacctttggtgggctttgtatctaaattatcacgactgtgggcatctgctaagctgttgccatgctgtgagaagctcttgaccttttggactgtgcatactttgaaggaattgatgtatgcctgcgttgtgcctctgtgtggtcatgccatgaagctcacaactagggactgaagtaacacgatcaggtccagtggtgcacagactgtcttctcttaatcacaagattagtttgcgaattgaatcttgtgagggcaaaggttgagaggaatggtatctacgttgtgag

SEQ ID NO: 648953 - DNA, 657 bp, Homo sapiens
  misc_feature (147)..(148): n is a, c, g, or t
  misc_feature (155)..(155): n is a, c, g, or t
  misc_feature (171)..(171): n is a, c, g, or t
  misc_feature (196)..(196): n is a, c, g, or t
  misc_feature (202)..(202): n is a, c, g, or t
  misc_feature (204)..(204): n is a, c, g, or t
  misc_feature (206)..(206): n is a, c, g, or t
  misc_feature (222)..(222): n is a, c, g, or t
  misc_feature (231)..(231): n is a, c, g, or t
  misc_feature (253)..(253): n is a, c, g, or t
  misc_feature (292)..(292): n is a, c, g, or t
  misc_feature (309)..(309): n is a, c, g, or t
  misc_feature (321)..(321): n is a, c, g, or t
  misc_feature (340)..(340): n is a, c, g, or t
  misc_feature (363)..(363): n is a, c, g, or t
  misc_feature (370)..(370): n is a, c, g, or t
  misc_feature (421)..(421): n is a, c, g, or t
  misc_feature (442)..(442): n is a, c, g, or t
  misc_feature (532)..(532): n is a, c, g, or t
agtaagtccgtgaggttaaaaagcatcttacctggagtccataggtatttcggatgagcaaagcagtatgttggccagtatgtgtgtttaccaaaatggccgccacagtgattaaagctcagagacgtataagaactgctggtttcnnctgaagncacatggatggcattnagtgttctgtgactggtctggcacnctactntngntgacaaagatgggaangggtctaanagtcatgtcacttataaaagancttgggaggagcttttttcgaaagatccaaagattttgnaaggagagattacagcngaactaagaccncgtagaagataggtagatntcagctcaatataaggaatggtnttgtagnatcagtgcagttccgaatggaataagctgtttgaacatggcttagcagaanctgaatgacacactgttaganattctagggaattctgcactgagtacagcattggattagatctgtgggctgtttccaactcaagattctgatatctcatcataagcattntgagcaaggcagttggtataaaggtggccgtagtaatagaagtcagtgtgaagtctaaagcaattccgcaatgaatttaaaggcaagaattttagggacaaggatacagaaaaatgcctagtaag
